United States Patent Application Publication US 2018/0305689 A1 - sequence listing, part 42

SEQ ID NO: 586224 - DNA, 4001 bp, Homo sapiens
actaaattccaatatgttcctagactccattttgtttccttaatctatttatccttttctgtgtcagtactgtagtactttagctatttcagcttcatggtatgttttgacccttgaaaaagcaagaccctaactctttttaatcttttagttatatttgtttatttgtttattacctagtttgtgatttagaggctttcagggaaatgtcgccttgtctttattataattgcctaaaataatacttagctcagactaggcactcaatataggtgagttgaataaacaaacttaaatcttgtagtcttttttaacaccttttttttttttttactgtttcttaaaaattcttactgatgaaattaatcatgaatacagaaaacaatataaaacaaaaatataaatatccttctacctactgccttgtatccaatttttagaaagaaataaaacaattcttgtgctttataaaattattcttccagtagcagtagctttcaaagtagttatattggtagaatctttatttctttgtataccatggtttgataatgtttatttatttatactacttaaaatgacattatttactctgctatttgttttagaaagaaaaaatatttcctggaactttcacctttagtgagttagaagaatgccatttgaagtaaatagagattcattgtttctctgtatttctcaaagaatcagtagagatattgagaggaaaaaggtaggtttcacatgtcttgctgttcttgatagtcttttaaataaagactcttattatatttatcatcatttaactggaataaaaaaaccttttttttcttatttacacagttctttctcatataaatttggaatattggaaagaaattactggaagaaaagaaaatattagaaacatgggtagtgatgaagcaaagaatctgaaatgcttcactcaaaacctcttgaactgtggaaacgatggggaagagagtatgtcaaatgagatcccggggaaggaatgcgagcttgatagcttgaccaacagcaacaaaatgacctgagaacttactagaaatgcaaatccttgggcctcaccttagactgaatcagaaactctgggagtggggccagcaatctgttttgacaagccctttgggtgattcaattgctgattaaagtgagaaaatcaccacttgagtgcagcaaggagagcagtgtgttgggatgacatgggaggtttaaaaatctgtcaaataacaacaacaaaaaaaattcttgtccctgtcatcaacttccatgtcatgaggataaaagggaagtttgaaaaattatttgagaaaatatggtaagactggcagcaaattgtaactttaaaaattagtaggcacattaggcaagcttctaccacacctctttcttacccagattcacacacacaaaccaggctgtccaaagcacagtcctgcttaattagatactgaggagccaaaacttttccaccccctcccctcagtccctaagacacaacacatcagtttccatgattgctgttcagcagaaccaggccaatctggttttttgcagcttgcctattaaaaagtgactttcacaccctcctgggttatgtaccaagacctttgcccttttgtggcttagcagaatgatttatttgtgtcattagtcaatctattatttcatccaaaatatttccattacctgaaataaactgcagtcccaatgatgaaagctgtgtctctcctcacttttagcagtggtggtcagttgctggcaagatactcaggtacttaaaactttttttttttttaatatttctactcattacttttaatggagcaaagctaatcttctttgaagaaatatttcggtctttgaccataaatattttcaagccattttcataaattgcgggcagcaaaagagattctaaacattatctcccacccactctctcatacttctcactggtattcctgtctcttataactcaacttccctttggagattgggactttgttgtcctttctgtctggtggcttacataacatgtaataatctctctgctgcaaatttccaccctaaatcacaggaagatatgaaacttaataactgttaaatcttttaagtttgtgatactcattctcacaacacagtgtatattcagtatttacttgtctctgaatatattagaaacagctatttaaaatccaactctctgatgagctcaaaacaagagatgggaccctaatgagtatgttacagtaagagaaaaacaaagccctctgaaagaaaggaaaagaaactgtttttccttcctcattttctccctttgaggactgaactatgtcatacttctgctttctctttaaaaagacagaaactctttattctttagaattatgatgaaaataaagctttttactaaggaatcagtgacacacccactttttctaatattccattgacaattaaaacaatgctctaccctagagagatgacgtcactctctaggtaatttaaaccaaaaacaaaataaacataaataagcacactgactattggtatctataattttgaaaaatatatctgctggtatgcacctattatacaatgaggtatcttttacagataccttcaaattttaccttccccttaaactggtgaccttcagccacggcctcctttatgcactgtaggatcctacttttcagatcatctgaaaatctttacaattttaatttatactatttgttctaatacaacttttattggcttgatatgtacaatgaatcattttaaattttatttgatttttctactgaaaagtttatttgctgtgaccatgtggacaaagacacatatctacagaatggtggaggcacatttaaatcagtggcatttctcagcttctaaccattactaaaattgtggtgtgggatagtgaagataaagtttgggatgcatatagaattgtgggtgagggataaccaaaagaagcttgggggatgcagatagaatttgtctcaagctccaacttcatcacttaacccgatgaactactttaactcatgctttaatctgagttgtagttttctcaattgtaaaatgaggatcataatcattacaacaatagatagcagttattgactgctatatgccttgtgccatgaccaaattttttcctacattatttacaatccacgaaataatcctttaagatagaaacaattccttcctaaaaggaaactgaggctaagagaggctgaataatacaaataagaagtatatcctgttgtatttcctttctgttacagtagcactgtgtcacggagtgttgggtgcagatcaaatgagatgctgaatgtgtaagcacttagtaggttgcatgcacatgactcagtcaaagtttaagtgttttgtatctgaacagtgctattctataaaaatatattcacacactaataacatcattttttttcaagtgtagcctgcatccttgaaaattctttaaaaaccataaaatgctactgcctagcataaggcttaatcttggacactcttacagaagttgctttgggtaccacccttcattccctaatagcatttttgctttttcaaaagagcccagattttaaaattttccagataaataaatacaattccttttccagtgtgaggcaggggacatagggttaagaaatttataattgttaattaaaagagtttaaaaaaatactatcatcaactatcaccatcattagataaaaaggagggatatttttgatccagaagggaaaggatataatcccagaacaaagtgtgattctttaaattgaacatacttaatggtaagaaaaactcttaaaattatcttctatctttttattttgctgccagacagtgaaaccctgaaaccctgtcgtggatcagcatggatcattagaccagatttgagaaacactgttttagattaaaagctgtgtgagacc

SEQ ID NO: 586225 - DNA, 4001 bp, Homo sapiens
gagcccaagagaagggggatgggggatctggagagagtggtcatagcacagtttgaactttcagggattcggagatgttggtttcaaaatggaatttatcctcaaatcccaagattatagatctccttccaaactgcattcccttcatggtttagagaacagttaaaagaaaaattgctctccatattttgattgacattaaaaacactgtgaaaatagtttggaacttgatctcttcgagggaaggacagtaattaaactatagcttttgcctgcagcttttctctcacacttactcagaactgttccagggaaggaaattcacaaggaattctgttctcatatatcacttctagaaggagaaataggcattcccaagaaaattatccccaaacttctaaatacaaagagaaaactttatttaatgaatctcaaccccaaactaccgcattgcatggaataaaatccagttgaatcagtcatttgcagctggtagtctttaatagccagcactactaaaaaatcatcagatttaccctgcttgccatatagcatctagtcttcactcaggttctagctgtatatgtctggttttgacaaacacattagaaggattttcagtttacaagtccatctgcatagtcctgttaatagaaggcatctataaatatcaagcactttgttctcatccactttttttgaccatgtattgccacagcactaaaattcccccaccccttgccatcagctctttctaaaaggaattccaggctactaccaactagctgccttgtactactgtttcagacacccaaatatgtctatctagatataaaagcctgcctccttcctttctgaaacacattgccaatcgacatctctttagattctctagacacactcaggcacactttcaaacagaaaaaaagatttcttaaaaaatagtttggtaggacgttaaatgtgctttctaaaaaaacacacccactagcgcatgcattctcttgttattaggttttataggaaacagaccagcctaggcatcttctgtcttagcaaatatcccatcagtgacattaacccaaccagtgctaggtgctagtgatctctccatctctgaccgtatttccttgcaactctggaagtctagttttaaatactggcagcagactataacgcaaaagcctttggttaaaaaaatcattcccttttggcttctcatcaacctaaaggattgttgattttgtttttaaagcaaaacctcttcaaatctttggcaataaaagatgcagaagagactgtgtgagcagtctggtgcagtaggcttgctaacactggcctttggatatcaggtataatctcatatggctgtcctaaacaaaaggctatcctaatcaaagttgccagtgttccctaaatgtaagtctctatatggtcactcttcttgtcccaattctaaaaacaaaactggaaatctcatcctgtttgccttccgggaatatccgtatggcagtgaagcccagtcaggctcgggagtttgcatggtttattgccttgaacattcttgcatctccagctaccttagccaggaatgttgactgaaagccggagaaagtccccagattctctctagaagataaaaaagaaagccttctgtgccttaccttgtagtctgaaacttcttcccgaggactaagtcggaaaggaaggactgatttctttaagcaggagcacagccagagagcaagcaggcgggcaggcaggcagccgaatacacactgctctattcaataaaactccagaccgcccttccttggcccctcccagaagtccatgctaagtgaacacatatcccctatgtttacagtcgggaggcggtggtatgcattgtcctgtcgtttttctaataggcagccaatgacgacaccccagccaaggtggatgcagcctgcctgtggagatgcctgtcattccctaggcatgctcaggaaatcactcatcagaaaacccaagacctaaaaagctctgaaactgcgtgcacgctgccaaaaccagcctgctccatgcccttttttggttatccttagcagggcctctggaagtgaatccattgtcaggaacaatcataagaaatgttaatcttggagaaagaggctgtcttgtagaacacaaatgcagcaataaaaagaaagcacagtctctgaaacaaaaagttaacagatcagtttattgggcgtgggggtggggaaggcttcttaccagagggagtcttaatagtatatttcttttcaaagtacttgcacatacaaaatgagtttaaattgttatgcaattctaaaacctgaaggagacaggacccgggtctgctgagcagactaaattctagcctgaaagaggcacacctccccaaaatacgtctgcatgtgttataaaaataagtgaccaaagggaaaccaaaagcgtaggtcttttttagcaggtaatactggccagaataaacctaaggtcctacaggcttggatatcctcactggcttcactttcctctccttatctcttttgtttcctcagatttggtgatgtggagatagtactagaaattcctagaaattgatgcacatcagagagggtatgaagagacccaccacctgctttgggctggggtagacagatgcatatatcccgcagaggtgacataatgttcaggtgacgtcttgaaagtgctccgaccaactcttcatggttaggatgtgtgctataagagggtcagaattagtagatgctaatgagaattaaggtaactggcccacacatagtcttgtccttttcaatacagaattcactcaattagtacttaattaaaattgaaatcccctttttttggagcacttactatttgtcaggcctggggataggtgcaagatctatgtctcattgttatatgtttgagactgtttcatcactgaccaagaagtttcacaatatttttcctggctaattacaagtccagatactggtctttaaaaatgggaggttttactatatgcctttccctgtttatgaagatgtgacttagaaatgatctctgtttacgaaaatgtccctgccctttgtgcctcttttagaacagttgggaagtagccagttcgcactgttggtttccttcttcagccttccagcattaacaagttacccagaggcatccatatcaactctctacactcatctcttttttgggaaggttgcttccctcccctcttcctgactgctactgctgcacagcccaaaaaactatagctgaggctcccaggcagagggagagatgagcctcaggcatcccaagaggaatgcactttcccagagaaaagaataaataatggttggtgggaatcatacagtcaatgttgcatttcaggtacactgtggcacaagcaggcatttgtggaacaccactgtttataaaattgttcctgtgggaaaatgtcttctgatcccagataaatgatttagaaataaattttcggaacacggccagttttgctgatggggacatcccatatctgacaggaaggaaagatagaataatactacatagtctggtaaactgctgggcttgaacatattgtagggcagacatcaggagttcagaaaacagctgcaattggtgatgtctgtgcaaagatatgacctgtgtccagagacgttccgggtgcatgatctccaggtggtattctccataactcagtgaggcctgtttgaaagtgctattttccattaccgctgctgcttatatcctaaaccacactctccctgcttgtataaataatgccctttggtggaacagcatcagggtataattttgcaatctatgaataaaataaataccagctttccagaggaaagaaaagttgtgctacaaatggggaaaatattatcaacaggaaacacggcagggacctgcattttgcctggtttttagaagataaatggctaaatattttt

SEQ ID NO: 586226 - DNA, 4001 bp, Homo sapiens
ttttaacattctccctggcggaagtcagaatgggaagaaatagtgaaggcatgttgtggagaaatttgaatgctgtagtaaggagaatggactttatcttcataggtgggggctgtagggggctggatcagaaaggggagagagacagaggccgaggaccagatggcaggcaatgacaaccatcccggtgagaggtaatagctgttgaaatccaggaaatggcagagtaaacagagaagagagacacagagaaaggagactgatagaatcataggcatgaaggagtggaaacaagcctcaggaccatgagttgagagagagacagccagccagactgggctcttttcctagcatcccacgctctattgctgatcagctgtgtgaccctgggcaagcccttcctgtgcctcagtttcctcatctgaaatgaaggctttcaatgagatcagtggtttctgaactattccatggagacctaggattccaaggaagttttgatgaagagggtggggaggtggggtagaagagggatgaggagaggggtagaattgtgcagtgggctatgactgcagagtagagcgaggatgaggagctctagatcccaaaccttttctttaaccagaacatctcctttatacaatagcgttccccttaagattaaatttgattttttaaaaagtttgataagcactggactatacagataacgtctaaagtccctttgagctctcccacgtgaataaccaaccacacttacggaaactagctctccaagagatctgctaatgtaatggacatgggtcttgtttttaggaccctgatgagtttctctgtttatttgattaactgttgcacaaacgctggaacaactggaacaacaattgtcatgctgaatcggtgccaaaactctcaaaaatggaaaagatttactgaaaggccatttggtgttctaattcttgtgcggtaccttttcccaagacccagtaagtttttcaaacctcataaacaccagtgtgaaaacggccctttgcatgagagtacaaagacatggctttgctaccgactgttgtctgctttggggtaagttgagttgcccctctggtttctgtttccctgcctattgaaagacagcattgcaccaaagagtctaaaggcctcccttctggctttaacattccaggatttcatgatcctaaacccttggagtccgttatctgaacaattccctgatcaatagcatatgctctgggtcttgttctgtcttagtcagatggtcagtatattgagggctttggctgtttactctaaggattgggcaatgtgtgctttagccaaaatctctgagccctgcaaatggatcattctgaacggagggctaaggtctaaattaacagcagacctttagaaacacaatgctttatggattggtatttgaaacggagaaacccgtgcctaggtataaactcctggcaaatggtccacaaaccaccattaaaatggaaacgagaaaagccagcgaatcagagcaaccatgaagtggaaaccagaaagtttcagacaggtctgaaactcacacactcactgcattcctttcctgcctggtgtctcctcctctcccctcccactcccacatttttttttttttttttttttttacaacaattcgtttgttttttataaaaaaaaaaaagaaaggaaaaaaccaaagagacgaaatgaggactcactgggagagcgcggccaggctgcgtcttccatgcgatccggatccacccagcatgtccgcagttgggaaggggcggcggggcagagagatacggagacctggccaggccgggcggtcagggcgtgggctgggcccgcggaggggccatgtgatctgtggctgaaatgcacggtgcaggatgctcccgtgttctccctttgtgttaacacgttggtctgtccctgtgacgaaagtctgggcttgtcctcagccaaatctactcctcccaacccgttccctcctcacaggatcatcagagagctgattgttattttttactgtaatctctctaatagaagcccatcatgtttagcgatcagagagcactgattgcttcgggagttccagaaatgttattgctgggtagtcagggccaggatctccagtagttttcctgatgaagactttatatgcttaactacaaataatttttccaaggtaagtaactggtcaaaggaaaaagacactgatgcatttgctcagccttttggaaaatagttgatcatggtattacatgcatatacaacctaattctgacaagatcaacagaaatcagcccaccaaaaagttcatccgggtgcagttctcaggctcccattctgagctctgttctcaattagcattggtgtaggtggcttccaaagcaaacagttcccactgagaaatcaaatctgagaaactcctcttatcccttttatccagggaaggagcatgacataaaaatgcaaaccaaatgaaaagggatgaagagagatggccctgctcagtgatgggctggatggttcagcatgtttggtgctcacacctctccaagaaatgtgggcaagagccctcctgagaacatgttgaaacagcaggccccgtctgcacccatggtactctgccagtgatctcatcagccaagctgggcaatggaacctggtcagcagcggcttggaaagcagccaaatcccagttcctgaggagggggtggtgttgattctgtctggagatgacactccgtctcagcttgacttatgaatatggttcttcatctctaatgagcactaaacagactggtatttgggtaccaagctgctcgtgggactggctttctgtcaagtgagaacaaatccgatctccacaatgtagagttaagattattctcttggtaaacagcaggagaagcagtcaacttcacacattgagagcgctttcacggaatgaaagagatctttgagatctgcggcttcatgtcacacgcagacaaggacaccaaagcacagagcatttagacaactcacccaatgtcatggagctgaactgcatctactactcttgtgttcaacttaaagtttaattgggttaggttaagtggtctccactttagctagaacattttggttgttttcttgcttaaatactatgcggtcatcagagtcgtagtttataggccaggcgaggtggctcatgcctgtaatcccagcactcggggaggctgaggcaggtggatcaaggtcaggagtttgagaccagcctggccaacatggtgaaaccccgtctctactaaaaatacaaaaattacccgggcttggtggcaggtgcctgtagtcccagctacttgggaggctgcggcaggagaattgcttgaacccaggaggcggaggttgcagtgagctgagatggcgccactgcactccaacctgagcgacagagtgagactccatctcaaaaaacaaaaaacaaaacaaaacaaaaaatgaagtcatagtttatagagtaaatacagtttaataaacttaaagttaattatctctatatatcattatgtatatatgcatttaaatatctctgattacacatatgatcaccgaacatatattgatgaaagtagcacataagacacccataaaagtagagatacatctgccttcacacaagaggacttaaatatacactgacttgtcctgagtttctcgctctagaactgagacagaaacatgtatcgaggcattctgctgcttctctttctaccgaattttgcccaattaattttttcccttcaattacttacaaaagtcggtggttttctatggtaggtggaataacgtttcccgcaaatctccagaacctgagaacatgttaatttgcgtggcaaaagggaccttgtcgatatgatgaaattaaaggcatagagatggggagagcatcctggattatccaggtgtgctggaatgaatcacatggctctttaaaa

SEQ ID NO: 586227 - DNA, 4001 bp, Homo sapiens
ctatgaaaaacacgtcctgttctagcctcaagacaatttcacaccaaatggctttaaattcctttccaaagctctgatgcccgaattgaaaaataatttccctttttgagcaaaagtcatcagttaaagaagcagaacctgaaaatgctaggagctcatgagttctatgtgcacgaatgttgcgtgtgtctcaacacacacagcgcagaaatctacccattctttctgagaaggtcatcccaactctgtcgcagaggctactgtgggtcactctagaatgtagttattatcaccactaaacagacttcccagccacacacagccggcgctaagctgctattccctgagcccaaaaaagtctccttttttgcagaaaaccggctcagggcctggggatggctggcgccccagtcttggcactcagggaactgcaggcaccgcttcacccaggagctacgggcttcgacccaaatggaagaaaggcgccttcctcacacaagcctcgtccaagaaaaaagagcagtgggaaacgatggtgggctggtggcccgggcgcacgtggcccaaggctaagacgcaagccgatcccctcggtgcacgctctgtacccccagcccgtctggatggggcgtcccccgctcgccctcgccccaagggtggcccagaactacctgctgctgcctaggcgccctcggaccaagtctcgggaagttcactccgcgctgcgctagtccggagaaactaggaacccgagtaaacccagactgtccggggaagacggatcccacccccacctgggcgccagacccatccagctgcttggagctcagagactaggtcccagccggactgcagaggcctctctggttaccccttgcaccctggcgcccccggactcggggtgggtggcggcgaggagcgtgcgcccagaaaggcaagcagtcagcgctaggggccggaggtggagagaaccctgcctcccgcctcccccgatcgccatgactccggcttcgcgaagagacctggttgccgccgggcgctcccacctgggctgcggtgcggctccgagtcccctgccctccctccccatcgcccgggcgcctgcgggcgggggcgcgcagcctggtggccactggcgcctgggggctagaagagcggctcccagcctccagcccgcacggtgccgggacagccgagtccgccgcggcccttccctagccccacgtccccaggcaggcggccaggagccagctccacggaaggcaaggtggccggcgcggcccccagcccgcggggtgggtgccccagtgtcggagccaacaggtacgggaggcgctgtctgccaaccatctgcccactctgagcaccagggcccgcgacagcccgggggtttggacaccctagagagaagcgaggaccgagggaagaagaaaagagagcgcgcgcgcgggtaagctagggagccggcggcggcactcacctcttgctgggccggggctccgcagcccggcagccgaggcgcctccgcacagcgcggggggcttcctccgaggcccgcagggagggggcggtgcggaatggatgcgccgagcgggcagcgctcagcctctcgctcacacccccagcaggcagccgcgtccccgtgccggcatcctcgctgccgccggctccctcggcgcccccgggccgctccccacgcgcgcgccgggacctgcacgagccccctcgtcgactcggagcgcgatctgggcgcgtgcctccctgtccttgtcctctgctctcgtctggggacgtgtgccccgcaccccctgcaccgcgcgctcctctacccctcccgctcccgctggccgcgcgggttcagcccatgtgcgcggctgcctcgctgcgccccggagcccagtggccgaggccccgctggagttgcgcgccctagaaactccatgcagctccggcctcctccccagctcctccccagcggatcccccagggccttgccgccgacagcaccacactcctcgctctgccggcgcccgcgttcaggagccgggcttctgggctcgccttggccgcctgcgccccagctcctccgagggtcggggagcccccaccccccaacctccgcctctccaatggctccctcggtttccaagcagcgcaacctgaggaacgcctcggcgcgcgcgcactcacactcgcgcgcacacacacacacacacacgcatgcacatgcacggcacacacaggcagacacgcggggggcgagcaggcgcttggcagacggtgctccttccttcccttcccaaagaggctgcccacgttaactccggcaaactgctgctcctcagcacaggacaactcaccctagcgcccgccgccttcactacttcatcccaggtgcccacaccctagatccacgattacacctgagcccagggggaaggcggggcgccgaagtggaggggccaatggccgaaactgcggggaccagcattccgcgtgaccgcccctggagacgtccagggaggcacggctgccgcagggcatcgcccacccaccagcgatcccactcctccagggcctgagaacatgtggtgtggcccccacttcttccaaggtcatagaatggatccgatgggaaggagagggcgcttgggcagaggtgtgagctacaaattcgcagactgtctgcaacctgcccatgcgctgacctctactgagtctacgcccagacagacccctgccccaggtctcaagggcaacgcatgtgcttggagtcagcagtcacctttcccagtccccacctgtctgcctcccaagaactgacggaatacacagtgcaaccaaggtttgtcttggcaagaaaaagaaagaaagcagcaaggtgggtctcagactgtcccgtagacagattagacgcttgccagttcctttctgctgcccccaaggttgtgccaataaagaaagagcaacaaacctggccaaagcaggctagtccttccttacagcaccctcctctcccgggtccccagtttcttgtcccctcttggtggcaaagactgctcaccagctcagatgtcttcaattcccagaaccagagaaaagatacatgtgaaaaatttcacaccaatcagaacaaaagcaggcaatgctgctctaagcctctcatgcaaacaactcagcaatcacctctccactgtttggttcaactgccagggaagtttgggcgtttttgtcagccagcagcacagtgtgtgtgtgtgtgtgtgtgtgtgtgtgtgtgtgtgtgtgtgtgtgtgtgtgtgtgtctcacctgggtgtggtttcagagtccctgaggcactcattgtgggtgccacgcctttagcatttagcatttcctaacctgtattattactatcttgtatagaccctacttccctagtaatcttttttaaatatgtttttgttatttttataggtacatggtaggtgtacatatttatggggtacatgagatgttttgttacaggcatgcaatgtgaaataagctcatcatggagaaccgggtagcattccctcaaacattcatcctttgagttacaaacagtccaattacactctaagttattgtaaaatatgagttattgactatagtcactgtgttgtgctatcaaataataggtcttattcattctaacttgtttttttttttttaacctattaaccatccctacctacccaacctcctcaccccccacccagcccccctcacccttcccaacctctggtaaccactggtagattctctatgtccatgagttcaattgttttgatttttagatcccataaataagtgaaaacatgtgatgtttgtctttctgtgccgggtttattttacttaacataatgatctccacttccatccatgtagttacaaatcactggatctcattcttttttatggctgaatagtgctccattgtgtacatgtcccacattttctttattcatttgttgatgga

SEQ ID NO: 586228 - DNA, 4001 bp, Homo sapiens
ctaggacgtagaaaatgtccatggaattccttgaaagatgcaaaagcgaaatccttctacatgatgtaaaatcaaagttgttttctccctatctctgcccaaaaccaattagatatcacggaaataaaatatatacacaagcaaagccaaaattttaagtccacatctgaaaactgaaatgagcttttcaaatcagctcaattcttctgcaagtgagacttctcaggagccctaatgtcccttcatgtcctggcttaaattcgcataagcaaaacaccctaaaccctggttcttcaaaatgaaaaccaagaccctatgaacggctcacaattaaattaacattgaaaatcagagtaaaatagggaactatatatatttcctgaacataaatacacacacctccgtatcagctcacgagccagcaccctaccttcttactttccaagaagcactagaaactttattgctaaaatcagaaaaaatacaaggatgtttactatctctgctactattaacactgtattgtaggcattaaccaacatgattagacaattagaggcataagatgggaaaagaaataaagttattttaaggtgatatgattatatgtatggaaaatcccaaagaattcatgaaaaaacgattacaaataataggtgaatttagtaaagcattagaataagaccaacatacagaatttaacaggacatgtgtagaaacagaagataatgtatgagcagagcctatttataagagcaaacataaaggttttacagatttgaaaaaaactatcaaaaggaaaaagcaaagcaattccttaaaatagaaaatgaactgaaacatgcaaacacaactgtatttcaagttaatggcttaactacagagaaaaccgtttttttcaagttactttagaacataatattttgactgagctttccacgtgagacctaagtctcaggacaaaaagaaccacaaagaaatcatacaaaagagattcatgtaacatcattaggaatcaagattttctatgttagagaaaagagctgtaaatataacaattttaaggttaagtaaaaactctgaaatctagtttgaataaaaatatcactgtgaactcaatttatttttgtctttaaaaaaatatggacgtatcagttgtgtcactgaaaagacgtcaaggtaataaaactcaggcaatgagcactcaaattgtagtctcaaaataccacttccggctaagtaatcagctccatgggaggaaatacgaaaagtcttgtcaggcctaaaagtggataagttctcaatgatgccaaatgacagagaaactaactggaagacacagccaatcaccaaatatggtacaactcattatcctgaaaattgacatgaatgtaattgctaaggaataaagtaattactcttttaaagtaataagaaaagaaccaaacaattgtcctgctttttccatacagattatattccaggataaccaaatagttgatgaagcaactctcttttagagaggtatcataaaccgataaagaaaaaatcatagattaaaacaccaccataatccggaacttgtctccagactatgaaagtacccagatggctcccaaacctggcccagctgggaactgcatgcagctgagcccaccatgctctttagtttctgtgcccacctgtgtgcggaatttattccttctgctgggttgttggtctcgccgactttaagaataaaaccacggacctcgcggtgagtgttacagctcttaaagatggcgcgtccggagtcgtctgctcctcccggtgggcttgcggtcttgctgacttcaagaacgaagacgcagaccgcggccgtgagctttaaaggtggcgcggacccagagtaagcagtaagctttattaagaagcaggaaagaaaaaaacacaaactcaagcggatagcaccccagcgagcttccccagcgggctcggggagccagcttttattctcttattcagccctgcccatgtcctgctgattggtccattttacagagtgctgattggtccattttacagagtgctgattggtccattttacagagtgctgattggtccatttttacagaatgctgactggtgcatttacaatcctctagctagacacagagcaccgattggtgcatttacaatcctctagctagacagaaaagttctccaagtccccactgacccagaagcccagctggcttcacctctcacacccaggggccactgctggaggagcagccccagcccttgtcccctcacccttcccccatggaacctgctttgggaaaaacaaactggaacaataaaaatgccccacattccaaatcaagcccttgtcaaagtcccttgctttcagcccaggaagtttctagaagcagtcaagccacaggacagagaaatatctggtggcccagctctccctggagaatccatctcccacctccaaaaggaagcacccagaccatggaggccacagccccaggcctggctttcctggtaggataatatttagggttaccctctttctcctggggcagctggtctagctccgagaaggttctctgatggctgtgctggctcacgctaagcccacctggagtaggccagtggctggtggccaccttcagacctgggctcacccggggggtttgcactgatggacgccctggcagagatcacagaggcaggttctgttagacacatatgcacacatacactcttacacgtatgctcacttacatgcttacacatacactcatatgtacacactgacacttgtgcccacccactcacacacacacactcatacacacatatacactcacacacaccacacatacacacatatacattcacacacacatgcacacacacaccacatgtacacacacacgtatacatacacacactaacatacactcacatccacacatacatttacatacactcatccacacacacccacgaacatactcatacatgcacaccacacatgcacattcttacacacacgtacactcacatagactcacataccacacatggacacacgtgcatactcataccacacatgctcacataaggacacaaactcacacatcagatacactcataaacacgcacactcacaagctcatacatgcatgcactcatgcacaccacacacacactcatacatatacacactaacacatgcacacatacatatatacactctcactacacatacgcatataaactcacagttatgcacacactcatacacatatacattcacactcacactacacatacacatatacacttacacttatacacacacgcacagcacatatgcacacacatacacataacaaacacactacacagacacgcaccactcgcaaacattcccacttatgcattcacatgcatggcacatacacaaacatgcacacacatcacacacactcgtatacacatgcacacacacactcttacatacatacacacgtacacaccgcactcccatacatgcaccctcacatatactcccccttccttctgtttccatgatgtctgctgtctccaaggctttctgtttttgagtcccctgctacaattaaaatactcctgagagcaattaagctttggcagctaataacttaattacccactaataccgtatcttcccatcaccctcgccaagcaggagcagtgaggtatgagacggattcactcattggaggcagaccgtgggaagatccaggatcctagagtttggcgggaagctcaagagacccatgctggagccagaggcccatgggcctccttgagtcctggggccgaatccttcgttctgtgcacctactacagagcagtgtccttaaccagggcttaaaattatctaccaacatgaagagtgacctacaaaagaaactgacctgatcaacccctagttcacaattgggtagagcgagacagag

SEQ ID NO: 586229 - DNA, 4001 bp, Homo sapiens
gcctgtgttctccaacttccaattccgtttactggatctggcaatcagccaggaacaggcaaaagtgttatttcagctgtcttaactctaatacataaattactgcatcagcaacatccatacttaagagttcagagagtgagaatctagggccttgtggcctagctagcatttccagtggctatccttggctacacctctgtcctttcaatatccctggtatacctacgttacagaaaatctgtgttaacaccaatgtactagggtgtggtgttatatacctctagtctcagctacttgggaggctgaggcaggaggactgcttgagcatgggagttcaaggctccacctggtcaacatactgagaccctcaactctaaaataaataaattttaaaaaataacaccaatatatagatcccaatactgctctaatggatattaagtgctatcaataagtacttcttgacacatcactggatgaatgaaaacaaacaatgattacattgagagtgacaatgagttggtttcaaagctatattgagtactattcactcaggcatactcaatacatttttgtgagctcatggctttcctacttgtgattctcaaaagaatcctattggaacccccccaccccccaatcacagtaaaacctcagattaggtcttggcaaactcattttcttgacaaatacaacttagaggttatatctggtccctcatttggattatactatataaattcttcagtgattactgtcgtttggtatttggttaattaaatctactgagtgaggtcaaacttgcatttgtcttgtgtcaagttccattctatggcagactaatttaacagagattccaaggttctctgcctccaagctgaataagctactagaacaaaaaacaactagaagccaccttattcccaattcattaacgttgacttcatggtccacaccagaaaatgaacgcaactcaattctcgaagacactattctagaattttatacacttaggaattcagatcacaggctcaaaagttttagcaggagacccacggagcttgggccttgatgcaaaagcagcttttgaaactgcaagccactctacgcttaatcgcggcagctatagggaattaagtttatttctgaccgcagcatgctaaaaatcagtaggatatggggctagaagcaacaaaaaacgtaacaaaaattaattccccaataaagctttaaaaactattttccgtcgctaactgaagtacgtagccaaatatggaagctctaaacattcagcttttctttaaaatcatagatatcacctagtgtcgtcactcgttctctccccccttgtttctgcaccctttaggtgagtgaacacgaccttggcagatgcaccctactgtcgggatgtggccttggggcggagctggcagatacaagcaggatggtgagtggaggcggcaaggaactcttacaataacactatccaaatgccctccgaccttccggaggcaaaaaatgaccctctggtgccagagactcggtgagtggcgtgacctagagatggaggaccaggacgcagcaaaccaggcacagaacagtacccaacgggacagagttccaccggaccagcccccttcccagagcgcgcggtaagacgggcggcggcctccatcccaggctgcacacagagggtcccgggatctccagcagcatcaggcctgggacccgggcgccagcagagacagcggcaccgagtgaggcagtcccctgccgcgccaagaacaagaccggggacagaaagaaagcgaataaagatgaggcagtggtgaaggggctgggcatcaccgtacttacctttcctcgtagcccccacagcacaggatgccgtggccgccgctcacccaccggctcagctcacgcgcgcaagcaccgcccaaccggaagcgggtccgcaccccgccctcatccgcctcgccggcggcctcccgaccaatcatcagcaaacccgccgctgtcgcatagcgtccccgagtagccattggtctaacaatcgcatagccgggattggctggaaagcgccacgtccccgggaccgcgccgagttgcgtggagcggattcccgcccaactctcgtccccgggattgttgggacggcgggctccagccccagccccagccccagccccgtactgcgggtggcgtgggcgcggccgtgtggccgccacgtccccattcacagctcatgactctgcttccacagggcttcttagactatcctgctagttatcttcattcccacaagaccaccagggcggaattaatccgactgaatcagtcaccaactttattgaacaatcccaactttttctttcccttcagcgctgcgccctgcgctatctacaggaggctcttcagtctttggcaccagtgtatcttttagctccatctcccaacactccccctcatcttgcgctctgggcaccatcatctgtttcctaacaaccggtcctttttcatctcttaagatttttgatcaagaggcttcctctgccaggaataagtgcgttttcctgattttctgccttgccaatagaagtcccagttcagatgttagctctagaagccttccctgacctcactaagcataattcttaccttatttaccatcatagctgtttatagcttcagtacactttgccaaattctgctataaaatgtagcttatccatctgtcctcttctagagtaagctcctgggtaggtatctgtctattcatctttatatctgcaactctgagcttactgcccagctcagtaatgttaagtgaagggaatgggccgaacccgttgcatgtccctgaaaatttaatttcatgtcatgaaattaaaacaaatatcaaataaaggctactatagcttcaacacaaatggaatgtaaacctgtggcattcttagcacataaagcctctgtagtttaaaatcaaattgagacaagttgtaaactcatgaaacagttaagctcatgaaagcaagctagttactgtcaacgtgaaaggtttacaactaatccttctggcattcaaaggagtgtcagtgacccttggtggtagtcagggaaggcttcagaggaagatatgactaaggctggactaaggaagtcccaaatggactattcagcaagaagagtaataggaataaggacaagtggagggcagagtgggaggtaaattctcaggccaggtagcaaatgaggaaggttaaaaaaaggggtggggggaaacaatgaaagaaaagcatggatagtaagtttggagaggtaatggaagatcttgtcaatttgaggaacctgaactgaagacagtgggaactgtgggtcttcctgggaaagtttctaagcttgtgcctacagggaagccatctaatgggtattaacaataaaacaggctacctcaggaggcattatttcgaaaacagtttttaaaatacctccttaaggatcacttgaggccaggagtttgagaccagcctgggcaaaataacgagacccttcctccccctatctctacaaaaaaacaaaaactaaaaattagctgggtgtggtggcacacacatgtagttcaagctagttgcttgagcccaggaggttgaggctgcaatgaactatgactgtaccacttcactccagcctgggcaacagagcaagaccctttctcttaaaaaataaaaataacaactccttaaggtcaggcactgtgttatgtgctggtgaacccaaagtaaacaggacatcgtccctgtcctcaaggaactcagcttaatggtgcgccatccatcctggaattgtcctagtaaaggctaaacaggtagtgagggtgccagagatagggccctccaaccctgaggttccctaatggagaagggcctggcctagcaagggaaagggaaatggaaatgaacctttatatacaagagtttttttgtttgtttgttttgttt

SEQ ID NO: 586230 - DNA, 4001 bp, Homo sapiens
ggtgcacatggggaggtcttgaaagtggcttctttggagaagaccagggacacctgctgtgagggcctctgtgcttctgagcgcaagcagaaaagacaacaagaaggctcctgaggaaagactgacttcccactgttgctctcttcctcagagaaccaggcacattaactgccacccacctgcccctccagtggccaggacacctctggaggccaagaggacagacgggggtagatcggtgcatctgaggggtgaagaccggggagccagccacccactcagggatccgcatgaagggggctgggctcgccctctccctcgaggtctcagccctgtggtgctctccagatccacccaaggaagggtcccccagccagcctggccccccaccccacccatccagcatgggcttcttgcagggctgggctccacatccctaacccctaccagaattctctccacacgtgcagggagaagtggggaatgaacacacccccacactcctccagctccgcactccacaattatcaatgatcagcgtccctcacccaccacaaggtttcaccagacacttatttagtaaaggaaaaaaaggatctgttgctggatgtgtaagaggaaatctcgccagcaccgccagcgcccccaccgcctgcactgaagggacggaggaggatgggggaggacgcaggaggatggggctctggcccagtcaggctggagattcaggagttctgaagctagccctagggatgccaggtgcagccaccttgattctcagaacgggagaccccaggccagacaggaggcccctgaggcgctccccatctcaccccaggggcaaagccgggtccggggaccacgaaccagaccttcgccctacactgctcatactgccaaggagagaacgggagccacagcacctgttccccgtgaggtcccacttcaaacaaaccttcaaagccccttcccctttagggcgcccccgccaacagtccaaaatccagcccccatccacctcgatgaccctgaaatttgcaatccagtcaggctcttagtctctccccgctatccccatgacctgatccaggctccctgacctcgtcctccccacacctccaaattcctgtttccagaagaatctgggggaaaatcctccagaacccagattccccaggggacctacagcagaggctctcccacgccggcacccccagcgcggatggggccacgcgcaggagcaggcgcaagcaggtcccgccacccccgccgcctgccgctcgggtgggggtggggacagcgcacccgcgtcggggacgaccctctggggccgcagccgacccctcccggcgctccaggcccgggggccacccccgcgcgcccctcctctctgacctccccgccgccaaatgcgtcacgtctgccgggcgctccggggacacctgctgccgcccccgccgcgccaagtcgcgagcccggagccccggcccggcagccgcgctgggcagagctgggcagggccgcgcgcgctgaggtcaggcagccaggcccggggccgggggctcgcgggtcggggccgcgcggggccgtgcgcttgggcccggagcccagagaagccggcggcgcgcgggcccgcagtgcgcctggagccggcggcgcggagggtcccggaggtcccggccctctggggtccccggcccagcccgcgcgcgccgctgctcttacttgccaatatcctcgtagagctggtactcgtcggtgaagcgggtgcaggtcaccgtggtggccatggcggcggcggacgggctcggcgtgcgctcggctgcgctcgggcggcggcgactccggctcccgctcgcgggcacggcggcgacacgggcgcgggcgcgggagacacctcggctcgcggcgccaggcgggggccgggctgggctgcgccgggcggcgagcgcacgcgagatctgctcgctccgtcctcgccaggagcgcgccgcacacctacgcgcggggaggcgcgggcgccgctgtcaccgccgccgccgccgcgcccgccccgcccgccgccccctgcacgcgccttccccgcgccctgcacacgctgctcctgcacccgcacccgcagggcaccggcgccctgcatctgcacacgcgccctgcacacacacccttgccccgcacccgcaacgcacctgcacctgcacctgcactcacacgcgcgcccgcccccgcccgcccccgcaccccacacacacacccgcgccctgtactgacgccttcatcctctacccgcaccacgcccgcacctcgcgcacgcaggccacttgctgctgccgacccctcgctctcacataacacagaagagtgcacataatgaacgcagcctcctctctctctctcgaaggcccacctagcctgacagcaggaggggactggggcccacatggaggtagagggctcatgtgctgccctccacaggactcattcctcacaccctcaggaagagatgctgccagatcccttctgcccagtctccatcagccacacatgccccaaaggctgcctggccaggaggaaccgcccagaaggcagtgtacacactgggtcactagcatgagaaagtgaaagggtggggcctgccccctccccttggccccagcccctcccttccccctcacttctccaaagactggttgctgggttgtctggaatggaggtcccaggaggcaacattcggagtccagaccaacggaccctgagccaggggaacaggggctgctccaccagcaatttggggggcctgagagctcacagccaccctgatcaggtaaaggtgcacattctctccttttccagcacggtccacctgcctgccccctgcttttgcctggaggaggagggcccacacaccccaaccccctcctgaaagcagccaaggaggaggagagtgcagggaggcaggcaggaggcagggcgacccggtttcccacaaaacagccttccctgaggcctggcaccagggctgctgtccagaaccgggactttagaccactgggctccagcatccccacactcttctctgacggggtccatcctgggcaggctctgaggagggggtttccagcagccagctctggatttgggtcacgctgctgccctgatatgacttccttactgctccccaaggaccaattctgggcctatcctgctcatccctctcacctcgtggccagcccagggcaagccccagaagccacaataaatgtcatgtggataagggaggggataaaggcattctgagtgctggcagccagggcccttctgggccaggatgcatttggcatgggactgctgggcaattagtagaccacacggcaacaagtccctgccatcgacccacctgcacccagaagacactagaggacgagaaattctcaggccaaaggcaaatgctgggccacctggggaagtccccagctgaggaagcagagggatcctggccttgacttcagcaggaccatagcaggaagggagaccccgtctatgtcagacttggactcagagaatcctgggccatcctaacagacagactggcatgggctcgagaaaggactggaggccaagtctgaggtttgttcttggcgttgtgtttaaccccacaggagtttcttccagcacctgctggatgcatccatattttccctttctgagctctggaaagacgaggtagggccacacaacagaatacaaataacaagccaagcacggtggctcacgcctgtaacaagctcacagtggctcacagccccagctatgtgggccaggctggtctcaaactcctgacctcaggtgatccacccacctcggcctcccaaagtgctaggattacaggcatgagccactgcacccggccgaggtcacctttcaaaagttgagaagctgcccaggaccagggttacacaagaatgtggggtcactaagagatgcaatttgagattcattgt

SEQ ID NO: 586231 - DNA, 4001 bp, Homo sapiens
tatctacataatattcttacaaaacatcaaaaatcaaattagaattttcattcatttaaccataaaacattttgctactaggcggcacaggctttaagacacacaacctcctcattcctctttatgaagcttagtgccctgagagtgccagataataaggcatcttgttatctcatttttaaaaaacttttttattttaggcctttacaacacatggcaggtctatattaactcccacaccgagtagtctctcttcagctagatttctagccacttgagctactaatcatcacttaagaatggtagaataaaaacacgacaatctctttttaagctttttagcacgcctcaattttaaatatgtttgtgcactcctgtacactttcagtcacctaaataaaataggattatttatcaagattatacattgaatactgtacagcaacttttgtggatacggggatctgcctactgggtctgtgggctatggagacgttgctcgcccccattttgttgttgtattatcactttcaccgaagaacacaagagaaaaaaagatttccgaaaataaagatgaggctgacttctgaccattcacattgggaatgggacagaaccttctatttcggtgcaagaacacagcatataaaaacatctagagcagagggtcctaaatgaaaatatcctcagacttacatgaagatttcttaaacaccacaacatacctaaatgtacctgtattttcctgcactggctttgaaatttaaaaatgaagcactctttaacgaagagtggacatttccaaccctgcaactaactcattcctatgttctgtcagttacttctaagggtcctttccgagaaacagtcaaaattagcagggttctcccctaccccaccaccctcgggaatgggacgttcccaaaagccaaacgaaaggggcgaattaagagagcagcagttcaatgaattattccattactcgttttaaatatctgagaacttaagtcgttcatctggttccattgctgtcacagcatctaatatacagtaaaaggagttgcacattttcccctcttcggaagaagtcctagcaggaaagtgaggtgccaccaaatcgacccccgggggggggctgctgccaacgtgggcagaaaacaactatggggagggggtcgtctttttgtgagcaactccgctgcctcctggggaacatgggagctgcaagcttactgctagagccacgaaaggaaagagagaaggagggagagatgcctccatggggaaagggaaaaaaaaggataaaccgtagaggatcagaaaaggaagcattttgctttgaggagggggaagtagaagggagaagtgaaggtctgcttcctaagcgatttttcccttcccctcacccgccgctacactcacaggccaggccgccgcgctgggcactgcccttgggccgctcccacgcacggacgcaaacccctttgcgtccctggtccccggtccccggccccggcggaggccccgcggcccgacagcaggagagggtcctgggcagccgccgccctcccccgcgcccgcgcccccgcccgccgtcgcccggctcccgcttcctattttcggagtacacaccctacaaggagcggagcgagcaggcctggcagagacctgcccccgcgcggggcctcgggtgacggacaggggcaggcactgggcgcagtaaggatgggggaggaagggcagccgagggcaaggccagctgcgggccaatgcccttcccccgcgaccagactccgggcccacccgcccgggctgagccggctcctgacagcccgcgccgtcgcccccgcgactcttaccttctcttcatcagacaactgctcctccagatccgccatcttccttctggcgacaaaccgcggcggcggcggcggcagcggccacctgacttccccgtttccgtgcggtcctcagcgccgcgcgcccccgctaagggaggggcccgccgctcaggccgccgcgcacgcgcaccccgggagccccgcctccctcgacccggccctcgcggactgagcgcggctgtgcgcgtgcgcgggcgcctggtggccgggcgggggaccgtgtctcgctgggccgcctgctgcaggcttgctagcatcttgagtgcagcgtgctctccccactgtgaccatatgggctcagtctgcgatgagtacattctgagcccttcgttatgtttccatcaagtcctgaactctgccagctaaaatgtgaaaaggtgtacaaatagaagccttttaaacattgttttttcaaatattagagaagatagttggctttcattaaaatacacatcacgaccctctccataattgaaagattgctcttgatatactcctttattcatccaacaaatattttttggttctttaacggggtgcggggcactgtgttagtctctggggatacagtgttgagggggaaaaaagcaagctagacatacatgttcatagcagcacaattcgcaattgcaaagagatggaaccaacctaagtgtccatcaaccaatgagtggatagagcaaatgtgggtatatacaccatggaatactactcagccataaaaaggaacgaaataatgccttttgcagcaacttggaaggagctggaggccattattctaagtgaagtaactcaggaatgggaaaccaaatattttatgttctcacttataagtgggagctaagctatgtgggttcaaaggcataagaatgataaaatggactttggggactggggaggggataaattactacgtattgggtacagggtacactgctcaggtgatgggtgcactaaaatctcagaagttaccgctaaaggacttatccatgttaccaaaaatccacctgtattccaaaactgttgaaataaaaagagaaacttccatactcaagaagctcattttctactcattaaacaaacatatattgaacagttggggccgggcgcggtagctcaggcctgtaatcccagcaatttgggaggcctccgtgggcagatcatctgaggtcaggagttcgtgaccagattggccaacatgaagaaaccccgtctctactaaaaatacaaaaattatccggggcgtggtggcgcatacctgtaataccagctactcgggaggctgaggcaggagagttgcagaagtcattgcaacccgagaggcggaggttgtccctgtccctgcaacccgggagacggaggttgcagtcagccgaggtcgcgccactgtactccagcctgggtgacagagcaagactctgtctcaaaaagcaaaacaaaaaaaaacaaaaacagttggggaaggcactgtactattccaggggaatacaaagctatgttagacatggatcctaccctcctgaataggtttgccatattaaatataggacacttaatcaaatgtgaattgcagataagcaatcttttaaaaagtatgtcccatgaagcagtggagacatacttaaaccaaaaaattactcattgttttcaaattttactggacatcctttacttttatttgctaaatctagcaaccctgcttttgaagcttgaagtttatgagagattaaacatgtaatcaaagctgcgtagatatgaatcaattgggaatcttgtgaaaacgaagttgttaattcaatagatgtggcatgagactggagaatctgtattctccagaatacagcctgtagaataacaggctcccagctgatgccagtgctcctgatctggagaccacattttgagtggtaaggccttagggtttaagataggcgttcagattccgtgaggaactgttgagaacttttgaacagtgacatgacatgatcagaaatatgtgcagcaagatgaatctgacagctgcacataaatgaaatgtgagagtatcaaataaatgttcagaggcaagaccttattattaagtaatttattgggtgttca

SEQ ID NO: 586232 - DNA, 4001 bp, Homo sapiens
atattattcatcctgaaaagggaaggagattcagtcacagactacaacacagatgaaccgtgaggacgtgaggctcagagaaataagccaggcacaggaaggacataggttgtatgagcccccttatatggggtcccgaaagtcatcagattcctagagacagaacggggaagggtggctgccaggggctacggagggggccaggaagctgctgtttaacgggggacacagtttcagtttgggaagagctggatggtggtgatggccgcaagataacatggacgggcttaacagcactcaactctgcgcttcaaagtggttcagcgagctcattttatgtcacatgtatttcaccacgatttttaaaaaaatcacatcaaggaccattcatgcattaacagaagactgctggggccagtggagccacggcctgcctatctgatacccaggcaagtaacatccacacgggtccaagcattccctggccttgaattacgctgagtcctggtcactgttgcgctcctcagggcagccctggcctgaggcaggggtgtcatctctttacagatgccttgctggggagagaaccggagtttccgcgaaagcgcagaagtggacacttacggagaaattcctgtcctcatatcaattcccggctcccgggatttccggcacgcattatgcacaggctgagcgctcaataaatgtggaatgaacgatcgactatttttctcccctttctggtaggttggtaaccttataccttcaagacgagtcataaatattaggagaaaatgttttgaactacaaatcaaaggctttgagagcaggccaggcagagagaggtcagtttggtccaagaccaagtttgtgtgggcagccccgaagctcacagctgagaccactgtccatgaacctgggtccccgtgacagcctccagcggtgctcagagcccccgagggacagaaacaccctctctgcccctatctgcagagggggctcagcagaaggcctggtggccccatcgggcctggaggggcctcctgggggaggtggctttcaggcctgaggccgctaggacctgctccgggtttcagtcgggaacctgggccctctcctgtgcccccgccaccccctttctagtacagtccccgcggggggctgtcctctcccatctcccagctccacacccacttttggtgcggctgcccttcctccctgagccaggccccaccttcccaggagcctctgagtcaggctgggctgtggtctgcaaacttccgggcctttcaggtgtcagaaaagtttctcttcctccctctggggcaggtgcaccaaggggctgcagcctcctgacccccgattttttcctgtccagtaggaggaggtgggggctttgctgggcggtgatactcagagacgctcaaagagacacggaggagaggcacacgaggtggaaagtgagggagaaaaagggttggaagggaaaaaggggagaggagagtgagagagagaaggggggcagggggacagagatggagagggaaggatacccccagcatcgcgggaccagcgggagccactcccatcccccgacgccccccccgccaccgtgtcatctcactgatgccccccatctcctccccgtgccctcttctcttcccccaactccccgcctcgtgctccccctccgccagctcccccatccccgctgcgcctacctggggcgctcatgctccgccagccagctgcgcggggcgcctcctccacgcaggcctccggcttcctccaggcgaccaggccctccgtccccccgggcccggagccgtcctccgaggggcgccgcccgcccaggggctgcagggccgggagggggctgcgggcggcgcgggcaggagtccgaaggccagaggaggcaggagagaaaaaaggagagaaagtatgtcataggctgggaggggcgggggagggaaatgcaaaacccgacaggaaatgagactaaaaaatgcgaaaggttagaaaaagataaggaagagagggagggggcggagtcggtgcttcgggaggagggcggcaaggaggtgggggtgggagtggggacagggccgggggtgggggtgcttggggacagatcagggagccggagatggggagaccaaggcgagtctcagggcccagcccacctgcatcagtcggggtgaggctggaccagtctgggcatcagtccccacccagccgtgacccccggcagagtccaggtggggccttgggaggggctctctcccttctaggttctccagggcactggctcccgagatctagctgaatttctgaagaaattccagagcctgtcactgcaatgggaggggaacggggtgccccacatcaaatcctgcagcctcctacaccccaagcctctttcctccctcagcccctgttctggaagcttcctgggcatgccgggtggtcagcaccccttcaaaggccttcctcaccccgacagctttggggtccaagacacccaccatcagcttgtgccctcgatgttccggtgaagtatacttgtaagagaaactgtgatttggatgtcatcattttactttatttttattttttgagatggagtctcgctctgtcacccaggctggagtgcagtggcacaatctcagctcactgcaagctccacctcctgggttcaagcgattctcccacctcagcctcccgagtagctgggaccacaggcgtgcaccaccaaacttggctaatttttgtatttttagtagaaatggggtttcaacatgatggccaggctggcctcgaactcctgacctcaagtgatatgcccacctcagcctcccaaagtgctgggattacaggcatgagcctctgcgcccagctggatgtcatcattttaataatttaccccaaatggccatcgtcatgggtgggatggtcccaagggtttacatggattgcagactcaaaaatctggatgaaagaaaatgtgatacacacacacacgccatgcaatactactcagccataaaaaagaacgaaataaagtattttgcagcaacttggatggaactggaggccattatcctaagtgaagtaactcaggagtggaaaaccaaatactacatgttcttatttaaaagcgagagctaagctatgggtaggcaaaggcaggcagagtgggatcatggacgttggagactcagaagggggaagaatgggagggggtaggggatgaaaaatcacctattgggtacaatgtatactgtacaatgtgcactattccagtgactgatgcactaaaagcccagacttcaccactatacgcttcatccacgtaacccaaaaccgcaagtacccctaaagctattgaaataaaaatctggatgagccatgcctacccagaaaaccttagtttctattctcttgctgcaattgcactgcctcctgcaccgcccgcccccccgttgccccagcctctgcacctctcattctactctgcctcagtttaccattctcctctcatctatctccctctcttttgatcccctcattatggctagagaatgtaggcttctgtttcatgttttaagtgttctgagaaaagttcctcgagctgctagaaggaaaggccttcaataaattaaattttcagcaagacaataaataaaaaatgggacattggtccaagcacggaagaatctgaaataccagtgaggagtctgtttgcactgatgcacatgtgctagggatgaaggaagacacgagtttgcttcctgtaaagcgtgttcagaaatgcaagcaagggccgtaaagaaagtttctaaaatgaacaccaagacccacagccttctaacaccaagacccacagccttctaggccttggtccctaaggatacatctcactgcctacctgggactggggaagctgcttgtactccatgaaacctctaaatcaggcagtggcattttatttatttatttat

SEQ ID NO: 586233 - DNA, 4001 bp, Homo sapiens
ccctgctgatgacagatcttgataagatgaaatctataatctaaaaataatagtagtccaaggttatcaaaagataaaaagcacaaaaaaataaaaggaaggggactagatgtttatttatcttaggacaatagtactgtagttataaaatttctctctactaccattacataaattgaattaaattactgttcttttataccaaattggcataaaatgattaatagtagttaaaagaaatatttcctcaaaaccaccacaaatcaatgcatcaacattgctagttttacatgattgtagataaaccaaggccttgcaaggtcgtatggctgtgatctggagagagctggagagaggccaaaaggttataaagaatctaatttttaaaatcaatttagtatactaaaagctgttcacccagtatggctctagagtacaatatttttaattctcaagagttggaagaaataaagcagcaaaactgaccaaaattgaaagatctcctgggatgagaatacagcgcagactccaacaacccgtttatggatattttgccaaagtaggtgtaaatttaaacgggcacagcgctaatttgcacctgtccattacacattacatcttgactgattaatctcacagtcaccaagagctggccagataatggctttgatagtattaagagccaaaaataaaagatcctatcattattaatttccctctgcctgtcagcctctctcccagtgacatttttacaaaggaaaaaaaacaatcaatcagcaaggagaagtaaatatcccttgattactgaaagataattcattctcaaatcaggtcatatttccttttcccctttacaccaatttcaaaacccatggccaaggcctgctttcaaagtgcttacaacttgctttcaactgcccacctttacgcctgtcaacccacaacttccttccaaaaatctgctctggtgccttaactttgtaaaaagtgtgcactccgaagcctttaaacgtttctgcatcacaaaagctgggtggcacctcttccatttggccacaggcatcttttgccagctgtcgcccttttggcaaaggaaaatgggggcggcccttgccgctgtccaacagcccagactgggtgttacagggcagaggcaaaattaaacaaaggctaaggagccggacccttaagaggcaggacctgcgaccccactgctggcagcggtgccccttgcagggcggccttgggcttcatgcgccccgggctgcccccaaggaccgcctgtccgacttcctgcacgcgagcccctgatctggagcgtctccccgaacccagaccgctcaggagccggacctcagcagcacttttggccaggtccagggttggcgcccccgaccccagcgcgggcggctcggggcgcccagaaccaccagccattgtcctttggtggcccccactggggtccactcagttggcctcgggcgccggccgctgctggggacacctgggggaaccgcctcccccgcgggccgggccggcggaaggccgcgtgggcgtgtgttgggcgatgggggcggcctccagccgccgcgtcgccgcctcccccacggcctgcccgggcagaggggagggcccgctcacctcggtagcggcgggaggcgaggtggcacgctgcgagcagcagcacggccaccagcgccagcaccttggcgctcctcacgctgaagtagtggttgatctcccgcttgcccaggttgtaggccagagccgccatcttggttcctccatgacaacagtgcgcggcggagcgggaaaggggcgccgcacaggggcagcactggggctgccgccgctgcagccaggcgaggagcggccgccagctccccaggccgccacctgcgcctcccgccggggaacctgaccccgcggccgcggcgcccccgacctccgcctgcccctcctcggccgcggccgactcggcggcctccccccagccccgccgccgctgctccgccgtgccggttccccaggcgccctggacgcctgtctcctccccttcctcctcctctttagcctcctgccttaatagcggctgcgcctgcgaggggggtccggatgcccagtgctccggggtcaccgggtcacgcgccccggcgggcggcggcggctgcggcagagccatgggggtgtggggagagagtactaggggtacccgcctggcccggacgcgagccttagggctgtctcctagtttactggccgctacctgagcccaggttggggcaatagaactacagttccgggagaaaagtacacatcgtcccattccttccttccccaacactcccctttctcagccttctactgccagaacccgcccagcgggatgcgaaggacaccctaaggtcgtttattgtctggctatccgtggcctggctggtcagtctggctgcccctgggtgctggccagattggattgatggatccagttgatggtgctggccgatggattgctggcatccaacccaggagtgaaaccagtcttaacacttaactcaccgctctggccagtttctcttaaaccgtttttttaatgtcctcagtttgcccagttctggtgggcgaaagtacaccaaagttccgaatggaaggtacagaaggagcctaacttagtgtaggtgttgatgagaaaagagtctgactctcacttgtatttacgcaagtttggctaggtcgatgtgccaaaaaaattcgttttttttgagagggagtctcaccctgtcgcccaagctctagtgcagtggcgtgatcttcgctcactgcagcctccccctcctgggttcaaatggttgtcctgcctgagcctgccgagtagcagagattgcaggcgcccgccaccacacccgtttaatttttgtattttaatagagacgggggtttcaccattttggtcaggctggtctcgaactcctgacctcaaatgatctgcccatctcggcctcccaaagtgctgggattacaggcatgagccaccaagcctagccaaaaaaaatttttcttaatgtgcttatgacaatcatccccgctactaacgttggttaatgttttgtgattctcaataaagccagcactccatttccttaataaagcattgttatccctactctcctctcgctcccaccccaccttttttaaatggtttttcttgttgccttccagatgggaatggttatttacattgcttgccattctacttgccttgccttgtttagagtgagtcattgtttagttggggtgttgtcaagtattctttacaactttcccatttagccattcctgaacttgtgcttataggcccctcttaaaattatagaatattagatatgaagggactgtagagatcttgtctactcattcccattctcttcatccaaggactctttattatgttttcatccatggactttatatcttgaaagattttgtcacttaaatgaaatcacatacatcactgtcatggatgtaatgctaataagcaataaagttaaataagtgtacaaacacttaggcactgttccctgcaaatagtcttttaattttggctgtcattctgatcagaggttgatcacatgttgtaagaattgggtattgtaaaaaccagataactctgccaacaatatatggtctgccaatcacatcctagacatttctatgatgtcattaccagcaaattagaatttctgatcagcatgcaataaccagtgttaacccaaagggttgagttaatgcctgcaaaaagtaaagaaacttgacattctattaattgcaatttccagaaggctttcttaaatactgtaaatagcttgtgaacctcctttttcttctctcaagtttaaggccaatctctctacctctgctctgaatcttttcttatcctcctttcttgagggtgttgattcctccatcagttatccccatgcaaatcattctttttctgtgtc

SEQ ID NO: 586234 - DNA, 4001 bp, Homo sapiens
ttttagagtttcctgatgatgaggatgcatgccacacactcccaatatcctacagataaacggtagaaggaaaggctgtcaagtcacaatttgacacagaagagtggagtggaagaggcatgaataggaagaacaaaaagaataagacttacaataaccaagattatgcatatttcttaaatctggttaaagcaaagatgtactaagcaggaacacattgatcataagaaaataatgtctaattccttatggtttatgttcagctgagatcatctgagatgaatggtctgactagaggagggaaatatctgtcttaagcaaaacaatacccccaagtacacatatttatgagaaggaatacttctctgatagaccaattttaataaagagaattatttcagaaaacatctcacattatctaagctggtgaaagtgatgtaagtttataatgatcttagatgagggttaaaacactatggtaaaaactcaagccaatggctttaacagaaaataaatgaggcagacactaactctctttcactagtgatataaacatataattacatgttttttaaaacttttaagttccagtgacaaaatggcgaatcctgttaagatgtggataagcagaaagtatgacagaaagtcacagtggataggtatttatctatttactttaaaagagtctcactgtgccacccaggctggagtgcagtggctattcacaggtatgatcccattacagagcagcacaggagttttgacttgctccatttttgacctgggcgggttcacccttccttaggcaacctggtggaccctgactcccaggacatcaccacactgatgctgaacttaatgtggacacgtgactggcatagcacactatagcccagaactcctggactcaagcgatccacctgcctcagcctcccaagtagttgggactacaggcatgtgctgtcacctccagctaattttgctacaggcttgcaaagagatcagcttctgcttataaactaaaataatcctattgccaatatgtcatctacatgcctagtttacataaatccagagttctctagcctgccccgtcacattttccacatatgtaacagcaggaagggtggcacctgatagcagtgaaaatacaataacttccatttataacttaaaaacctactctaaaatgcattctgatttctaaggtgttaaaacatgaggggaggccgggcacggtggctcatgcctgtaatccctgcactttgggaggctaaggtgggcagatcacctgaggtcaggagttcaagaccagcctggccaacatggtgaaaccctgtctctactaaaaatacaaaaaattagccgagtgtggtgctgcatgcctgtagtcctagctactcgggaggctgagacaggagaatcgcttgaaccttggagatggaggttgcagtgagctgagatcattccactgcactccagcctgggtgacacagcaaagactccgtccaaaaaaaaaaaaaaaaaaaaaaagggagggaaaaaatgtgtatcttagagtcagtgaaataccacacatctatggaatggatgcacttggcttgcagatgctattgggtgagagatttatagttagaagagggaagagctgggtcctggaagaactgggagaactaagatagcaggtgggatcctaaaacagatgaagtgggttggaagcagccaatgaatctgaggtttggaaaaatgagtctgaaactccattttttcttctttttactgtaatatttccattacccaagactttcaggaaaaactggctacaagaaaaagagctatacaaataaaaaaacctatttaagaatgaatcactttcgaatacgtcaaagcagtaataacgatcacatataacactgcagctgggatactaaccagtggtgcagcagatttcttccattagtttaccagtagtattcgctccttaaatcgttctcttcctctggtttccatgacagcattctttgggagtcttctctctgcctacccagttcctgttttctttagagggcctttggcctgcccttaatattgatattccattagggacgccccttcaaagagcctttccctagacaatctcacccatacttgcaacttactgacttatagttcttaactctctcgagttccagacttgaattttcaatcaactctttagttttaatctgaagcatcaccccctctgcacacccgctccttcctctactctgtagtatgagagtcttaaacgtgaacattataaaagtttccaatcatttagaatttcaggacacaactggaaggggaggaggggcgaagggcaccacggagttcctacgtcttaattctgtgtccttctgcaggttccctttgcgaagaccttaatcttcagtctcgagcaggaggcattacaatgttctcctgggtgatgactgccatgaaatggaatgaccggggcagaggcatggacactcggagccacaggaacccccttgttctgccaaaagtactcaatttccaaaccctgtattgacttctttgaaaatctggtcattctatgcaaagccatgcagatcatgatacaatcgatacaaatcaaatgcacatcaggcagagcaccgaggtctgcagaaggtctcgtcgatttttaaggagacagagtatggtctttttatagtttccctcataagggagccagaggaaaggatgaagaatcttcaagagaacccaagagcgggcaggactgcaaagacctcccctttagaaccctcgtgggttgaacaaagggaggctggggcagtcttttcccacgagagacaaggccaagaggtccgcccgcgggcccttgcgcggagtcaggctcggagcggctcgggcgggcgtcccacccttggcaggaagcgcggacacggctgctttccggggctccgaggggagggggctgcagggccgcacgcctgggggccacgctccccttccctgggctcccctaaggagccctaagaccgttccctacttacctgcgtcccctgtcagcggccatcagctccttgtgctggaaggtggaccaagaccccgcgctcggcgccgccatttcccgcttttcccgggctctccgctgcgcaccgcccacagcccaaacaaaccgggggccgtcgcttcccccacatccctcccctcagacgcggacgcacactgcgcctgcgcctgcgccctgccgcgcccacacaccaggccacccagtccccggcccggtgcgtgcgcaggcgcagagctctagcggcggccgcgcggtccaatggggtgaagtggggtgctcggcggacagacaaaaggaggggaaggagcggggcggggcaaagggcggggaaagagcgagggcgggcgggtgtgctccgttcggcctgggaatccgattggttatcgattcccgcggaaatcaccccggtgcctctcgcgccccctggccggcctatggcgataacttcacggagacgggcgtggctggagttttgctttattgaagttgaacggttggggccaggctgcgaaggagactgagagcgcgacaaggccctggacagatgcccgcgcggggaaggaaggctggcttaggagggggcgtcagctatggtttagcagcttccagcgaccgaaacctacatcacagccgcagcacacaattccaggaaacctggtgctcaatattgggatctcaggaatcaggaccggcggctggggtgaaagcctagcggtcagagcttaggagtgaggcagaagctgttagagactcttcgcaagtgaccccggggctacatatggatgattcaagagggagtctcctcgccagaaagttcacatgtttcactccttctggccttcataccaacccattgttaaaactggaagtccctccacctggggtcactgactccactgttttcagataggatggggaccct

SEQ ID NO: 586235 - DNA, 4001 bp, Homo sapiens
ggtgctgcatgcctgtagtcctagctactcgggaggctgagacaggagaatcgcttgaaccttggagatggaggttgcagtgagctgagatcattccactgcactccagcctgggtgacacagcaaagactccgtccaaaaaaaaaaaaaaaaaaaaaaagggagggaaaaaatgtgtatcttagagtcagtgaaataccacacatctatggaatggatgcacttggcttgcagatgctattgggtgagagatttatagttagaagagggaagagctgggtcctggaagaactgggagaactaagatagcaggtgggatcctaaaacagatgaagtgggttggaagcagccaatgaatctgaggtttggaaaaatgagtctgaaactccattttttcttctttttactgtaatatttccattacccaagactttcaggaaaaactggctacaagaaaaagagctatacaaataaaaaaacctatttaagaatgaatcactttcgaatacgtcaaagcagtaataacgatcacatataacactgcagctgggatactaaccagtggtgcagcagatttcttccattagtttaccagtagtattcgctccttaaatcgttctcttcctctggtttccatgacagcattctttgggagtcttctctctgcctacccagttcctgttttctttagagggcctttggcctgcccttaatattgatattccattagggacgccccttcaaagagcctttccctagacaatctcacccatacttgcaacttactgacttatagttcttaactctctcgagttccagacttgaattttcaatcaactctttagttttaatctgaagcatcaccccctctgcacacccgctccttcctctactctgtagtatgagagtcttaaacgtgaacattataaaagtttccaatcatttagaatttcaggacacaactggaaggggaggaggggcgaagggcaccacggagttcctacgtcttaattctgtgtccttctgcaggttccctttgcgaagaccttaatcttcagtctcgagcaggaggcattacaatgttctcctgggtgatgactgccatgaaatggaatgaccggggcagaggcatggacactcggagccacaggaacccccttgttctgccaaaagtactcaatttccaaaccctgtattgacttctttgaaaatctggtcattctatgcaaagccatgcagatcatgatacaatcgatacaaatcaaatgcacatcaggcagagcaccgaggtctgcagaaggtctcgtcgatttttaaggagacagagtatggtctttttatagtttccctcataagggagccagaggaaaggatgaagaatcttcaagagaacccaagagcgggcaggactgcaaagacctcccctttagaaccctcgtgggttgaacaaagggaggctggggcagtcttttcccacgagagacaaggccaagaggtccgcccgcgggcccttgcgcggagtcaggctcggagcggctcgggcgggcgtcccacccttggcaggaagcgcggacacggctgctttccggggctccgaggggagggggctgcagggccgcacgcctgggggccacgctccccttccctgggctcccctaaggagccctaagaccgttccctacttacctgcgtcccctgtcagcggccatcagctccttgtgctggaaggtggaccaagaccccgcgctcggcgccgccatttcccgcttttcccgggctctccgctgcgcaccgcccacagcccaaacaaaccgggggccgtcgcttcccccacatccctcccctcagacgcggacgcacactgcgcctgcgcctgcgccctgccgcgcccacacaccaggccacccagtccccggcccggtgcgtgcgcaggcgcagagctctagcggcggccgcgcggtccaatggggtgaagtggggtgctcggcggacagacaaaaggaggggaaggagcggggcggggcaaagggcggggaaagagcgagggcgggcgggtgtgctccgttcggcctgggaatccgattggttatcgattcccgcggaaatcaccccggtgcctctcgcgccccctggccggcctatggcgataacttcacggagacgggcgtggctggagttttgctttattgaagttgaacggttggggccaggctgcgaaggagactgagagcgcgacaaggccctggacagatgcccgcgcggggaaggaaggctggcttaggagggggcgtcagctatggtttagcagcttccagcgaccgaaacctacatcacagccgcagcacacaattccaggaaacctggtgctcaatattgggatctcaggaatcaggaccggcggctggggtgaaagcctagcggtcagagcttaggagtgaggcagaagctgttagagactcttcgcaagtgaccccggggctacatatggatgattcaagagggagtctcctcgccagaaagttcacatgtttcactccttctggccttcataccaacccattgttaaaactggaagtccctccacctggggtcactgactccactgttttcagataggatggggaccctgcactggagactgctctctagcccctgggcaggagaggcacagacactgctacgcacgcggagcagggatcaccagcgctttgactgactttgctcgtccaggaggctggggacatgcgtgcccatgctcagcccaccccctctgtagacacaattggtcgcccattctgtttataggaagtcttccatcctgcaccagcagctgtccctagacagggattgggagacatgcaagttgcttggcttcctattaccttgtgttgaaaacacaataggctttgggatcaggagttcattccagttattttaatgttatttactagcagtgtgccctcgtgcacattatcaaactcctctgactcttggaatcctcatttttcaataataactcacaaagctgtcaagcctaagggttctaacagctcgaacagcacctggaacagaagcaatagccgccactcagaggttacttcttccttctccgccttctctggatcacctccctacctcatcctcaatctaacgctggaaatattggatatggggtaggtcaccaaatgttgccagaagactcaaattatgccacccatatctcagctgggaagggcttaccgtggcctgactctcctcagggtccaagtccccatttatgatgtccaggcagaaacacttgtttctgacacatagtaggcgctggaaaatgttagtcaaatgaacgaggtctggtgtggagagaagagaaatcttgggagagtcatttaagggggtgcccagttgtcctcataaaaaacactatcatcatcagggtgaccaaagcagacatcataggcagggggtggagtcagaggctctaatgtggggactgccgccaagctctgcagatcaggagcagtggacacagcccgtggtccccgaagccgaaggttgattggagctcttccagggcttccttcctgggccatggacccctctgaggccattcgcctctgttccagtttggctctcctggacccctctggatggctaggttgttcctcctcaggtgctgggggtatcacaacagtgctgtaggggggtggttggtccaactcttgggggcggcactgggattctagtcccaccacggcctcttcatagactggcacttcaaaggcttcattgtccctgagggaagagaaataaggccattggtggcttccatgaaagaagccctttttcccttttttttgtctgctgtgggcaaaagatcctctgttggcctctgacccctcctcccgctgatgccaatgacaggaaaccagagactctctgcctcagagactacagggagagagggaggatgggcccaaggtgtattcctcttacgatgccca

SEQ ID NO: 586236 - DNA, 4001 bp, Homo sapiens
gtatgggccgtctgttgctgaggtcaataggctcatttgctaggataaaagtgtagttataggaacttctacaaaactcactttagctgaatttcagctgaactaactattggggggagatgggggaagggagatgtaacgtttctgccgactgcgggagctcccacacatcaaacccacaaaactctgtgtgtgtgtgtgtgtgcgcgtgtagggggcggggtggggtgtgcgtacacggcaatgctaaagaaggatgcacgggctaactgccagaggagagctgtcccagcccttccctgttggtcgccttggcttaccttgaccacgtcatcgttgaggtgtttagggtcgcggttgaccaggtcgatctccttggtgtgcgcgtcgtacacttgcttctcgctcagctcgtctgccatggccttgttgttgggcttgtagatgttgccctgttcccggatgggaacggtgtagagatgtccctgcagagggcggagggcggacggccaggacggggagggcggcaacggcggtgggaggaaaaatgcaaaaagaaaaacaagcgatgagaagtcagcctggcggcgggggaaacctcgagctcgaaatcgaactaaccgctccgacagctacggctccgtgcacagaaaccgcctgcgcgtagccagctttttaagaggatctcgcagaggacaccacacccctctgtactctgcagggcgcgcctgcctcccccgcccgccgccaggggtcagggcaggccccgccgcgcggtccgaaggcccccgcccgcgcacgccccggctcagcacgcaggacccgcaggacccgcaggacctcggcggcgagggggcagccgcaggcttctcccggactccctaagccgagtcgctctcgccctgagcgcttcacctgtttcgcgttcccgtccccggtccctattacccctgccccggtaatcccttccagctttatctaagatccaacagcagccgcccgacccgtggaatgttccctttatcgctgcttcttggccgcatccccctcgcacctgcccgcgccccccaccctgcctcggccctctcttgtccctccacggctctccctgctcaatccgccgtgatgatcacaatcccgaaagtccccatttttggcggagccaggcaccagaccccctaaatgtcctagaactcagtctcacctgcgcagctcccccgacccaccctcagggcactcccaggctgcgggcgggtggctgaagggcagctacgtgttggaagacgaggtttccacacccgggcagagctccagcgcgtggagggcgttggaagtgatggtggcagtttggggaggggaggtctacctctctcggaacacccctgccagacgccaagatgcagaaggagttcttgagatggttcaagaactttggaaagtgcaaacacaccgcgcgccgcctgcgggacctgccggtctgggcgcctggcggagagtcccggggactgtccccaggactcgggtaaataacacctccaccctgcactccacctcttcgaacccccagcaggcagggccggaccgcgggggtcccgcgacaagggagcatcctagacccatccagaaaacgcgtcctgggcccaacagacccaatctcaggaccccaatccccttttccgtgtcctcctagctcaggggctccctaggccccctctccattaggaaaacataaaacattcctggcttctcttcacctccccgcccaggcccattcctcagcggtgccaacgccagaggagtgctccgaagtggagagagggctggggccagggcagcagtcgggatatttggagaggcagatagcagaagcggacactccccgcacgcccgagccggcgcccccccacggatgcctacctccgagtctacgtatttgcccccagacatgctggcccgtggctggatgaaaactgtgaggaggtttccctgggctgtgctttaagggaactgaggaaggaagatcttgtattgtatggggggaaaaaaaggcgctggaggggggcggtggctgggagggagcctcctggccgcccgccaaaggtttgttctgctcgcggttggcccggacgtgtgctgcgccgggtctaggcacatccccaaggttctggcagcagagggcggggagcgcccgcagcgagcagagagcgagtgagaacgtttctcccgcgctggggtgcttgggcagattattttaaacctgaggcaacattttccctgctctgaaccaccgagaggcgtcccggggagagcgaatgttttcgcagtgcatcatctcagcaggggtggagggagccgacgcgcctgcagagatgcccagtatgggcaaccaaggcggcagaaacaatccacaatcctgccctgtcctaagccgtcccttcccacctcccccaccccccgcccatcgcccaagttccatctctgccttaaaacacatgtgtctccctgtttcacagagggagggatgaaagacggctaggaacctttaggtacatttcacatctaaactttgtggatcccttatggaaggaatctgtgtgggtgcctgtggtgtacttttggtgacactcgtttacatctagtcggtgtggatggaaacttaagcaggcatgcagaatttaacatttcccatccgtttctgaaatgtctcccaaacgcttcgaaataagaaatgaagatctttaacttttctataattttattaccgatattttctggaacaatggaattttatgccaacaggttatgccatatttgcaaaatacacaaaatgtttataattgtagaattatttaaagcttcaagtttattaccagagaagatttttttttaatgtgcttggctgtgaggaaagatttgacttttctaattgactagacttaaaaaaaatgtgatagcgattaaagtattttgtctgttcctgaatctggggcttctgtctttactttattgtaaagaagcacaaaatgaattaaatagtaatcagtcattttactcttgagctgtaattaatcaggaaactcattatccaaaaatgaaaggacatgttacttatgcttccatatgcagtcaaaagtcaaagtatcacttgaaattattttaaaaaaaaagctggagtacacttgaaggggcacaggttaaaattaaaatggagaggggaatgtgggttgggagtaagagggaggagaaagggaaatggatggaatgctgaaagagttgattatttagttagagagaagacacaaaagtataaaagaactataaaggacaggctattgttggtagcaaaaatttttggaacaaaagatcagttttaactaagaatggcagggaaagtgtcacaatgttacaaatgttggcatgcctgtaattatgttggccattcatgattagcagactaaagatctttcaaaagttggattttcccaaataccacattagtgggagctaaatgatgagaactcatggaaacaaatagggaaaaaacaggcactggggcccacttgaggggtggagcgtcggggagggagaggagcagaaaaataactattggggagtaggctttgtagctgggtgatgaaataatctgtacaacgaatccctgtgacacaaaatttaacaaacctgcacatgtactcttgaacctaaaataaaagttaaaaaatttggaatgctttaaaataagcttatttatgagtaaacaaataattagggtcttccttccttccttccttccttccttccttcctttcttttctttctttctttctttctttctttctttctttctttctttctttctttccttccttccttccttccttccttccttccttccttccttccttccttccttccttccttccttctttccttccttccttccttttctttttttcttttctttctgacagggtgtcctctgtcacccaagctggaatgca

SEQ ID NO: 586237 - DNA, 4001 bp, Homo sapiens
tctttctcaacttagtcatgctatgtgtggagacccacatccacactgttggcctctctgactcatcccgggagattcgcttgctccagggaatctcactcacagtgcagtggaacaacagggaggatccagtgaagccagccctctctgaaatctgcctcttttcctggcaactctccttcttgttcaaagccacatgagaagggtgggggtgggggaaaacacaaatatcctctccctttaaggtaatgtttttagtaaatagttttttagcaattctattttctagtttataaggtacttttgttgctgttgcttttaaatattccataatccagctagtcaaaaaaagctgcaaatgctccaattttcctttttcctactccaggaagccaagggagtcaattctgacagtttttttttcccttccagttacagattaaactgtttccccttttgaaatatattattcatgaatgtaaacggtttgtgaactatagctcctcccatccatagatagcaggcgtggtgggtggaaattgctcatccgcctcattgattgctgggggttgtataggagtagatcttcacactgcagtccctgagccaggatttttccttagccctccatttctcagagaaaaccctttgccaaggatggctctagcccatgatatcccaatccagatgtgtttaggcaataaattcctcccactagattggctaaaagggtcaaaatctaataacaatgataatttaaaactgaccactgagtcagatctaagtctggccaataacccagtccaattatttttaatctcaccaagcacatcctgaaagtatgaaaaggaactccaacctgaatgtgccattagctcagggcaggctgacccaggtagctactaaagaagcagctttccacatctaagtgcaggtgtccatagatagaagaaaccaagaggcatacattgtttttggttttgtaaatttgcttagttgtgcacaagtgacttgttagtctagttaaagtaactttcatatgtatatgaataagtacgtattttctttgtctttagtcctaggcatttccatccactgtagtatttttaagaaaatcacttcccatcgttttagttgggggaacatgcccatcttgtattctgactcatcctcagcacaagacctgacacaattatctgactgtcttaatgccacgtgcagtggggacctgtcactagactttcaacctgggaatggataggaaccatctcaccgtcccaaggagtatgggccgtctgttgctgaggtcaataggctcatttgctaggataaaagtgtagttataggaacttctacaaaactcactttagctgaatttcagctgaactaactattggggggagatgggggaagggagatgtaacgtttctgccgactgcgggagctcccacacatcaaacccacaaaactctgtgtgtgtgtgtgtgtgcgcgtgtagggggcggggtggggtgtgcgtacacggcaatgctaaagaaggatgcacgggctaactgccagaggagagctgtcccagcccttccctgttggtcgccttggcttaccttgaccacgtcatcgttgaggtgtttagggtcgcggttgaccaggtcgatctccttggtgtgcgcgtcgtacacttgcttctcgctcagctcgtctgccatggccttgttgttgggcttgtagatgttgccctgttcccggatgggaacggtgtagagatgtccctgcagagggcggagggcggacggccaggacggggagggcggcaacggcggtgggaggaaaaatgcaaaaagaaaaacaagcgatgagaagtcagcctggcggcgggggaaacctcgagctcgaaatcgaactaaccgctccgacagctacggctccgtgcacagaaaccgcctgcgcgtagccagctttttaagaggatctcgcagaggacaccacacccctctgtactctgcagggcgcgcctgcctcccccgcccgccgccaggggtcagggcaggccccgccgcgcggtccgaaggcccccgcccgcgcacgccccggctcagcacgcaggacccgcaggacccgcaggacctcggcggcgagggggcagccgcaggcttctcccggactccctaagccgagtcgctctcgccctgagcgcttcacctgtttcgcgttcccgtccccggtccctattacccctgccccggtaatcccttccagctttatctaagatccaacagcagccgcccgacccgtggaatgttccctttatcgctgcttcttggccgcatccccctcgcacctgcccgcgccccccaccctgcctcggccctctcttgtccctccacggctctccctgctcaatccgccgtgatgatcacaatcccgaaagtccccatttttggcggagccaggcaccagaccccctaaatgtcctagaactcagtctcacctgcgcagctcccccgacccaccctcagggcactcccaggctgcgggcgggtggctgaagggcagctacgtgttggaagacgaggtttccacacccgggcagagctccagcgcgtggagggcgttggaagtgatggtggcagtttggggaggggaggtctacctctctcggaacacccctgccagacgccaagatgcagaaggagttcttgagatggttcaagaactttggaaagtgcaaacacaccgcgcgccgcctgcgggacctgccggtctgggcgcctggcggagagtcccggggactgtccccaggactcgggtaaataacacctccaccctgcactccacctcttcgaacccccagcaggcagggccggaccgcgggggtcccgcgacaagggagcatcctagacccatccagaaaacgcgtcctgggcccaacagacccaatctcaggaccccaatccccttttccgtgtcctcctagctcaggggctccctaggccccctctccattaggaaaacataaaacattcctggcttctcttcacctccccgcccaggcccattcctcagcggtgccaacgccagaggagtgctccgaagtggagagagggctggggccagggcagcagtcgggatatttggagaggcagatagcagaagcggacactccccgcacgcccgagccggcgcccccccacggatgcctacctccgagtctacgtatttgcccccagacatgctggcccgtggctggatgaaaactgtgaggaggtttccctgggctgtgctttaagggaactgaggaaggaagatcttgtattgtatggggggaaaaaaaggcgctggaggggggcggtggctgggagggagcctcctggccgcccgccaaaggtttgttctgctcgcggttggcccggacgtgtgctgcgccgggtctaggcacatccccaaggttctggcagcagagggcggggagcgcccgcagcgagcagagagcgagtgagaacgtttctcccgcgctggggtgcttgggcagattattttaaacctgaggcaacattttccctgctctgaaccaccgagaggcgtcccggggagagcgaatgttttcgcagtgcatcatctcagcaggggtggagggagccgacgcgcctgcagagatgcccagtatgggcaaccaaggcggcagaaacaatccacaatcctgccctgtcctaagccgtcccttcccacctcccccaccccccgcccatcgcccaagttccatctctgccttaaaacacatgtgtctccctgtttcacagagggagggatgaaagacggctaggaacctttaggtacatttcacatctaaactttgtggatcccttatggaaggaatctgtgtgggtgcctgtggtgtacttttggtgacactcgtttacatctagtcggtgtggatggaaacttaagcaggcatgcagaatttaacatttcccatccgtttctgaaatgtctcccaaacgctt

SEQ ID NO: 586238 - DNA, 4001 bp, Homo sapiens
tttcctccaagcctgttatgttttttttccatctgtgttgaagtctcttttcccagtggggcctttctttctcaacttagtcatgctatgtgtggagacccacatccacactgttggcctctctgactcatcccgggagattcgcttgctccagggaatctcactcacagtgcagtggaacaacagggaggatccagtgaagccagccctctctgaaatctgcctcttttcctggcaactctccttcttgttcaaagccacatgagaagggtgggggtgggggaaaacacaaatatcctctccctttaaggtaatgtttttagtaaatagttttttagcaattctattttctagtttataaggtacttttgttgctgttgcttttaaatattccataatccagctagtcaaaaaaagctgcaaatgctccaattttcctttttcctactccaggaagccaagggagtcaattctgacagtttttttttcccttccagttacagattaaactgtttccccttttgaaatatattattcatgaatgtaaacggtttgtgaactatagctcctcccatccatagatagcaggcgtggtgggtggaaattgctcatccgcctcattgattgctgggggttgtataggagtagatcttcacactgcagtccctgagccaggatttttccttagccctccatttctcagagaaaaccctttgccaaggatggctctagcccatgatatcccaatccagatgtgtttaggcaataaattcctcccactagattggctaaaagggtcaaaatctaataacaatgataatttaaaactgaccactgagtcagatctaagtctggccaataacccagtccaattatttttaatctcaccaagcacatcctgaaagtatgaaaaggaactccaacctgaatgtgccattagctcagggcaggctgacccaggtagctactaaagaagcagctttccacatctaagtgcaggtgtccatagatagaagaaaccaagaggcatacattgtttttggttttgtaaatttgcttagttgtgcacaagtgacttgttagtctagttaaagtaactttcatatgtatatgaataagtacgtattttctttgtctttagtcctaggcatttccatccactgtagtatttttaagaaaatcacttcccatcgttttagttgggggaacatgcccatcttgtattctgactcatcctcagcacaagacctgacacaattatctgactgtcttaatgccacgtgcagtggggacctgtcactagactttcaacctgggaatggataggaaccatctcaccgtcccaaggagtatgggccgtctgttgctgaggtcaataggctcatttgctaggataaaagtgtagttataggaacttctacaaaactcactttagctgaatttcagctgaactaactattggggggagatgggggaagggagatgtaacgtttctgccgactgcgggagctcccacacatcaaacccacaaaactctgtgtgtgtgtgtgtgtgcgcgtgtagggggcggggtggggtgtgcgtacacggcaatgctaaagaaggatgcacgggctaactgccagaggagagctgtcccagcccttccctgttggtcgccttggcttaccttgaccacgtcatcgttgaggtgtttagggtcgcggttgaccaggtcgatctccttggtgtgcgcgtcgtacacttgcttctcgctcagctcgtctgccatggccttgttgttgggcttgtagatgttgccctgttcccggatgggaacggtgtagagatgtccctgcagagggcggagggcggacggccaggacggggagggcggcaacggcggtgggaggaaaaatgcaaaaagaaaaacaagcgatgagaagtcagcctggcggcgggggaaacctcgagctcgaaatcgaactaaccgctccgacagctacggctccgtgcacagaaaccgcctgcgcgtagccagctttttaagaggatctcgcagaggacaccacacccctctgtactctgcagggcgcgcctgcctcccccgcccgccgccaggggtcagggcaggccccgccgcgcggtccgaaggcccccgcccgcgcacgccccggctcagcacgcaggacccgcaggacccgcaggacctcggcggcgagggggcagccgcaggcttctcccggactccctaagccgagtcgctctcgccctgagcgcttcacctgtttcgcgttcccgtccccggtccctattacccctgccccggtaatcccttccagctttatctaagatccaacagcagccgcccgacccgtggaatgttccctttatcgctgcttcttggccgcatccccctcgcacctgcccgcgccccccaccctgcctcggccctctcttgtccctccacggctctccctgctcaatccgccgtgatgatcacaatcccgaaagtccccatttttggcggagccaggcaccagaccccctaaatgtcctagaactcagtctcacctgcgcagctcccccgacccaccctcagggcactcccaggctgcgggcgggtggctgaagggcagctacgtgttggaagacgaggtttccacacccgggcagagctccagcgcgtggagggcgttggaagtgatggtggcagtttggggaggggaggtctacctctctcggaacacccctgccagacgccaagatgcagaaggagttcttgagatggttcaagaactttggaaagtgcaaacacaccgcgcgccgcctgcgggacctgccggtctgggcgcctggcggagagtcccggggactgtccccaggactcgggtaaataacacctccaccctgcactccacctcttcgaacccccagcaggcagggccggaccgcgggggtcccgcgacaagggagcatcctagacccatccagaaaacgcgtcctgggcccaacagacccaatctcaggaccccaatccccttttccgtgtcctcctagctcaggggctccctaggccccctctccattaggaaaacataaaacattcctggcttctcttcacctccccgcccaggcccattcctcagcggtgccaacgccagaggagtgctccgaagtggagagagggctggggccagggcagcagtcgggatatttggagaggcagatagcagaagcggacactccccgcacgcccgagccggcgcccccccacggatgcctacctccgagtctacgtatttgcccccagacatgctggcccgtggctggatgaaaactgtgaggaggtttccctgggctgtgctttaagggaactgaggaaggaagatcttgtattgtatggggggaaaaaaaggcgctggaggggggcggtggctgggagggagcctcctggccgcccgccaaaggtttgttctgctcgcggttggcccggacgtgtgctgcgccgggtctaggcacatccccaaggttctggcagcagagggcggggagcgcccgcagcgagcagagagcgagtgagaacgtttctcccgcgctggggtgcttgggcagattattttaaacctgaggcaacattttccctgctctgaaccaccgagaggcgtcccggggagagcgaatgttttcgcagtgcatcatctcagcaggggtggagggagccgacgcgcctgcagagatgcccagtatgggcaaccaaggcggcagaaacaatccacaatcctgccctgtcctaagccgtcccttcccacctcccccaccccccgcccatcgcccaagttccatctctgccttaaaacacatgtgtctccctgtttcacagagggagggatgaaagacggctaggaacctttaggtacatttcacatctaaactttgtggatcccttatggaaggaatctgtgtgggtgcctgtggtgtacttttggtgacactcgtttacatctagtcggtgtggatgg

SEQ ID NO: 586239 - DNA, 4001 bp, Homo sapiens
ggggtgtgcgtacacggcaatgctaaagaaggatgcacgggctaactgccagaggagagctgtcccagcccttccctgttggtcgccttggcttaccttgaccacgtcatcgttgaggtgtttagggtcgcggttgaccaggtcgatctccttggtgtgcgcgtcgtacacttgcttctcgctcagctcgtctgccatggccttgttgttgggcttgtagatgttgccctgttcccggatgggaacggtgtagagatgtccctgcagagggcggagggcggacggccaggacggggagggcggcaacggcggtgggaggaaaaatgcaaaaagaaaaacaagcgatgagaagtcagcctggcggcgggggaaacctcgagctcgaaatcgaactaaccgctccgacagctacggctccgtgcacagaaaccgcctgcgcgtagccagctttttaagaggatctcgcagaggacaccacacccctctgtactctgcagggcgcgcctgcctcccccgcccgccgccaggggtcagggcaggccccgccgcgcggtccgaaggcccccgcccgcgcacgccccggctcagcacgcaggacccgcaggacccgcaggacctcggcggcgagggggcagccgcaggcttctcccggactccctaagccgagtcgctctcgccctgagcgcttcacctgtttcgcgttcccgtccccggtccctattacccctgccccggtaatcccttccagctttatctaagatccaacagcagccgcccgacccgtggaatgttccctttatcgctgcttcttggccgcatccccctcgcacctgcccgcgccccccaccctgcctcggccctctcttgtccctccacggctctccctgctcaatccgccgtgatgatcacaatcccgaaagtccccatttttggcggagccaggcaccagaccccctaaatgtcctagaactcagtctcacctgcgcagctcccccgacccaccctcagggcactcccaggctgcgggcgggtggctgaagggcagctacgtgttggaagacgaggtttccacacccgggcagagctccagcgcgtggagggcgttggaagtgatggtggcagtttggggaggggaggtctacctctctcggaacacccctgccagacgccaagatgcagaaggagttcttgagatggttcaagaactttggaaagtgcaaacacaccgcgcgccgcctgcgggacctgccggtctgggcgcctggcggagagtcccggggactgtccccaggactcgggtaaataacacctccaccctgcactccacctcttcgaacccccagcaggcagggccggaccgcgggggtcccgcgacaagggagcatcctagacccatccagaaaacgcgtcctgggcccaacagacccaatctcaggaccccaatccccttttccgtgtcctcctagctcaggggctccctaggccccctctccattaggaaaacataaaacattcctggcttctcttcacctccccgcccaggcccattcctcagcggtgccaacgccagaggagtgctccgaagtggagagagggctggggccagggcagcagtcgggatatttggagaggcagatagcagaagcggacactccccgcacgcccgagccggcgcccccccacggatgcctacctccgagtctacgtatttgcccccagacatgctggcccgtggctggatgaaaactgtgaggaggtttccctgggctgtgctttaagggaactgaggaaggaagatcttgtattgtatggggggaaaaaaaggcgctggaggggggcggtggctgggagggagcctcctggccgcccgccaaaggtttgttctgctcgcggttggcccggacgtgtgctgcgccgggtctaggcacatccccaaggttctggcagcagagggcggggagcgcccgcagcgagcagagagcgagtgagaacgtttctcccgcgctggggtgcttgggcagattattttaaacctgaggcaacattttccctgctctgaaccaccgagaggcgtcccggggagagcgaatgttttcgcagtgcatcatctcagcaggggtggagggagccgacgcgcctgcagagatgcccagtatgggcaaccaaggcggcagaaacaatccacaatcctgccctgtcctaagccgtcccttcccacctcccccaccccccgcccatcgcccaagttccatctctgccttaaaacacatgtgtctccctgtttcacagagggagggatgaaagacggctaggaacctttaggtacatttcacatctaaactttgtggatcccttatggaaggaatctgtgtgggtgcctgtggtgtacttttggtgacactcgtttacatctagtcggtgtggatggaaacttaagcaggcatgcagaatttaacatttcccatccgtttctgaaatgtctcccaaacgcttcgaaataagaaatgaagatctttaacttttctataattttattaccgatattttctggaacaatggaattttatgccaacaggttatgccatatttgcaaaatacacaaaatgtttataattgtagaattatttaaagcttcaagtttattaccagagaagatttttttttaatgtgcttggctgtgaggaaagatttgacttttctaattgactagacttaaaaaaaatgtgatagcgattaaagtattttgtctgttcctgaatctggggcttctgtctttactttattgtaaagaagcacaaaatgaattaaatagtaatcagtcattttactcttgagctgtaattaatcaggaaactcattatccaaaaatgaaaggacatgttacttatgcttccatatgcagtcaaaagtcaaagtatcacttgaaattattttaaaaaaaaagctggagtacacttgaaggggcacaggttaaaattaaaatggagaggggaatgtgggttgggagtaagagggaggagaaagggaaatggatggaatgctgaaagagttgattatttagttagagagaagacacaaaagtataaaagaactataaaggacaggctattgttggtagcaaaaatttttggaacaaaagatcagttttaactaagaatggcagggaaagtgtcacaatgttacaaatgttggcatgcctgtaattatgttggccattcatgattagcagactaaagatctttcaaaagttggattttcccaaataccacattagtgggagctaaatgatgagaactcatggaaacaaatagggaaaaaacaggcactggggcccacttgaggggtggagcgtcggggagggagaggagcagaaaaataactattggggagtaggctttgtagctgggtgatgaaataatctgtacaacgaatccctgtgacacaaaatttaacaaacctgcacatgtactcttgaacctaaaataaaagttaaaaaatttggaatgctttaaaataagcttatttatgagtaaacaaataattagggtcttccttccttccttccttccttccttccttcctttcttttctttctttctttctttctttctttctttctttctttctttctttctttccttccttccttccttccttccttccttccttccttccttccttccttccttccttccttccttctttccttccttccttccttttctttttttcttttctttctgacagggtgtcctctgtcacccaagctggaatgcagtggtgcattcataggtcactgcagcctggacctcttgggcccaagtgatccacttcagtttcctgatagaatgctgaaactataggtgtgcaccaccacaccctgctaatatttttaaaaagtgtttgtagagacgggggtctcactctgttaccctgtctggtctcaaactcctggcctcaagcaatcctcttgccctagtctcctaatgtgttgggattac

SEQ ID NO: 586240 - DNA, 4001 bp, Homo sapiens
ctcattcatcctggcccagtgcccagcacaaactaagcactcaatcaatttaaagtttgttgaactaactagctagctaactgactaaataaattaagattcaggtggtatagagaaataaaggataaattggtaacttctaacaatgaacaccgagtatttatcagggtgtggcaatatcataaaaggtgtaagaaagacacggaggtaccttgggttatacctttcaccaggactaacctgaagcactagcgtgacaactgttgtgatactggggatgatctgaatattcttcctctcagattaaagtggatattttctaacacaacaacatttattggtaaaatatgacattttccataaaaaatttaaaagatgcttaagaaagttctctacagtttaggacacattttgagtatgaatagagttactcaaaatatcctatcaatatacagtgggcttccatatttctttcccctttaattatatgccacttccatttgtgtttcatcagtgaaaaagtaatttggaggccttctcattcattatcccgcagctggagttttcattcgtttgtactgggggggaccctcgccttaactgcacacacctccctttcctctgggtcccatccttgccatctgccaggggcaaagttgaagcagcccctccacactactgcttaaccaggtctgacatcctcatccaattctactgtcagcggcattctgctcagagatcacttttgttttaccccaagcacaggcagtgactgaataaaaggcaatgaaagaaagaagagtcctgcccagaaccgcaggtacgagtcacaacagggccccgagagcagcctgtggtaagaagtgtggcttccaggtacccgcctccacactcagcccagccttatgtatgcaaggaaaatcacaccccaggaaagaccgacattctttctcctgttgaaactccaagcccaaactgttattctaaaggaagcgcattgcctttcaaggccttccagttcttcctactgcttgggaactgatgcgcgttcctcctcctgacgccggcctgggataagaggagagtagggggcaggtggcggagaatatgcccatgtttcagaaagccggtccacccggtgtgccccgtctcaccagatgtgcagacagctgagggtggcaaagagaattcccgcaatgaaggccaggggaatggccaggaacaccgtcaggaacttgtacattacgtatttgctgatttcaaagagggcatggctgcagatccacactttgtcaaaggagtgcgtagtcaccggctctgcgatcacatcctcgaagcccagctgaggagacaggacgcagggaccccgaactgtcagccaacctgacgccccgggaaccgggagcgctttgggcgggggaagcaggagggaaggacgtgccagggcgtccgcctcttctcttagggtcacggtgggcgcacaggaacctggctaagaattcctggctacgcgggcggcctggtgacgggtgggaccggggaagggtgcgggtctcagaccctgcggggccgacccggtagcaatggtgggacgggttagggcggggctgaggggcgcccgcacctcccggcctcagcggggacttgggcccgcccgccccgggcttcaccttgagatgcgagttgagccggtggggatcccggtcctggtccgagtccgcgaacttctcggggtcggcgtactcgaggccgctgtggtggctgtaggagtcgtcgtccatgaagagctgtacgtccgccttctccgtctccagccccatcgcagccttggtgcgcggccgctgcagcccggctggcgcggtgcggctcccggtccgcgcggcctccccttcccgtagcgcccggccccgccccccctcgcctcgcctagccctgcgaggcccgggcggcggccgcttcccgctgtgggctccagctcccagcccggccgtcccgagccccgccccggcgccccgccgcccctccccgcccacctcccccgccggggcgcagggaaccgtccccacgagtcacagcccgggccctgcagtgggcggcgacgccggcagctgggacgaggagggcctcctggtcacccttctgggggcccgtactgtcatgcctcagagctggcaagtcgtcccagggaagacaacggccttcctggagggagggaaccttgtggttaggcgcatggggtgcgaagcaggtatgtgctcacctccggctgtgtttgccttgcgtgctgcggctcatggtgctggtattgagcctctgggaacctcagctgcctcgttggcaaaatgggggctgtggcatctgtttcaggggtgtccgtgagaattaaatgttaatttcacataaaattctaacacacatggcccatggcccgtaacacacagtgataaacttccaatcaacgttgttgctgctgtcgtgagaggtaaggagccacaatgtacctgagtgctaggtacctgagtgctaggtgacctgcaagtgcatgtggagttgggtaggcgaacgccctggccctagagtttgtgccttcagatctgaggtgtgaggggagatctgattttttttttttttttttttttacttcctaaactacaccgtgtgtgtgtgtgtgtgtgtgtttgtgtgtgtgtggcagagtttcgctcttgttgcccaggctggagtgcaatggcacgatctcggctcatcgcaacctctgcctcccgggttcaagcgattctcctgcctcagcctcccgagtagctgggattacaggcatgcaccaccacgcctggctaattttgtatttttagcagagacggggtttccccatgttggtcaggctggtttcgaactcccaacctcaggtgatccgcccgcctcggcctcccaaagtgctgggattgcaggcgtgagccaccgcgcccgacctccaccttttaattttcttgtgaaccagactgtcttgaaagattcaggaacttctaagatgcagtcacatctgtgattatcttgcaggcagcacggaaacagaaccctaacacaaagccacattgcaatggatgaattagcctgctgaccactcacgcaaaggttttcagaagggaggagtttgcatgttcataaagggctttagggtctggtagacatatacgtgtgtttggggaggaagggcacttagtgaaaatttgccaaaagcaaaacaatgagaactaggcttgaggtgcaggttgctcagagctcaaagtaggcatgtagtaggtattgctggatacagtgtatttggagcttgttgaacatatcaaatccccttatgtgaactggatttgaagaattgcttcttccgaaagaaaaaagatcatttttgaaacagtaaaaattacagaaataaaaaagaacaggaactgaatgagaaaaatgtttgggggtgggaggcaaagttcaatatttctaataattaaaaagtttccctgctgctacctcagtatatgaagggcagtgttgtaaccctatagggtgttacagagttgactctcatggctatggagcccctcctctcccagacatcaccctgcttacccattcccttcttttttacgtatctttctcatttttatttatgttcagtcaattccaaagtgatgacttagacattctactcattgcattttctctgcttctccaccttgtccattctcctgatgagaattggaactcttctagaattgttgcccaacaactgttcattaaagtgaatagaagacatgaatccttatgggaatccataatatcaactgtgaggaacagaaaaaaaaaggagataatttacagccaaataccattttataattataattcaaaattataatcccagatttcaaggtctcacccaaagaagaaagtcactgccctagtacaagagtgggcttatgtagtgggtaaaaatctgacattagcacttc

SEQ ID NO: 586241 - DNA, 4001 bp, Homo sapiens
cagttttgaaagtgagaaaactgacatagaggttagatgattagttttagttaattgggaatcccaaatcttatgtgccaactcagggatcttaaaaaaaattcaagtgcaaatgtcagaatataactatccatttgaccttcatgaagctgatcatgtactaaggcaacattttcatttccctggcaatcttggcaccttcaacatagtttaattgtttacaacctttagtgataaaattaaattggtgttctttgtgtatcctttacgtatttggtgaattttcatttatcctttcaaagtctttttcgactcctttcactcttcaaagccttgtctgttcctccctctttgtcagttgactgtgttttctcagcgtccatctctgtacctagccagctgccctgataaggctgtgagtaagctgaaggcagaccctatctctcattcatcctggcccagtgcccagcacaaactaagcactcaatcaatttaaagtttgttgaactaactagctagctaactgactaaataaattaagattcaggtggtatagagaaataaaggataaattggtaacttctaacaatgaacaccgagtatttatcagggtgtggcaatatcataaaaggtgtaagaaagacacggaggtaccttgggttatacctttcaccaggactaacctgaagcactagcgtgacaactgttgtgatactggggatgatctgaatattcttcctctcagattaaagtggatattttctaacacaacaacatttattggtaaaatatgacattttccataaaaaatttaaaagatgcttaagaaagttctctacagtttaggacacattttgagtatgaatagagttactcaaaatatcctatcaatatacagtgggcttccatatttctttcccctttaattatatgccacttccatttgtgtttcatcagtgaaaaagtaatttggaggccttctcattcattatcccgcagctggagttttcattcgtttgtactgggggggaccctcgccttaactgcacacacctccctttcctctgggtcccatccttgccatctgccaggggcaaagttgaagcagcccctccacactactgcttaaccaggtctgacatcctcatccaattctactgtcagcggcattctgctcagagatcacttttgttttaccccaagcacaggcagtgactgaataaaaggcaatgaaagaaagaagagtcctgcccagaaccgcaggtacgagtcacaacagggccccgagagcagcctgtggtaagaagtgtggcttccaggtacccgcctccacactcagcccagccttatgtatgcaaggaaaatcacaccccaggaaagaccgacattctttctcctgttgaaactccaagcccaaactgttattctaaaggaagcgcattgcctttcaaggccttccagttcttcctactgcttgggaactgatgcgcgttcctcctcctgacgccggcctgggataagaggagagtagggggcaggtggcggagaatatgcccatgtttcagaaagccggtccacccggtgtgccccgtctcaccagatgtgcagacagctgagggtggcaaagagaattcccgcaatgaaggccaggggaatggccaggaacaccgtcaggaacttgtacattacgtatttgctgatttcaaagagggcatggctgcagatccacactttgtcaaaggagtgcgtagtcaccggctctgcgatcacatcctcgaagcccagctgaggagacaggacgcagggaccccgaactgtcagccaacctgacgccccgggaaccgggagcgctttgggcgggggaagcaggagggaaggacgtgccagggcgtccgcctcttctcttagggtcacggtgggcgcacaggaacctggctaagaattcctggctacgcgggcggcctggtgacgggtgggaccggggaagggtgcgggtctcagaccctgcggggccgacccggtagcaatggtgggacgggttagggcggggctgaggggcgcccgcacctcccggcctcagcggggacttgggcccgcccgccccgggcttcaccttgagatgcgagttgagccggtggggatcccggtcctggtccgagtccgcgaacttctcggggtcggcgtactcgaggccgctgtggtggctgtaggagtcgtcgtccatgaagagctgtacgtccgccttctccgtctccagccccatcgcagccttggtgcgcggccgctgcagcccggctggcgcggtgcggctcccggtccgcgcggcctccccttcccgtagcgcccggccccgccccccctcgcctcgcctagccctgcgaggcccgggcggcggccgcttcccgctgtgggctccagctcccagcccggccgtcccgagccccgccccggcgccccgccgcccctccccgcccacctcccccgccggggcgcagggaaccgtccccacgagtcacagcccgggccctgcagtgggcggcgacgccggcagctgggacgaggagggcctcctggtcacccttctgggggcccgtactgtcatgcctcagagctggcaagtcgtcccagggaagacaacggccttcctggagggagggaaccttgtggttaggcgcatggggtgcgaagcaggtatgtgctcacctccggctgtgtttgccttgcgtgctgcggctcatggtgctggtattgagcctctgggaacctcagctgcctcgttggcaaaatgggggctgtggcatctgtttcaggggtgtccgtgagaattaaatgttaatttcacataaaattctaacacacatggcccatggcccgtaacacacagtgataaacttccaatcaacgttgttgctgctgtcgtgagaggtaaggagccacaatgtacctgagtgctaggtacctgagtgctaggtgacctgcaagtgcatgtggagttgggtaggcgaacgccctggccctagagtttgtgccttcagatctgaggtgtgaggggagatctgattttttttttttttttttttttacttcctaaactacaccgtgtgtgtgtgtgtgtgtgtgtttgtgtgtgtgtggcagagtttcgctcttgttgcccaggctggagtgcaatggcacgatctcggctcatcgcaacctctgcctcccgggttcaagcgattctcctgcctcagcctcccgagtagctgggattacaggcatgcaccaccacgcctggctaattttgtatttttagcagagacggggtttccccatgttggtcaggctggtttcgaactcccaacctcaggtgatccgcccgcctcggcctcccaaagtgctgggattgcaggcgtgagccaccgcgcccgacctccaccttttaattttcttgtgaaccagactgtcttgaaagattcaggaacttctaagatgcagtcacatctgtgattatcttgcaggcagcacggaaacagaaccctaacacaaagccacattgcaatggatgaattagcctgctgaccactcacgcaaaggttttcagaagggaggagtttgcatgttcataaagggctttagggtctggtagacatatacgtgtgtttggggaggaagggcacttagtgaaaatttgccaaaagcaaaacaatgagaactaggcttgaggtgcaggttgctcagagctcaaagtaggcatgtagtaggtattgctggatacagtgtatttggagcttgttgaacatatcaaatccccttatgtgaactggatttgaagaattgcttcttccgaaagaaaaaagatcatttttgaaacagtaaaaattacagaaataaaaaagaacaggaactgaatgagaaaaatgtttgggggtgggaggcaaagttcaatatttctaataattaaaaagtttccctgctgctacctcagtatatgaagggcagtgttgtaaccctatagggtg

SEQ ID NO: 586242 - DNA, 4001 bp, Homo sapiens
ccttcattttcaccaaaccaaccttcccttcccgtctactgcaatcagctattttccatcattcttacctccctctcttacaccattcttcatagaacagcctattgtattttttaagagactgtgttcctcctccacttctgttcaatggcttcatattcacttaaattaaaattcaaacgtttaccacggctttcaatgacctgaatgatgtgcctgctgccctcctttccaatctcacttcaggactcctaccctctggctattaggaggctgcagctgacttcactgtatcttcctacctcagtgccttcgcacttgctggaaatgctcttcctcttgcttttttcccagggctgggttcttctcatccatcagatcttagcttccacaaagaccattcctaacaaccctctctgaaatttcgtcctatgaatctctccacagcactcgtttattttcttcaaaataatccgcaaacattaaaaaaataataaatttaaaaaaaaagaacgtattgtctgtgttcctccataaaacagaagttctatcacggacctggtccgtctcgtttaccattccatcttccatctcccgacctatagatatctgcatgtatcttgcataaataaacatacacacctacataaataaacatacacacctaattatataaccaagtagatatctgatgagtgaggacaactcaatactcaagaaaaagcctttttttctctatttgtgatacggtcgctataaatgtatggggcacataactccaagagcactcattcaatatccaagaaccacaaagaagcaaaagccagaaaatacataacaaagggtggagccactcttacttggagaaaagtatgagaatgccttgattttaaactcctctttgtaaataccctcaaatgatgagtaaggacctcagccgaagcgcggggcatgcttttggtttaggtagaaaaactgctccgagtttgattccaaaaactctatcagactcccttctttcacccctctagtccataaaggatcggagagacgacagggggtgaccactgcagcacccgcccaaagctgactgagacagcaggaagtctccaacccattctcgcccgtccactcccagcgtaaagaggattccgcgactcggagaccgcaatctacccgccagtctccataacgtaggccagagcagctgggctaaataaaacagagccggggctctcccttcccgaaggcctacatcgcccactggtccgggctcggagctcagcagaaccagagtaggagcggttgttgccggcacggaggaggtaggtaccacaccagacggtaggccaggaaaccgcaggcccctgccgggcacaggaaggcatctgtgagatttcttctcactgccacaccctagtgttgtggggcgagcataatcccttttgcctgctgtgcgaccagccccaggccggccaagggggcttggaaccgggacccccactgcctccgcctccttaccagtgtgatccatgattcggctcgcagagcacagtgggagcggaagtcaaccgcgccggagtcgcagcgagcgcgtgcgcactgccttccggaggccgggaggcggaagtccaagcaggttgtcccaattttggcctgcaaagacttccttctctcgcctctactatccaactcctgtgagggactcaggcatagttcgggcggaggcagaaagagcgagcgcgcgaagaacttcggtattgaggttgctaaggcttctcctcatgtgcttcaagagaaagtagcctttaactgtggaaaggacaccagggggaccggggaaggggagagcagtggtaaaaatgagccagaagcagataaggcgactgcccgccccgcggagagctgccttctgggacttgtagtgcgcggggcccccggagccggctggctgcgcaggctcggccgttgcgctggccccaccccggcgggcggagtaacggtttggaatcccccggggtcagcgagcgcttgtttcctccgcctggtgtagcaaaagtgtaaacacgcgcgctccggaaggcgccctccagtgggaggttgctcaggggatggcggagctgtgaaactcggagctagaaggaaagtctcaacgcttgtctaaattttgctttgtcgtgacgagctacctagacccacgcagagctaacttggtatatgccccggttcccatctcttaagtctctttacagttgaaacacgtttataatgcttgactgccactcactttctagggagagcgcttgtgacgctacgaacctctcgaacacctgacgactgggcgccagggccggatggagggtggagagccagtgcggcgcagctgcctcctcttaacggggacaccttgcaggaatgtgcggagtggagctaacgggagcggatagaaaccgagggaggggaagagagcgcgaaggcttggccggaaggagaggttaaaaaggaaaggcctaaaatgaggaagagagttaccacaacaagcagtacctagttccagttcttggtcccaggagtttgtggttgttgctgctttcatcttcctcagccaacacaaaaggaaagtgccaaggggcgattcctaggaccttcagtgcagtctccaccttgcggacttggctcatttgtgtccactcctttctccagccttttacacttgatgctcttggatgaatagaaaggagcacaattaatggaaaacacaagcttgggagtcaagggatttgggttctattcttgtcctcccttggtgacgacatcattaccttgggttattcaagctttcagtgccagagttcctatatcaataaaagattattacattgacctcttagagaaatgttttcatggtactgaattgcaaataaagtatgtgtagcgatgtgttatatctttgtagttgtacggtattatttgtgaatcatgctgtgatgatcagtgcgatttaagtgcaccatgttatttggtgattattttcctgagatcttgtaaaagatttttctgctctatatatgcagctttataaacaagtttttaggtacattcacaactaaggacatttgtgaatcaaaattacccctgctttttttaaatgtaaagttctgtattgctaggtggttttcaagatgctttcagtttctgggattattgttttgggcattggggcttgcctaacctttttcccatacctccctatttttctaaatacagtgttgatatagtcaggcatttttcaccaatttgggttttttttttttttttaagttttcacttagaaagtacttctttttcatattaaaaaaattttttttagagatggggcagcccaaactggaacacaatggcagaatcatagctcactgcatccttggactcccgggctcaaggggtccttatgcctcagcctccggagtagttgggactacagatgctcatcaccaccactggctttgatttttttgttctatcatacttagcctatcagctaacggttaaccttcagattcatggaaatccaggttcagaatagtattattaatgtctgctgatgctaatatttaaataattagaattaaaaagagctttcaaattgtattttatataatttaacctgtaagttagaagttttgttggcattttatggtgcatcaagaaaatttactgagagaagatgtacttactttagatctgataaaatgttaaacatttgtttgatttgatttgacatctcttactttcaggcattgctttagcatctgtggtctgtatttacccccttaattgtggttgccttgaattaccaatgcagtagcagtgtgataaattaatttctttacctatgttttattactgccctctagtatctcttttcagcgaccagcgtgctgtaaccagtcacaatttctttatcaagagttgccattaatatttatttatagagcata

SEQ ID NO: 586243 - DNA, 4001 bp, Homo sapiens
actattaagccaagccagtatctccctgtaatgaattcgtttttctcttaattttcccctgtaatttacactgggagagctgggaaatatgtggatgtaaatttctcagccacagagatgcaaagttatactgtggggaaaaaaaacttgagttaaatccttacatattttaggttttcattaacttaccaatgtagttttgttggaggccattttttattgcagacttgaagagctattactagaaaaatgcatgacagttaaggtaagtttgcatgacacaaaaaaggtaactaaatacaaattctgtttggattccaacccccaagtagagagcgcacatttcaaacgtgaatacaaatccagagtagatctgcgctcctacctacattgcttatgatgtacttaagtacgtgtcctaaccatgtgagtctagaaagactttactggggatcctggtacctaaaacagcttcacatggcttaaaataggggaccaatgtcttttccaatctaagtcccatttataataaagtccatgttccatttttaaaggacaatcctttcggtttaaaaccaggcacgattacccaaacaactcacaacggtaaagcactgtgaatcttctctgttctgcaatcccaacttggtttctgctcagaaaccctccctctttccaatcggtaattaaataacaaaaggaaaaaacttaagatgcttcaaccccgtttcgtgacactttgaaaaaagaatcacctcttgcaaacacccgctcccgacccccgccgctgaagcccggcgtccagaggcctaagcgcgggtgcccgcccccacccgggagcgcgggcctcgtggtcagcgcatccgcggggagaaacaaaggccgcggcacgggggctcaagggcactgcgccacaccgcacgcgcctacccccgcggcggccacgttaactgggcggtcgccgcagcctcgggacagccggccgcgcgccgccaggcctcgcggacgcgggaccacgcgccgccctccgggaggcccaagtctcgacccagccccgcgtggcggctgggggagggggcgcctccgccggaacgcgggtgggggaggggagggggaaatgcgctttgtctcgaaatggggcaaccgtcgccacagctccctaccccctcgagggcagagcagtccccccactaactaccggcgctggccgcgcgccaggccagccgcgaggccaccgcccgaccctccactccttcccgcagctcccggcgcggggtccggcgagaaggggaggggaggggagcggagaaccgggcccccgggacgcgtgtggcatctgaagcaccaccagcgagcgagagctagagagaaggaaagccaccgacttcaccgcctccgagctgctccgggtcgcgggtctgcagcgtctccggccctccgcgcctacagctcaagccacatccgaagggggagggagccgggagctgcgcgcggggccgccggggggaggggtggcaccgcccacgccgggcggccacgaagggcggggcagcgggcgcgcgcccggcggggggaggggccgcgcgccgcgcccgctgggaattggggccctagggggagggcggaggcgccgacgaccgcggcacttaccgttcgcggcgtggcgcccggtggtccccaaggggagggaagggggaggcggggcgaggacagtgaccggagtctcctcagcggtggcttttctgcttggcagcctcagcggctggcgccaaaaccggactccgcccacttcctcgcccctgcggtgcgagggtgtggaatcctccagacgctgggggagggggagttgggagcttaaaaactagtacccctttgggaccactttcagcagcgaactctcctgtacaccaggggtcagttccacagacgcgggccaggggtgggtcattgcggcgtgaacaataatttgactagaagttgattcgggtgtttccggaaggggccgagtcaatccgccgagttggggcacggaaaacaaaaagggaaggctactaagatttttctggcgggggttatcattggcgtaactgcagggaccacctcccgggttgagggggctggatctccaggctgcggattaagcccctcccgtcggcgttaatttcaaactgcgcgaccgtttctcacctgccttgcgccaaggcagggggcgggaccctattccaagaggtagtaactagcaggactctagccttccgcaattcattgagcgcatttacggaagtaacgtcgggtactgtctctggccgcaagggtgggaggagtacgcatttggcgtaaggtggggcgtagagccttcccgccattggcggcggatagggcgtttacgcgacggcctgacgtagcggaagacgcgttagtgggggggaaggttctagaaaagcggcggcagcggctctagcggcagtagcagcagcgccgggtcccgtgcggaggtgctcctcgcagagttgtttctcgagcagcggcagttctcactacagcgccaggacgagtccggttcgtgttcgtccgcggagatctctctcatctcgctcggctgcgggaaatcgggctgaagcgactgagtccgcgatggaggtaacgggtttgaaatcaatgagttattgaaaagggcatggcgaggccgttggcgcctcagtggaagtcggccagccgcctccgtgggagagaggcaggaaatcggaccaattcagtagcagtggggcttaaggtttatgaacggggtcttgagcggaggcctgagcgtacaaacagcttccccaccctcagcctcccggcgccatttcccttcactgggggtgggggatggggagctttcacatggcggacgctgccccgctggggtgaaagtggggcgcggaggcgggaattcttattccctttctaaagcacgctgcttcgggggccacggcgtctcctcggcgagcgtttcggcgggcagcaggtcctcgtgagcgaggctgcggagcttcccctccccctctctcccgggaaccggatttggcggccgccattttcatggctcgccttcctctcagcgttttccttataactcttttattttcttagtgtgctttctctatcaagaagtagaagtggttaactatttttttttcttctcgggctgttttcatatcgtttcgaggtggatttggagtgttttgtgagcttggatctttagagtcctgcgcacctcattaaaggcgctcagccttcccctcgatgaaatggcgccattgcgttcggaagccacaccgaagagcggggagggggggtgctccgggtttgcgggcccggtttcagagaagatatcaccacccagggcgtcgggccgggttcaatgcgagccgtaggacaaagaaaccattttatgtttttcctgtcttttttttcctttgagtaacggttttatctgggtctgcagtcagtaaaacgacagatgaaccgcggcaaaataaacataaattggaagccatcggccacgaggggcagggacgaaggtggttttctgggcgggggagggatattcgcgtcagaatcctttactgttcttaaggattccgtttaagttgtagagctgactcattttaagtaatgttgttactgagaagtttaacccttacgggacagatccatggacctttatagatgattacgaggaaagtgaaataacgattttgtccttagttatacttcgattaaaacatggcttcagaggctccttcctgtaatgcgtatggattgatgtgcaaaactgttttgggcctgggccgctctgtatttgaactttgttacttttctcattttgtttgcaatcttggttgaacattacattgataagcataaggtctcaagcgaagggggtctacctggttattttctttgaccctaagcacgtttataaaataacattgtttaaaatcgatagtggacatcgg

SEQ ID NO: 586244 - DNA, 4001 bp, Homo sapiens
tgaaaactgtaactttgaatttcatgatttttatgtgaatattccagggtttaaaaaaacttgtaacatgacatggctgaataagataaaaaaaaaatctagccttttctcccttctggctcatatttgcgatttcgatcattttgtttaaaaaacaaaacactgcaatgaattaaacttaatattcttctatgttttagagtaagttaaaacaagataaagtgaccaaagtaatttgaaagattcaatgacttttgctccaacctaggtgcacaaggtaccttgttctttaaattgggctttaatgaaaatacttctccagaattctggggatttaagaaaaattatgccaaccaacaagggctttaccattttatgtaacatttttcaacgctgcaaaaatgtgtgtatttctatttgaagataaaaatcctcagcaaaatccacattgcactgtccttcaaagattagccttctttgaactagttaagacactattaagccaagccagtatctccctgtaatgaattcgtttttctcttaattttcccctgtaatttacactgggagagctgggaaatatgtggatgtaaatttctcagccacagagatgcaaagttatactgtggggaaaaaaaacttgagttaaatccttacatattttaggttttcattaacttaccaatgtagttttgttggaggccattttttattgcagacttgaagagctattactagaaaaatgcatgacagttaaggtaagtttgcatgacacaaaaaaggtaactaaatacaaattctgtttggattccaacccccaagtagagagcgcacatttcaaacgtgaatacaaatccagagtagatctgcgctcctacctacattgcttatgatgtacttaagtacgtgtcctaaccatgtgagtctagaaagactttactggggatcctggtacctaaaacagcttcacatggcttaaaataggggaccaatgtcttttccaatctaagtcccatttataataaagtccatgttccatttttaaaggacaatcctttcggtttaaaaccaggcacgattacccaaacaactcacaacggtaaagcactgtgaatcttctctgttctgcaatcccaacttggtttctgctcagaaaccctccctctttccaatcggtaattaaataacaaaaggaaaaaacttaagatgcttcaaccccgtttcgtgacactttgaaaaaagaatcacctcttgcaaacacccgctcccgacccccgccgctgaagcccggcgtccagaggcctaagcgcgggtgcccgcccccacccgggagcgcgggcctcgtggtcagcgcatccgcggggagaaacaaaggccgcggcacgggggctcaagggcactgcgccacaccgcacgcgcctacccccgcggcggccacgttaactgggcggtcgccgcagcctcgggacagccggccgcgcgccgccaggcctcgcggacgcgggaccacgcgccgccctccgggaggcccaagtctcgacccagccccgcgtggcggctgggggagggggcgcctccgccggaacgcgggtgggggaggggagggggaaatgcgctttgtctcgaaatggggcaaccgtcgccacagctccctaccccctcgagggcagagcagtccccccactaactaccggcgctggccgcgcgccaggccagccgcgaggccaccgcccgaccctccactccttcccgcagctcccggcgcggggtccggcgagaaggggaggggaggggagcggagaaccgggcccccgggacgcgtgtggcatctgaagcaccaccagcgagcgagagctagagagaaggaaagccaccgacttcaccgcctccgagctgctccgggtcgcgggtctgcagcgtctccggccctccgcgcctacagctcaagccacatccgaagggggagggagccgggagctgcgcgcggggccgccggggggaggggtggcaccgcccacgccgggcggccacgaagggcggggcagcgggcgcgcgcccggcggggggaggggccgcgcgccgcgcccgctgggaattggggccctagggggagggcggaggcgccgacgaccgcggcacttaccgttcgcggcgtggcgcccggtggtccccaaggggagggaagggggaggcggggcgaggacagtgaccggagtctcctcagcggtggcttttctgcttggcagcctcagcggctggcgccaaaaccggactccgcccacttcctcgcccctgcggtgcgagggtgtggaatcctccagacgctgggggagggggagttgggagcttaaaaactagtacccctttgggaccactttcagcagcgaactctcctgtacaccaggggtcagttccacagacgcgggccaggggtgggtcattgcggcgtgaacaataatttgactagaagttgattcgggtgtttccggaaggggccgagtcaatccgccgagttggggcacggaaaacaaaaagggaaggctactaagatttttctggcgggggttatcattggcgtaactgcagggaccacctcccgggttgagggggctggatctccaggctgcggattaagcccctcccgtcggcgttaatttcaaactgcgcgaccgtttctcacctgccttgcgccaaggcagggggcgggaccctattccaagaggtagtaactagcaggactctagccttccgcaattcattgagcgcatttacggaagtaacgtcgggtactgtctctggccgcaagggtgggaggagtacgcatttggcgtaaggtggggcgtagagccttcccgccattggcggcggatagggcgtttacgcgacggcctgacgtagcggaagacgcgttagtgggggggaaggttctagaaaagcggcggcagcggctctagcggcagtagcagcagcgccgggtcccgtgcggaggtgctcctcgcagagttgtttctcgagcagcggcagttctcactacagcgccaggacgagtccggttcgtgttcgtccgcggagatctctctcatctcgctcggctgcgggaaatcgggctgaagcgactgagtccgcgatggaggtaacgggtttgaaatcaatgagttattgaaaagggcatggcgaggccgttggcgcctcagtggaagtcggccagccgcctccgtgggagagaggcaggaaatcggaccaattcagtagcagtggggcttaaggtttatgaacggggtcttgagcggaggcctgagcgtacaaacagcttccccaccctcagcctcccggcgccatttcccttcactgggggtgggggatggggagctttcacatggcggacgctgccccgctggggtgaaagtggggcgcggaggcgggaattcttattccctttctaaagcacgctgcttcgggggccacggcgtctcctcggcgagcgtttcggcgggcagcaggtcctcgtgagcgaggctgcggagcttcccctccccctctctcccgggaaccggatttggcggccgccattttcatggctcgccttcctctcagcgttttccttataactcttttattttcttagtgtgctttctctatcaagaagtagaagtggttaactatttttttttcttctcgggctgttttcatatcgtttcgaggtggatttggagtgttttgtgagcttggatctttagagtcctgcgcacctcattaaaggcgctcagccttcccctcgatgaaatggcgccattgcgttcggaagccacaccgaagagcggggagggggggtgctccgggtttgcgggcccggtttcagagaagatatcaccacccagggcgtcgggccgggttcaatgcgagccgtaggacaaagaaaccattttatgtttttcctgtcttttttttcctttgagtaacggttttatctgggtctgcagtcagtaaaacgacagatgaac

SEQ ID NO: 586245 - DNA, 4001 bp, Homo sapiens
caaagccaactaggctagcatctctggcctcaaacaaagaggccccagggaaaaccaggcagttggcagaaggagctgaaggagaagtcatgaaaataaataataaagttggatgaggggattgacaagctaaagttatgaagaatcaggcacaacaggtataggggctatgagcaaaagatacagagtagggagaaagagaacaaagcatgtcaaaaatgcagagaaactgtgcagctcatgagagagtgataactggctggtagagattcttatttctggcagctttcttgttctcttaaatgtattccttctttcaaggtagtttgaaagaattatatgacctgaagcaggaagaaacactaagaacacaaatgactaaaagggtttacacaaattttgtttccacatttaaaaaaaaacctctaaaaacctttatcattgaaagtctgagctagaagagtccttggaatcagaccaattcactattttagagatgaggacattgaggaccacaaagtaatctcaggttacacagatagtgacagagcaaggacaaaactaaggactcctatttccgtagccattactctctgtcctacactgcactaaataacaccaacatagaaacattttcctcaaaacaagtatttttgcaacacattttagagtgagaaattattaatcagtgagaagatgcagacagatgtagaaaaaagttgacccaggttaaatatggtgaagcccagaggcaggactgtaaaatacctggatgcctactctgacgaaacaaacacttagcgcctctaaggattcccaaaggacacacctgagggggaggggagaggtgaatacttgtacctctgaagctgatccacagaaaagcagagtcatcaatttcctaagaacattctcagccatcttaaaacagcaaaaattaggaagacggcatattttaatgaatcctttggttaggtttaagataaagtgaagaacacacaacccaggatgattaaacaaacaaaagcacaaaactcaagtccagaggccacttcggtcacttcagtcatagctaatgaaagtatcacaaaggatcttttcatcaaatgaagaactaatgacgttataggtctatattcctaattctaaccacttacaggtgtgtgttttgatggatgagaaaactcaagcttagagcctttaagtaaccaagatcaccaaggcaggcagtgagagaaacccaggcaggattcgaaccctagctggctgagccattctcattaccgtcacagtcaacaatcaacacggcagtttaagttcatccttaccagtcacccaggagatgagttttgaagagggagtttaaaaggggcatctgactttctctctctcccaaagtagaagagaactgagctgtcaaaaacagaaaaagaagtgagtgcggtgccgcccgggatctacatcccgcagctccggaccaagcccgccccgctcgactcgcgcagccccagccacgctcggctctccgcccgagccgaggcgccgcggctgtcagacgcggaggggcagagacgcggcccaaaggaagggacaaagagccttcccggccgcggccggaggctgccggcccgttcctaagccgggtttccgcagcagcggccctagcggggcggggaccggggacgggggcgcggcgggggaggagcggccggctaggctgaggggcgcgcgagaggtgcgggcccggctggcggactcgccccttactcattacctggccgtgggcttctcgtcacggtcgccgccgccacggagcttctgagccggggcgacgcagcgagagctaataagcgggcgtcagctgcgtcccacactggcgaagcagcctccagatcgagctggagaaacgccggtgggtgggagttgggacgaggtttgttcccagcttgtggagattttactccgctcgtccctcgcactcggcttccgctccgcctccctgccggcccttcccgcactcgggggccagccgcccgcggcgcgcggcattgtgggggatgtagtcccagaatgaggaagcggcggcacgtgcttccagccgccctgcacctaccctgggtcagaacgacgcagctgcgcggcaaccagagagggcggcggggtcttctgtgttggaagatgagcccgccagaggcataccctcggccttaactcgctgcaggcgctggaagaagggctctggcgtcttgttcccgaccctccggtgaggaaccaacctcctaatactattgacctgaggctgggaaagcttagtgatgattaagtgtgctacagatgagactacccattattgaagccaaaggtccttagccagtggagtgaggcaagaaaaataaaaggattgaagattaaataggaagaaacaaaattattttttcatagattatgtaattatgtacgtggaggccgggcgccgttggctcatgcctgtaatcccagcagtttgtgaggccaagacgggaggatcacctgaggtcgggaattcgagaccagcctggccaacatggtgaaaccccgtctctactacagatacgaacttagcagggcgaggtggcggacgcctgtaattccagcctctcggggagctgaggcgggagaattgcttgaacccaggaggcggaggttgcagtgagctgatatcgcgccactgcactccagcctgggcaacaagagcagaactccgtctcaaaaaaaaaaaaaaattgtttgtggcacttcaaaacaatctgcagataaactgttaacaataaaagtttttaacaaggttaatagatacaaaaatcatattttaaaaaatcaatatttatttatatatgctagtaaaaaagataatttttttaaagataccatttccaacagctccaaacaaatatcaagtacctaggaataaatcgatcaaagaaatgcaaaacctgcctgaagaaaacattggaagacactgaagaagacctaaataaagatgtaacatgttcataaattggaagagtcaatactgaaaaatgccaagtctctccaaacctacctacagagccagtgcaattcccaacaaaatctcaataaatttctgtgtatgtgtgagaaacttgacaagctaattcaaaatgttatggaagagcaaagacaagcattcatgaggaagaggaggaagaaaaaaaaagaagaggagaaggagtgggaggaggaaaacttgtgctaccggataacaagctttattatagactaggcacggtggcccatgcctatgatctcagcacttcgggaggctgaggcaagtggattgcttgagcctggagttcaagaccagcctgggcaacatggcaaaaccccatctgtaccccccaaaaaaataccaaagtcagccagttgtggtggcatgcacctatagtccctgctactcaagaggctgggggcaggaggatcactttgagcccaggaggtggagtctgcagtgagccataattgtgccactgcactccagcctgggcgacagcaagcctcttcctcaaaaacaaaacaaaacaaaacaaaaacaagctttattttaaagctgtcaacctaaataataggacctctaaaagaaaaagacactcacttaagaatagggcattgcaatgggaatatacatgccacagtaaactctgtgtgtattcagggaggtaaaggaagacaaagaaaaaatgaggaggattaaataattgctttgaaattattatgcttggctacaaggatcaataataagggtgactccagttctaggttcaacaggcagttgctgggcagatgtccacacagaagtacttgttgtgtaaggttgcagtggtctttatgtaaggttgtggtttttgcagagtcttttgcaatagtttagttatcaggtatacacatgtgaaagccttcccttcttagccttccccagctctgtcagggtgttttgtttttaa

SEQ ID NO: 586246 - DNA, 4001 bp, Homo sapiens
taaccattaatgtggttaataccatatttaatttgctgcaaggtcaatgtttaataacctaatattttgttggcaaaaaaaaactattatgaaaggtacaaatatctagcctgtttcttctcctaacacagtacttttatcatcttatatgaaacagaagctcagcctcgttaaaacttcacaacattttggagagctgcttgttccctgctcccttcattctcttgttctcattctctcttcacattccctccttccatcattctttctgtagataagaaatatatcattttggctcattgcaaacattttaaacaatacaatgtgtataaaattaagtgaaaattcatatccctacgttttcaatcttacaatgtaataatcacatcaagttgttgccaatccttgtcctctgggctttttcacgtactggacatcatggtatgtccaagtagatacatttgactcttttttgttttgttttgttttgttttttgagacggagttttgctcttgttgtccaggctggaatgcaatggtgatatctcagctcactgcaaactctgcctctcaggttcaagcgattctcctgtctcagcctcctgagtagctgtgattacaggcatgcaccaccacacccagctaattttgtatttttagtagagatggggtttctccatgttggtcaggctggtctccatttgacttatttttagtggctacatactagtccattgcatggacataccacaacttgtttctctctgttttttctttttttttttttaaccactgctgtagaaagcagagcatttccctcattgcctttataagttcatgtatttttctagtggagaagtagtggaaaggaatgaaaaggtattcctataacaatttttttaaaaagcaaaacttttcctccaaactctcccacttcttgatctcttgccttagaggagttaggaaaatggtctggtaaagttatgagttagctatatattatccaataagaatagataattactaaatcaccactttcttctcttctgtcaattcccctaaaattgttactgaaatgggccaggctctcaggtctgaaccaggagaagtgagagggagctgtgaatgacttaataaaggtacctgctaaaaacacaattgcttttattttatatatattatgtaaaatattaacctttatatattacataaaattcatgtttatagtatatataaagcaatttatatatctatttgtgtatatatatgtgcaaatatgctatctagtctggttggaacattcaatttcattagtatttaacacatcttattcattagcaacatatatctgttaaagttgaagtaccaacatactattctgacttgtggcattttgcaaattatactggagcgatatcctcacacaaaaatattactagctgaaaactagaaatggagcaacaccgtgcttataagctgtacttacctgctggactctctctctccctcattccctggaattggctagctctcaaaaccacaatatttaattgtcaattattagcccccacaactccagattagcttttttctcctctgcccccatccaggaaatggccaatactcaatattccttcttacatttcaactcctttatcaccaacagcatttaacattattttatttgattctaacaacttcagtctgatcaatttcacctgcatttaaaggaagcctattagctaggttacaatctagagggagagaagaaggtaaacgttttgtgtcccttttttgaaatgatcatggagaatatttaggttcctagagcacacacatacaaaagtttttgataaacagtcttaccttccttagttggaggaggggacaagcaatgtttatccctcaaagcagatgatcatgaaagccccctccagcagcctctacccacctgccacaaaagctccactcctgagccatctgaaagttcctgaaggaaacagtgtagcatttgactaatcttgcataacattttcataatccacacccattgtcctaaggaaaaacctgttttcctcatccaaagggatcaggaaacaatcaaaacagaagcctgcgacagaatggcaccttcagacaactaaatcagactgaaagagacttccagcattcacggaccctcaggattttataagctctacttcatgccagacactcgtctggaaaaaggagatgtgaagatgaacaaattgctttcctctccccctaagaacgtgcagccttttagggccacaagtgtaaaaacaactagtaacttccgtggaggaatattgaggccacagagggagaggtgatgagttatccatagggaatttgggaagccctctcccaggggataatgcctgtgatgagttttgaagcacgaataggaactttcctgatgaacgagggttgaatagggttggggctgtggggaggacattgaaggcaaacagagcaccatatacaagatgcacaaaattagccaacagaatggtacattcagggaattgtgaagaagtctgtgtggctgaaacatagactatatggaaacaaaagagagagatgagactgaagaagcagaagtgttgtctgatgggctaacttatgacttagaaaataataactgtgatgggggtattataatgattctacactttagtgtctgaatgcagcatattgtttgtaattgagaacgagaagcattggtggaagtagtttaatgtatatctaattgttctgtgtgctcagaaaatgggtggtctggttaatcaaatgacctagcttgagtgaagacactgattaccaacttccaaataattagaatcattaaaatacattaaatgttaaggctgtcattactgcacattaatattcctttcacaattcaaaaggatgttcaatactttagaacggttcaggcctgttatcagtgtgaatgtcattcacctatcattagtgtgagtatcatcctgcctaaggacacaggcgattgctaacaaggtctgaggaggaggtgagcttagggttctcctatttgagaaaaccacttgcgtttgagagtgtttttataccttcatgtgctgggaaccctcctgacagattgaatttgggccagtgtaataaatgaagcactattctaataatgttaatacaaacaaataatcaaaagaaatctcatctccccatgtgatctcagcaacatatggtcttgcggttgaatcttggcaagttaattgtcataagaaccctgaaaggaagacagaatgaattggtaattttattcctaggtcagacctccatccttatttccctgttcccacaaactggcaaacacttgaaagagcaagtatgttctattgttaacatttcttcctccagcgaagtcgcattaatgactataatttgctctattactactggctttgaagtttcattaagtggttttatatctattattttgttatgctttgttttgttttgtttcgttttgtttctaaagacctgtgggatacctcgagcaggaatcttgttttgttttctcccctacatttaacatgtcagaagctaaagcttaagagaggtgactttctttgcccaaggtcacatgacctgaactacaactcatgtttctatcttcaagcctgaatatccttgtgtaagatcatagtgccttgagcacatttccttaaaatagagtcatccaaaaacagtaaattgtactgttggtctccaggaaatcctgaccagtttccatagcttcccagtgaatatcttttttataagatcatagtgccttgagcacatttccttacaatagtgttgtccacagacagtaaattgtactgttggtccccagaaaatcctaaccaatttccacagcctcccagtgactgttagatgatccagtgcccatcttccttagccttctctaatgtcctgaccagatcattagagacagg

SEQ ID NO: 586247 - DNA, 4001 bp, Homo sapiens
aattccctgcgggcttcctgtaggcctcctgtcagcacccctagccagtctgggacttgtgagtaatacatttctttggtttcacgcattttattttcgcagcttcattgtgtctcacctgactgacacagccaaacctaatgctcccccagtgaacgatctcctgaaaagtggctatcttggcttatggccactcaagagagagacctcaaaaccaaattagaaagaaacgataacaacgaaaatcataacacttcctcatatgctccttaatttcttaatcttctatcatgttcatgaattattcttataatcagaaaattaggtactcttaaaaatattttattttgtactctgtgggataattccaagtgctaccaaggagaatctttattttctctatattatttccttcttcctaaaatttatcaacttgctttatttatctttgtagtatatggagatcatcttgtaactatgcaaactctgcaggatttccaacatgcctaaactatgctctgatattctggtcagtgctttccagctttttgatgcacagagcagctctgcacccagctccatttgggctccctctaaagtcctggaggagcctgctctgggagatgaccagccctggagttttcccagacctactccagaggcagccccaaaagacaaagtatcaatatctcccagaacattggatggccacttgaacagtacttgtagagaagttctgagcaaggctaatcaggcagtactctggtgtctgaaccagaagatatagatcctatatattatcgtaatcatgatcagtttcaatacctagttgggaaactgattaactcatgtgttaacattatgaaacaaacaatgaactctggacttgttataattatttggactattgcttcctttttttaaggtttgaacccaagtattaagtcacttcccaatactgtataataagacaatgataattaggcaagttttcaatggaaaattacagtgaaagtttacagtgagaaatggatgatttttctcataatcttcaattttcatctttgaattgaattgtcttagcaaatagaaataaaaggcaattacatgtgaatttcagatcaaaaaatacatttatgggcataactgtgacctatttatttataactgtgccccgttatttgggatatacttataccccccagatacgctattgatctaaaactcaaatgtcactgggcatcctaaattttatctggcaactctatccctgagtcagctttctccattcctacatggctccagtacatcacgttcagtctttatatttagtgaattcactgattaattaaaaatgagaaagttcatttctttagctttttcttaatgaattaagcctccttcaggtaagcaagaaagacaaaaaaagtcctaagtacaaagaatagcaataaaaagaagggaaaatataatttctgcatcactcctcagaaacattgcttgaactagtattcagaacatagaggctatataaccgagcaattttgagcccaaagcattttcatcccctgtgttttagacctttccatgttaatggcagccacctaggtagtcctgggggtaaatgaaatcatctaggcccaaatccatgacaattagatcacttcatcttcttgctaatagtttttcttcctaggaatcacccagtcacacagctgcaggtaaagaagtttcagaacacgccatcgctgccctttcattccaactgagagaaaatgagagcagacagctaatacccctccccaacaggctggattaaaagaaaaaaaacaaattataagagttactgtaccagaataaaggagtttcagcagagaaatggtcttgcaacttgctgtagttggcatcaaagtatgtgtggagatcttctgtgcctttttgtctccttgaatgttccagcagctaagactgactacaaagcccttgtgactgcagaactatgacccaagtttctgtctgctcctatttaaaagttggtcatagaaagccaagacagtctgtttgcctaaagccatggtcaagttgagggtaaagacacaaagtgattctctctacccacttctctacaagaaagaaagtggtaaaaatgtcattaggaatggcaggagttactagtaacaacttctggattgaaaggaagagtgtgtggagaatgaatacaatggtttccgttgtggttttatttctgtgaaacctcttgctgttcctttaatgctctttgacctgttggcaggtctgaatgcaggactggaatgcacttcactgaggaagtaaagcaaacttgtcttcatttggctaccatggttatgacactgtgtgttaccaacccaatgatttgcattgcaaaccatcactggaaatgaggacagcagaacttgatattcaggatggagagattcaattcactggaaattctattggaaaattcagagggagcaaaacatacacatacatactcctgaacccataaagaagaagtccaaattgtgagtaagaactaacagtcagtcttatcatccatagaatttcactatctatgaagtattttagttgagagatgagacgatttcacattaggaagatgagtaggcacactactgacctcattttttgaattaaattccactgttacatttgccatgcattcttatatatgacataatgctaaagcactacctaaaaataatgtttttcttgagacatgcatttcaacaatatccttcattttgataagctgcattattagagtttaaaatgatgtaaaagatcttgtgcatttcaaattatatttcatttcaaacacagaggaaccccaatatgagaaaagatgaattggaagttctgagattaaagaggaggggaaagaggggaggaggcctcatcaactctttcctcttcctctatgacagctcgtgaagtttctctgctgggctccaagcatcaatgagcaagatatgaatactttccttctagccctataaactagccctcagcctattctgggagatctctcgtctcttaagacttctccctgccttcatcaccagtggctgaaattctgcctctcaggagcccaggagtgtgtcaaggctgacatgacaaaacagcctccttttcctctgtggcatgtactgcctactcagccctgagaagaccacaactttgtctcagcatccaccaggatgtggtggctttgtaaaaaggctaatgacaaagcatactttaaccgaaatgccatggccagaactgtacttgcaaaatgatgaccttattttaatagcttcattctagaagattttaatagacttgatctttaaaataaaactgggcatagaatttcatccacatacacacataaacaacctcaattacccatactttgattatccattagttatacatgtattcatataacttatttttgtgggagagtgcagcactcagagcactgaagtttgcattagaaattaggagaataggaccctatcaaaacacagttcctactcacattaccttggggaaatcaatttccttttcagaggcatagttaattcagaataatgatgtgtgcatcatgggatttttttaaaaaagaaattttcttcatgaaaattaatgtgttgtgttatatatatagtggtccatgaaacaatgggtgattcataaccaaagcactgtaattccaagaaaactcttccaaatagaacacttccctttcaggtctgtctgccaacatacagatatcatccttagtgataaagagatagttaaaataagttgaagtaattcactctctaagaaagaagacaaataagttctaagacagcaaaataattgctaagggtttttgttttattgttgctgctgctgctgttgtttttgttttgggaaaaggagaggattctatgaaatctaataggtaaggtgctcagtccagcttc

SEQ ID NO: 586248 - DNA, 4001 bp, Homo sapiens
aagcctctgataatgctcattttaagaagatttattcacgtagatatttgaatatatctcctactcagcttcccaaagcataactgcttctcttgtcttaccagtgcggtcaatgacttgttgaaagttttcatttgcagagacactgtaaagaaacaaaagtattgtgagtcaaacaatgtgtgtaaataaattatactaaattactttttaattaaacaggtgagagcaaatgcagagttaggttttagtaagagaggacttttagaaaccaataaacagtcagggactagagtagtattttattttgtagttttaaactgatacatagtttttacaataatagaataatacttcacgtacaattaaaatgaaaatccctacacttccccgaccttgcccaggcagagttacacacattgttttcatggatctttgcaagagaaacatgtaaggcacacacacacaaaaacacttacaagaatccagagtccagccactgctgaatactttcttgcttggaatcttctacaagtaagaaagaacagatcagttagtcaaagcacaaccagctaaaaggatgctaccctgtttactcagccgccactcagtcactatttcccacatatttagtcacatgtttccttccataagcatattcattttttttcctgaaggcaaaatctcctgttttccatgatcagcctttcctgagaatgaagtgtaaacttgtcaaaagactgtaacttaaaaaaaaagaaagaaaatgtgagagagaagaaaaataaaccactgaagaacgagagatgttagaataatttttaaattacctggtgtgaatacaaagggtgagaaagcataagagacttttgtctttctcttgttggatataaatcaccacaaagcctctccttattgaatcacatttacctaaggcagccagccagtgatggttatttgcaaggagttctctgccaggttagaaaccaaatttgcattcattccagggacaaattgcactagagtccctggattgccaaaggcaccctgtgttaaaaaggcaccagtcttttaaggtggatctttatcattggctcaacaaatagtcaacaggtaaaaaggagaggatgtaaagcagcatttcctgttaaatatttgtttccattctgcttagcaactgtgtactctaggctaattttgtttgactttatcctatcaaatagtgaagtgcctgaattatctccctcacaaggtgtcaggtgaaccataaaagccaggtggacacaggaggtctgtattgttcttcagttgaactgctgtgaagttagaaggaattgggcaatgggcaaagaagaaaaaccattcaacagttacataatgggggcagggagtgctggaagtattttcttacttattactctttaaatgattaaaatttttgtcaatgcctcctgcaggatccaacaaatcagagtttttcaataaaatgtttgatgacctgaaagaagcctcatgcccagaccccacacagcttcaaagtcctgggaacttaggatgagggatgtttggagtggaaaggaagcagagttcattcattaattggtctacttctttcaaggaggtctgtgtcctgatgtctatagcagaagtcagaagtgcccatttcataaatgtttccggcatcatgccaggaacactggtatattcaaagccaaatacttttgttccaaaatcacctgcccctggccaaaagctcccacatccctcaccactcacagaggaatgttttcaaataggcctgagagtccttctcacccagcatggggatggtgagactctggctttcctcctcagggtcagggggcagccactcatccagcggagcccacgcgcttttggtgcacttcaggatctctctcttgctcttttcctggccttcctgaaggttgtcagatccttgtgatttctgtgccatcataggagagtaattctgcaaactaacttaaaacacacacacacaaacaaatcagacacgatgagttcagcttctgggcttggctcagtgaaagggagaaagaaggccagaatgcctacagtcagatgaatgatccagcttcacagtcatacatgaacctggctcacccacctgagccaagctccctgtctcagtttggtgaaatgcttccttccctctccaaggcaaagcagcctgggactcaagtggccatgccagtcatcagaccacatgcgcactctgcactttcactttggtggtctgggatgtggacggagagcaaagaaattagacttgaggacacacccagtaaatagccttcaaatttacctaacagttatatctataaaattatttttgaggcccaaatgttggagaaaaatgagggctttggcaacagattggcttggctcagtctcatttctgcaacttgttgtgtgccctcacataaactgtagaacctttctgcattcccttatttctaaactggcgatacactctaccgaattttaataactgttaacctcagtggaatacttattatgtgctagattctatgctgaattctatacattcattatttaacttaattgtcaatgaaggaagtaatataattgtcacaattttatggtaaattgaagaccagagagattaagttgcatgtccaaagccaaacagccagccaggactcaaaaccaggcactggacctcaagcatgttcccatgactatgctatatatcctataggatggctgggacaattaaaatatttatgaatatattacacaccttgcacaaaaagtatcagctgcccccattatttaacttgaccttcatgaacaacctgtaaaactagcagagtaagagcaggacacagcagcttagcgcagcaaaagaaattgttcggtctccgcagactataagcaccatgagaacaagggccattctcttactcatttatgtatctctagaatttaactggatttttggcacatagtaggtggtgaatcaacaaataccaaactaaaatagcaaagtgaggtttcaagccacactttctgatgcaattacttccatgacatatgctttaatttgcattcgtttatccttcaagtttacagaaatggccaagtagccaaacacttacttcagtagcatttctaggatccctaaacttaatgcataatcactgatcacatgacatgtaaatcatttctaatctgtttgcaaaaggcaaaccattcagatttattacaaatgtaaatattttctttcaagaataggtgagcgttctagatgcaactggcagcacaattttcttacgtgctttatatattcaaattctgtcaggtataaatatatacatttattgttgcaattttaaattactacaaaaatcaataattatgatggctgtcaattttatgttaaaaaacaaaaatgaagacatttcaattagttaaaaattaagggaaaaaatagttatatctatattaacagtcaatattttagccagttaactttaggaatatctgctggtagcaaattataaaaatttcagtaataacacaagacagaataatgcagactgaattatgttcctaacctttggagaattgtttggtatactagaattcataacattaaacaaaataacctttaaaaactcactgaaattttagttatttagcttcacataggttttgggtctttcaaggaaacacataactcttcagcagtgcctttatcttgtgagcatgaatgctaataacagcatcgacactgacagtgcaaaatttcacaaggaggaaaaactccaaaaccatgctcaacaacattcatgaaataccagattcaataaaggatcaaaaggtttgaagaaaagaataacatatcacagaaaaataagatccccaaaataatctcactccttcactgattttggctgaaagtgagtttcatttagaatgggagagtttgcactgtg

SEQ ID NO: 586249 - DNA, 4001 bp, Homo sapiens
taagtgttaccattttcagcacaattgcattacatttaggagacatacacttatcactgctatctgaaatttttttctctcctcagttttacaaaatgaggtcaaaaaaactaaaccaaccacagctaccatacaattatgacaacgttaactacactgaactgtatggcaggcaacaaacttgagacagcatcaaacagctgatgcacaaaagtccaaattcagcattccaaaggcagtttagaggtattagtgatataaagtacaaaagtatatattgatttaaaaatcaaacaggtaccgaagtcagcatgaacttatctattgcttgaattactgcaacagcctgcttccaattttcctgctttcccaccatcaacatagccaatgtaactaacggtctctgcgttcaagcacttccttgataatgcccaggaactccgttaacgccttaaactctttaacttcattatatcatgtaaacaccactatcaggctaactccataaggcacacattattcctattttaaagatgtggaaatagatgcttaaaaacgttatgtaacttgccgaaagtcacacagctgccacaggatacagcaggacccaaactcatcgtcaagtaagaagtagtaggacgcacaacaccagtactcaacacatgtgaggaattaacaaatgttactagccacttacttaaatatttttattattcacagaacattttgattatattttcataacattaacaaaatgctctgacataactaaaataatcatgtaagggtcatttgtgcattgtgcaagagaaatacacaatttgtatcctgtttatatatctctcaaattgtgaattctcaaataagaatgtggaatttgagttatttttgtaatcaacaagaaaaaaactcacaaatatacctttcactaaacgattaccttccacattctccaaacttctaaaagccatgttgatttaaaactctaatcttaactatctttcatattaaaataataaaatgaccaattctagtgaaatattaaagctgaagtaaataaaggcagctaaaacaaagtcataatcaataagtacataaaagaaaatttctgcacttcttaaatgaagctgaggcattattacgaggtccctaacatttatgagacaggttacaaaatagccaaagctcttattcatgaatttccattctggggaaaaaaaagaaaagatcagtattttgccatgacaaaaataaattttttaaagcagaatttcacaaagagttttcacatatattagcttatcgatgaccctcataacagaactgtgaagtaaaatgaacaaaaataattattttcacatccagaaacgtaagctacaaagtttggggacttgcccaaaatccaaaagctactaattctgtcttcaaatcatccgttttcagtctttccaggtcacctctactgcacagaccacaccaccctacccaggctatcagctcgcatatgacagacagcctggatgcggaagaccttgcaaggaagctcgggctgttctggaaagacggcaaaaagaggaggaggggagacaaagataccctgattccttcaatgacttatttttaaacgaatatttctgggaggctggtacccgctggagcagtgctccaacccaggcggcccaggtgagttttctagggtatgccccggcttcccagtccccctgacacctgccaccacccataacttagatccccgcccgccactggttggggacagaacatctcggctcctctcacttccgagatgaaggaagcctttgcttcagccgccgcgacttacctgtcgggtcatgagagatttgattttttgcatatcgaaatcctgaggagggtaccctgcctcaaagagctaacaaatcacaccgagccactacacagctggccctgacactaggaagccatagtgggtggtcacgtggaggagccgacccagggtatcctgtctttccctgggcctgctgggaactgtagtcttctggacgccggcggtagcaacgatgaactaaagtggccaacccagggactacatctcccagcaagcaaaagagcgggtgcttcagttaagccggtaaatattactgctcagagcgaccactgcgatcgccggtcttacaaaggtgcttgcactaggcagtagctactcttcggcgagacggaaacctaagtcacaggtgactaggcgttgagcgaaagatcaaactcagaggagacaatatataagccagattgacgcgatgtcccctaggagtgtgagggaggaaacctcacctggtctagaggggcggggtgggagaacgagagactgacgcgaaggagaaggaactcaagaaagggctgtcactgaggggtaacctgagaactcgagactaccccgggcgcgctgggtttggcctgaggaaaggtgtgctctaggttgcccaataggcggccctccaggtttagggctgttctacctcagtcttggtatcccctgcaaaagctctaaaatcgaaggattttgacgcccgcctattattttacctccgtactctaaagcagtgatgacgggaaatacgacaataacgagtatacctgtcactttaaagtcctcttttcaacttttggcagtttagttaaattggggaaaggaacagaagtgtctttggggacacaattttaaaaggactttacaattatgagaatatgagaagaagaagaaaaagcagccctaaagctaacaatgatagctaacacttatcgaaagccgagtacctgtcaggaactgctaatagctttaaatatatgatttcatttatccacacaagaatcctgtgggttcccattttaaagatgacgaagcaggtatggcgaaattaaggaacttgcctaagattactgcagatgtgcaagtagaaactgaaggattaatcggtcatcagatgtgttaagattttcatgtattgtgctgaagaaagttctaaagcatggcaccaatttttttaagtttattttattataatgttaacttctaaaagtatgacacagacccataatttcaaaaatatttcttagaataaaaaaagttcaagtgtgtcaacgtaataaaaaatactaggtaaacaatagtatgggtggtagtcagatatggcaaaactaataaaggtgatttgcaaatgactgaagtttgggggacactaacagaggttatttctgattctgaaattctattttctcaccccttagagcctcgttttattaatttttacaaatgaggttgtaatattttaatattttatatagggctttgtaaggataagtgagatgatgtaggtgaatgaaatgtataaattgtaaagcactatacaattatgaggtattattggttttgattctgcccagttctctactccaacagaaccaccttgtgcatacttgtatcatcactgcgttcagcaattcctttgaaattatatgtttacctatatgcttctctgactctgttatttctaaccccttcaagaaattctggtcacatttagggcaagtctagtttagtttattctttaccttctctaatcttaattgtcagactgttctttgtgtgtgaaaatctgcaatatttagaagtccctgaaagcatcaaaagaaacaaaaactgccagccatattagcctataaaataaaacccaagtcaataaacatttcttgattgttgcgctcaaggcaacactaaaataagcactttgattaataatctatggttgtggtcacaaggagttcacaactgggtttaaaagcatatcttaggggtgatctgagttcagtagatctcaaacctgactgttcagattcacctgaggtgtgtgctgttattattgttgttttctttggggatgtttgtttgtttaaaatcttcagtgattcttaaaggcagtccagctctagcatgtcaaatccatgct

SEQ ID NO: 586250 - DNA, 4001 bp, Homo sapiens
gctgcatgtcacaaggtctcctctcccctagctgagccatatgaggcccctcctactctgctgaccacaaagtagatttcaggggaagttttaggctgtacttgtgtgtaaaagaaagcctaccattttaatgcattaaaaaaactggggtttggtgctggcccccagcctctggttgtgagcacccgctcctttactgcaacgcagtccctataaatagcaaaatgttgtctggatggtgattgtttgctttgttttaaaattctgaatctctggtcttactttatctaatatcagcagccttaggttcaactgggacccttcgtgccatctgtcccccttagggggagcaggtttgcccatactgaatgtgcaacgtgcaacacttcacaggaagtactggcaaatggaccagcgtccttccaggggcctggtgttggcagcaactgccaagtcacatgggtgtggtggggatacacgtgtgttgggaggatggcctcacgcgccccctcctaggctctctctttcaggcaataaggtatcctaaagaaccaaagccacaggcttccattcgaagttaatgttggtggccccagaaagacaattcacatgcccagttccttgctttttaaaataagagacagcttgggatctgggtcggcaggcagtgaggacaaaccccctgctgaaaggctgcttcaaagctctgtccaacaaggcctctttctctgtctggcagctccctcgggacacataacctggttagctggggggtgattggggtcccgaagggatgcatcctgaacttctgtcaaagcctgagccctgggaagggctggagctctgagctgcaggaagaggggctaagatgaactgagggaagggctgtgtcctggctcagaggcctgggggtcagagggaggaaagaagggaattaagggaggaggggaggggaaagaaagaagccttttgggaaaactcaccctccatagcttgcatcccccgtcgttccagggacccccagcgttggcccttcttcctctcacagccctcggaagcctcataggagcctagagtggtcactgtgggtcctgagagcagggagaaaggaggggctggggggtggggggctggctgcgggctggggtgcagaggaaagaaggggacatgtcttccagctcctcgaggctctgggatctgtaatcccagtggaggtgcctgactcactctggcggctctgcgactcctctctctcggccacctctcagccctgcctcccagcctcctcagaacccgctgttccaggaccctcttgcttgcacagaaagaaagagggggtgtgcgtatttagtccggggggacagggaggagagggccaagactgaaagagggcgggagccagtgaagaagaggctgaaaggctgaggtggcctacagatggagggagggaggagtggggggcgtgcgggaaggggtagggctgcgaccgctcccctcccctctcctcccattctctcgctggaccttgcccaccccaccctcgccccgcgctcaggagtctccggggctgcaggaggtgtagggtctgcagtcccgaaggctggaagcaccgtcggactgaagtggagagacgcgctggggagggaccaccaggcaggatgcggccggtgcgcggaagcctcagtcccaggccggaaggatggagaccgggccccggtggaggccaggatggagggaggaagactttgggcggagaaaggggagccgcggaggccgggagcacctgggggtctggaaggaggagggatggaggagagaaaggaggggcggtagacaggtgacggaggggcggctctgacctgggcccgggcagctccagcccgcggctcccgcgccggctccggcgcccgcctccatgaccgctcccgccgccgccttccgcctccctgagcagaagccgcagccgcgagcccggggacccgagccgggtgcgcagggagggagggagggcggacgagggggcggggcctggccgggcctcctgacaccgccccccgccgctcgccgccgcccggaagccctcccagcactcgggagctccgagcccgtgcagggggcggcgcgggagggtgagcgcgaccccggatacgccccaaggctctcccctagagagcgcggggagccgcggggcccggacagcgtcaggagctcctaggcttatggctgccccaagagggaggagcgagatcccctggttctggcggcgggtccccccggggtctgctgtgcccagggacccttctgcaccaggtgtcagggcccggtcatgctcagcaatggggacggcaaaggacgaggtgggactgtttcctccaaaagcgcagacacgcgcgcccctccttccctccctcccccgcccggccggcgcccccacctagcagtccgcgctgactccggccccaggccctgcccacccctgcccggtggcccctcggcagcctgggggccggaggagggaagtcgaggcccggatgggcgaacggcagggccctgacctctccgctttccgcgaccccccaccgagccagggccaaggaccctcttaggaggagccctccggtggccccatcaagcctcagggccggaagaccccctctcctccgccctgtcttcccttccggtcccacacccggtgggctgcgagccacgcccccacagtagcccgctcagagtgggcacgactgatgttcactctcgtggaagggagatttggaagcccagggggcttatttcacgtcttcaaccattcgtttattcaggctatgactactgggtgccggctcttgaagaggcagttctcacatctcggcaggtctcggcaaggatagaagtgggcacagttgggaacaggggctccccagcacatccaggaaatggctggaagattcctaagccagggacacacgcggatcccctctctggcacatccactcacaggtcgagggctagtattgtctgcgttccccccgctgcaggaaagggatccggatccagaccgcaacagagggttcttgaatctcacgcaagaaagaattcagggaggtccataggataaactaaaagcaagtttattaggaaagtaaaggaataaagaatggctactccatagacagagcagccccaagggctgctttttttggttatttcttgatgatatgctaaacaaggggtggtttattcctgacaccccctttcagacaatgtagggtaactttctgatgttgccatggcatttgtaaactgtcatggcactggtgggagtgtaacagtgtgaggattactagaggtcactctcactgccatcttggttttagtgggttttggccggcttctttactgcaaggtgttttatcagcaaggtctttatgacctgtgtcttgtgccaacctcctatctcatcctgtgacttagaattccttaaacgtctgggaatgcagcccagtaggtctcagcctcattttacccagcttctattcaagatggagttgctctggctcaaatgtctctgacatcccacaggctcccacgtccacaagccatccctgttccacgggaaggaagcccttctttgcctggacttccccctccttttcagctgggggtcacctccaggtggccttctctgactggcaccccatccctgccccactaggcgcttttgtggtgctcgcccctatttgtctgtaacagcaccaggccctccgggttgtccgggctctgcccagtttcctgaaggttagggggatcttagttatctttgtatttccagcatctgacagagtttctgacacaggataaatgagttaaaggtcaatctcccagctacccagttaatgccctgtcttatcatttaacatgatttcatatttgtggtgttaaatgttgcctattaatgatgatgttgcccataagtctctctccctcccccaactccttgctcc

SEQ ID NO: 586251 - DNA, 4001 bp, Homo sapiens
ggagacagtgagcggatctttcggtcaaatggggtaacagttacagtttggagatttcttgaaagttaaaaaacaaaacaaaactgaccaggcatgctggctcatgcctgtaatcctagcactttgggaggctgaggtgggtggattacttgaggccaggagttccaaaccagcccggtcaacatggtgaaaccccttctctactaaaaatacaaaaaaattagctgggcgtggtagtacacgcctgtaatcccagctacttgggaggctaaggcaggagaatcgcttgaacctgggaactggaggttgcagtgaggcgagatcgagccactggcactccagcctgggcaacagagtgagtctccgtctcaaacaaacaaacaaacaaaaacaaccaaacaaaaactatccaggtggcttgtgaaaaatcagcctttccataataagaaaacattgcccgtcagcaggtagagaaagaaaatatctgattgtagaggtttcattggacaaactcgggcgccctttcaaatgtatattattaaatacctgtttgaaattttctacaaggtccaccttgtttttccctgctgcatgtcacaaggtctcctctcccctagctgagccatatgaggcccctcctactctgctgaccacaaagtagatttcaggggaagttttaggctgtacttgtgtgtaaaagaaagcctaccattttaatgcattaaaaaaactggggtttggtgctggcccccagcctctggttgtgagcacccgctcctttactgcaacgcagtccctataaatagcaaaatgttgtctggatggtgattgtttgctttgttttaaaattctgaatctctggtcttactttatctaatatcagcagccttaggttcaactgggacccttcgtgccatctgtcccccttagggggagcaggtttgcccatactgaatgtgcaacgtgcaacacttcacaggaagtactggcaaatggaccagcgtccttccaggggcctggtgttggcagcaactgccaagtcacatgggtgtggtggggatacacgtgtgttgggaggatggcctcacgcgccccctcctaggctctctctttcaggcaataaggtatcctaaagaaccaaagccacaggcttccattcgaagttaatgttggtggccccagaaagacaattcacatgcccagttccttgctttttaaaataagagacagcttgggatctgggtcggcaggcagtgaggacaaaccccctgctgaaaggctgcttcaaagctctgtccaacaaggcctctttctctgtctggcagctccctcgggacacataacctggttagctggggggtgattggggtcccgaagggatgcatcctgaacttctgtcaaagcctgagccctgggaagggctggagctctgagctgcaggaagaggggctaagatgaactgagggaagggctgtgtcctggctcagaggcctgggggtcagagggaggaaagaagggaattaagggaggaggggaggggaaagaaagaagccttttgggaaaactcaccctccatagcttgcatcccccgtcgttccagggacccccagcgttggcccttcttcctctcacagccctcggaagcctcataggagcctagagtggtcactgtgggtcctgagagcagggagaaaggaggggctggggggtggggggctggctgcgggctggggtgcagaggaaagaaggggacatgtcttccagctcctcgaggctctgggatctgtaatcccagtggaggtgcctgactcactctggcggctctgcgactcctctctctcggccacctctcagccctgcctcccagcctcctcagaacccgctgttccaggaccctcttgcttgcacagaaagaaagagggggtgtgcgtatttagtccggggggacagggaggagagggccaagactgaaagagggcgggagccagtgaagaagaggctgaaaggctgaggtggcctacagatggagggagggaggagtggggggcgtgcgggaaggggtagggctgcgaccgctcccctcccctctcctcccattctctcgctggaccttgcccaccccaccctcgccccgcgctcaggagtctccggggctgcaggaggtgtagggtctgcagtcccgaaggctggaagcaccgtcggactgaagtggagagacgcgctggggagggaccaccaggcaggatgcggccggtgcgcggaagcctcagtcccaggccggaaggatggagaccgggccccggtggaggccaggatggagggaggaagactttgggcggagaaaggggagccgcggaggccgggagcacctgggggtctggaaggaggagggatggaggagagaaaggaggggcggtagacaggtgacggaggggcggctctgacctgggcccgggcagctccagcccgcggctcccgcgccggctccggcgcccgcctccatgaccgctcccgccgccgccttccgcctccctgagcagaagccgcagccgcgagcccggggacccgagccgggtgcgcagggagggagggagggcggacgagggggcggggcctggccgggcctcctgacaccgccccccgccgctcgccgccgcccggaagccctcccagcactcgggagctccgagcccgtgcagggggcggcgcgggagggtgagcgcgaccccggatacgccccaaggctctcccctagagagcgcggggagccgcggggcccggacagcgtcaggagctcctaggcttatggctgccccaagagggaggagcgagatcccctggttctggcggcgggtccccccggggtctgctgtgcccagggacccttctgcaccaggtgtcagggcccggtcatgctcagcaatggggacggcaaaggacgaggtgggactgtttcctccaaaagcgcagacacgcgcgcccctccttccctccctcccccgcccggccggcgcccccacctagcagtccgcgctgactccggccccaggccctgcccacccctgcccggtggcccctcggcagcctgggggccggaggagggaagtcgaggcccggatgggcgaacggcagggccctgacctctccgctttccgcgaccccccaccgagccagggccaaggaccctcttaggaggagccctccggtggccccatcaagcctcagggccggaagaccccctctcctccgccctgtcttcccttccggtcccacacccggtgggctgcgagccacgcccccacagtagcccgctcagagtgggcacgactgatgttcactctcgtggaagggagatttggaagcccagggggcttatttcacgtcttcaaccattcgtttattcaggctatgactactgggtgccggctcttgaagaggcagttctcacatctcggcaggtctcggcaaggatagaagtgggcacagttgggaacaggggctccccagcacatccaggaaatggctggaagattcctaagccagggacacacgcggatcccctctctggcacatccactcacaggtcgagggctagtattgtctgcgttccccccgctgcaggaaagggatccggatccagaccgcaacagagggttcttgaatctcacgcaagaaagaattcagggaggtccataggataaactaaaagcaagtttattaggaaagtaaaggaataaagaatggctactccatagacagagcagccccaagggctgctttttttggttatttcttgatgatatgctaaacaaggggtggtttattcctgacaccccctttcagacaatgtagggtaactttctgatgttgccatggcatttgtaaactgtcatggcactggtgggagtgtaacagtgtgaggattactagaggtcactctcactgccatcttggttttagtgggttttggccggcttctttactgcaaggtgttttatcag

SEQ ID NO: 586252 - DNA, 4001 bp, Homo sapiens
ttatgaggtgaataatttcattttttcttcaaaggtgtcaggaaaatggacgttttggtagagtgataaaagggccagaccttctaattgcttaatcttaatgtttctgaatctgtttccccatctatagtgtgaggagaataatttccctcctaattagtgaggatacagtgagatgacgcatgtgaacatggtttgacaattataatgtcatatggatggaagatacaacttttattaatcattgttgatatgtggacagatttgatactcattatactgtttttaagtgtctataactttaactattttataccaatcttaatattaataattttctccattttcaaccttgtatgatcagcaaagtaaattttcagtcaattctatttggtttttgtttgaaaaagtaaaataatgattatgcaacatagaaaattatagttcagttgccaattccattaacttagtttgtctcagaaacggaaaaattaccatagacacagaattaactattaagaattaatatttaatctaaaaatgtctagtgtttctacagaaaatttgagtacattctcaacttccttaaaccagtgcctttttcaaatttcttttcaaagttacacctgtcaattttcataaaaaatagtttgaagattattctgaataattataaccaatgaaacacaaagacaagaaaagaactattgcagtgggcccttgctgaacctgagctagcacctataatgagtgagtcttcaccgaaagaagaataaggagggagcaaggactagaaggacagaaaagaggcaatgataacttaagagaacactgaatttttaaaaattttaaaaaggtagtggctagcagagaacctgagacttgtacccatgagaactttagcccagtctatctatcacgatagccccaagaattctggtcattgtacttgggtaagggcttcaattttttaaggcacttgcattttatgaaatgttagtgtttgcaggtgtcttggctaaataatttagggaatacattttaggaggaagtaggggcacagagggggagagagaaaccaggcaggaaagaagaaaaaaagaagaaaataaatctttctgttcccattattttactgcccatagaattataaaaggtaaacacacacacacacacacacacacacacacacacacacacacacacacacacaccttatagggtcatttagaaccatctttcttcattttaaaactaaagaaacaggtctaggtgacacagatgaagcagtggcagagccaggaaaataatctgacccttgtccctgctctttccaccgcaccatggtgactctcttttttgtgtctttttttttttcactctaaaactgatgatcatttgtagtcaaagagatcaatgctattctcaaaacaagttctgatctctcataattttcttggtaactcagaatcaatgttaagtacgttgaaataaaaatacagtactttacacggtaatttggtagactgtgcaccacggtcccatccattttcttacttgatcctcacaaaaaccctttgaggcaaggcaaggaaggtattatcatctacatttttaaagtgagcaaattaaaacccaaagtaaggtcacttagggtcaggacggagcaagtactctattcctatatttggaatataggagggaatacacttccaaagaggcaattccctcaaaaagcaccaatcttgctctttactctcttaccaaggcattctccatgccctggagatgcccgcactaggttagtgaagcttggatcttgacatccacataggttactcctagtttgcacctagttgtcaacttaaaaagcgcagtttcttaccccttcccttggtcctgatccttatttaggctcctatttttctctttgggatttggcctcctgggtctcactccaaagctccaccctctccaaacaagaagtcgcgtccttggtatccaaggtgaccatgcagctttaccctcgttgcccccttccgtgcttcccattggccagtggcctcccatgtaccgcccctccaatagccaatggtcttgaaacaaagggcgcccgcctttccagcgattctaacacctgccctcttacccgtgctcccctgcgcattgcctcctgggatatgtggtttctaagaggcggagctctgcgactttccaccgctttagaactacgtatcccgtcggccttagcgaaagggggtggacttaggcaaggggtccaggtcagagttcagagctttcaaatcccaacttgcccctggggattacgcagctgatgtttacatcgcctagtcaagccaaccggctcgctcttgtttcagcaaaccctgacttacgtctcctatttgacttgaggcggcacagtggccaagtcgattggccgtggcaagtgaccctccctgtggctgaagtgttctgaggactggcgagagaggcgcgccatgcttgccccctgttcaggttgggagcttggctgcttccgtctctgtctccgtcaggtccgactgtgggctggcgctgggcgctggtcttgctgggcttgccaagccaggccgtacagctcaggtaggggcgagcgctggcccggatcggagactgaggtccctccgcctggcccggcgcgccgaactctgaaggagtggacactgcaggtgagcccgttcggtcggctgcgggcgcggctcccgtgccacctggccgtgaggcccctggaccccctcacctacccggatggcgaccgcgtgctggtcgcggtgtgcggcgtggagggcggcgtgcggggcctggacggcctgcaggtgaagtacgacgaggatctggaggagatggccattgtgtctgatactatccacccccaggcgtccgtggaggtgaacgcgcccctgaagtttggcaagtgaagtgaagtgaaaacgggtttgggtcccagggaacgcacagtgaacttaataaatttggtcgacgtgcacttttaattggtcctggctttctaaacctaatttacagttggccccttcggaaatgcaacttttcctctgttctattcttgagtatccgagtagtatttaaaaaattaggttcccaattatagaaattttatacatcgaatggaaacacgatttggtataatccaggtcaaattctatttctggagccgcttgtgttcttctttatcccgttgtcattagcaaactggcttatttttcaaggttgaagtttcttgacaattcattcaatggtatggcagtccatctacatttccccttgctcacagcctgggggtgtgtcccaaaacagccctgtcaataggatgttccaggtaccacctggtttgagtatttggttttagacgggcgcccagcttcttactgttatgtttccattctttttggcctaagttttccatgagtagcaagctttgaagaaaaacacatggtaagcctgcctaggaagcttcaataataatgcctgcaagatacctttcttaggttttcctaaatggcaagccactgtgtacacacacttttctaggaagggctccccagactgtcattcttcctgggactgaaggaagatattgatgatgatgatgatggtaataataatagcatttagcatttttaagatcatcttttataatgcttacagttgcccaaatagtagatgccgtagtcctcccttatccaccgtttggctgtctgagtttgttacctgcctcaactgttgtaggaaaatattaagatattttgacagatcacagtaatataacttttattacagtatattgttataattgctgtatttattattattgttgttcatctcttactatgcctagtttataaattaaacttgatcattgatatgtatacaggaaaaaacatagaatatataggatttggtactatttgtggtttcaggaatcaagtcgggggggcggg

SEQ ID NO: 586253 - DNA, 4001 bp, Homo sapiens
taaaatacattacaaggataatgtattttaaaatactttaacgcataatattcctagatttgtatgttagaccaggacagggggccaaatcatctccagtcggattccagtgactcctgtaaccaaaaccagttcttcacaatttattcattttttttaatcacacaccatatggtttcaatgcatttttttattcaattcaaaagaatttaacaagttaacttttcctaaacaaaagttttcatgtgtattctaccatttttaggagctcagtaaatataaacattgtttcaatacaaaacctttaaaaataccttgaaaatgtttaaacagttgtattttgcatgtctttgtttgtaatcactgagcccatacaaatccttgcactactaacagtcacaagcttgaacctcttaaaaaatatcctcgatcaaagctttggaatccagtaaaaattaggaaacgagtgggcttcagaataccctgagcacaaactagtgcaacaccacatgttcgaacttctgtccacaaagaggggtgacagtgaaatagaaaaagggggagataaagaacaagtaaattctggctttattacacaagcacgaaaccaaattcctttggaaaaataatgtcttcggaggacttccagaccagtgaggtagagtccaacagtgagaaaacggatctgcccctaaggtcctggagacgtctcaatcggtggtcaggaagaaagggacctcccctgcgggtccagctgtcccctccctccgcaggccgggtacgggaggcagcagagggcacacctgccccagcgtccaagacgaccgcgccgcggcccgggacagggacaaccatccggcaacttcttcgcgcgtaaagtgcattgggggccggggtcctggccggatctgtaaacactcgactgacacttgttcattcctccgggcggaaggcctgtcccaaggtcggggccggcaggaggcgccctggaggccgcacctcatgcccggggcaccgggaagcggcggagcctcaccatgggttccaggttcactcgcaggacctggcgcgccctgcgccgcgctgccgccaggctgcgctcgccccacacgtcgctgccgacgcggatggtggggaaggtggtcagcgtcggggtggccgccctccagatctcctccaaggtgcggcccccgaagcagggcccgggggccacgggcttggccgggcagctctcctcggggggcggcggcggtgggggtggcggccggggcttcctcctgcgggcagcggccgcccgggctccgcggcgcctcctcctggccgctgcgcgcggaaccggccggcgcgcctggccgcgggctgtagggggccccggggggtcgggtaccagggcccggcaggaggagtagccgtagacgtccttgctgcgcaggatgtgcggggagaactggtgcttgaggctgcagaggaagctccagagctccgcgtccgagctcatgaactccgtgctgcggggcatgaagagcttgaaggcgtcgcccagcgccttggtgctgtcagccagcgacagttgcgaccgcgagtacaccaccttctcctcccgcgcctccaacccagccccgtcttctgccctaaagtcgccgccccgggcggccgtggccggggcgaccgggcgccggcgccgccgcctcttcatactgcgccgcatcgaaggccgctccgggccactcacgctcgccgggtcccactactgccgccgccgtcccagtccgcgttggctccgcggcggcggctgctgctggcgtctctcgctacttttctcgcctccgccgccgcccctccccctccgagggcggaggacgcgggcgaatatcctgctgcccggtacaagatggcggccggcgcccacccctgggctttgtcattggacggcgcctcgcccccctggtttctctttcttctcctctcttgcctcttttcgccggctgcctttctttaaatgtgcccgcctcaggcccctcccaccgcagccccgactccacccattgggtgctctcagaagaggggcggggactgatgggggagaggccagttcctggaagatggtgctggggtgggtgatggcctttgaacgtaagtcaacggttgggtggatctaggagggctgccacgtctagagtaagagggtggatgttggctacaccatgggaagagtgactcttagagtgagggggtgtgcagttgtggattgagctgggagctctaccagtgtggataacaaagggagatttccctgaaggatgttcctggtatcatcacagctagggaatttgggtttaagtctaggggaaatgggcctttcgcaattcccatccaccctctcaaaggcctcttctggcatcttcattcaaaactcttccctgtcttgaccccagcccatctcaagaagccagtagtaatccagaatcattcaggtaatgtgcgtggctggcagctgagagattttagtctccctctggacactggagccatcttcatatttaagagagaccctgcttatccagaaagcaaaacatgtcataccctataaaactaaatactctttgctcaagttgatcaaagatctattacaataaagccattctgtgaaaagaaaatatagttttaaatacacagttctttatggatgccaattcgtttttcatttagttttaaaatgtcaaagccacccctatcatttagaaaggatgcatcatcgcagacaacagataaggtttcgttgaaaaacacaaattgttcaaaacacattaccttttgtattgggaggagagtagtggacatcctttagtcatcttttctgtcctctatacctaactcagttcctgtcaggtagtggacactcaatgtgtttgccgaatgaatcaatgaaataccaccgattatcccaaatagagtcagaaatgttgaaactgcttagaacaggacaattagatattttatattgcaattttcacagaactcctttaaatttcttaaggttaaaagaaaaaatctcctgacacttagaactttgaggtgggcatgtggattttacccaggaaacatcttattttgcagtagtgaacaaataaagtataggagttttgtgatttacatgtagttgctaatggtttcctcaaatatttgacctgaaagagacctagttcattctccttatttaacaggtgaggaaatctgtaccatagaggttcagtaacacagctggctgatagcagaactgggattctaaatccttcgatttctaatctagtgatctttgtatttcactgaaggtttttcaaactgtgctgtccagactctaaggaattcaatagaacatgctttatgcataagtagaatgacgaaggacagagctgtacccctattcctacttccaccccacccagaattgagcagtttttctctgtcttataatagatttatgaataatattttgtttgttcagtttcaataaaacctaaaataaataatttgaaagctctacaccagagatgtcaaattcttgaaagctctcaccacacaatgagtttatggcaaaaataaaactccacacaatgggcttatggcaaaaataaaacatctaaccaggaaccagctctctagcaaaatcatggtaactttctgaatagaaaatcattttcctagaaaagcacactctgatctcagaacaagattacagagccaaataccagcttcctaaatccttataaaggaatgatatagcaacaactctttacatcacaatttgctctttccgtaattctgagacacatagtaaagtgaaatttgaataatttccattggaatacccaaaatctagagtgagccatgagaaagttaggggggcttcataatgaaaagcaaggataaaacaaggattaaagtagacctggcttttcatattggaatcccctcccttccttgataatcatcattttata

SEQ ID NO: 586254 - DNA, 4001 bp, Homo sapiens
atcactgtggcttctccaggccccgagtagcccgccaagcagctcaggcccaaactcagggctggagggctgggcggggattagcaggtggtttggttgccaggatatctctggacagggcccttgacagccactgccctggccctaggggaagccttcttctgcttggcgtccaggttcttcatgtacctctggacccactcctgcttggggtcgccacagaactgctggcccttcttggtggtgaagctgtggaagaaagggacaggggatcagctgaggtcgacagggaccttgggccactccacttcatggcgggggggatgtggacgcccagagacagtaaggcttccttgcaagttgctgagatgatgtcatcttcattttttgacacagggtctcactctgttgtccaggctgcaataaagtggcgatcataactcactgcagcctcaaattcccaggctcaagctgtcctcccgccttagcctcctgagtagctgggactacaggaacatgccaccatgcccagctaattttttttatttttttgcagaaacggagtctcactatgttgcctaggctggtcttaaactcctggccttaagcaaccctcctgcctcagcctcccaaagcactgagattgcagatgtaagccactgcacgtggccttcttattgtatttctatttcatgcctctgtttacaaaatgagttcacagttactacttatgaagctatttggaggacagacacatgtcagcccacgtgaccttgagcaagttaccttcctgagcctcagctgtcctctgtaaaatgggaacaatcatcgctaccccatagaattgttgagagaattagataagatattgtcttgtgcccctgaatagtgacttgttatatatttggtgctcagtagatattgaatctaaatccttctcctggtggatcacgcctgtaatcccagcactttggaaggctgagatgggcagatcacttcaggtcagaagttcgagaccagcctggtcaacatggtgaaaccctgtctctcctaaaaatacaaaaattagccgggcatggtggtgcgtacctgtaatcccagctactcgggaggctgaggcatgagaattgcttgaacctgggaggcggaggttgcagtgagccaagatcgtaccactgcactccagcttgggtgatagagactctgtctcaggggaaaaaaaaaaaatcctcctcctggctgggtgtggtggttcatggccgtaatcctagcaccactttgggaggctgagatgggaggatcacttgagcccaggaggttgaggctgcaatgcaatgagctatgatcgtgccactgcactccagcttgggtgacagagcaagaccctatctcctaaaaagaaaaatgaaattaaaaaaataaatatatcctcctcctagttttatgggcaaggaagttgaggaccagagaggggaggtgacttctccagggatgcacagagctggggctggctgaccttgcttctcagggaccctggagttgcacctgcccccacccctctcctgccacgtgcccatgaaggatacctacatcactcctgccttgaggcatgtgctcctgctggacagctggtagctgaccactcggttctcaggaattctcttggaaacaaagaacatgcagcagggagaggggatgaccacagagcctagaagaggagagagagaagagccacgtcttttcccagcctccccttggctctgggcctcagagctggagcttgaaccctgcaccaaacaccgccagtccattcactgggccaccctttccccagcgcttccctccagccccaggctggtcagtcctgcaccccccactgtgccatcccagccatgcccttggaactgcatcctgtcggaggtcttacccgtagggatgatgtggtgggcacagacaccaaggaacagaaggctggttactatggtcatcaggcctgccatgtctcagagagcagaagcaccagctcggggctcaaagctgacgtgcaggaggaaaggacctagggataaatagctcgggtccttgcagagtaccccaaactccctccctctgccctttatggggcaactagaaggaaacacgcccccgagccccctccacgcttccttgaaaatcctgaggcctgtggtctggaaagaggaagttgttgtcccgttgttgcccagctgagtcaagggttatcttgggctccgaacgaaagaactgggggaggggacatcaccccacctaggccaagttcaaaggtgttggatgcattgtcagaaggcccatgggatcctggctgtgttggccactccctgtgggatcctggataagtcactcacctccctgagcctcagttacttcagctgaaaatgggcagagtcatccctatcttctcccttccattcattcattcattcattcacccaattatttattaggcatgtggtctgtgccaggcactgggaggactctaatggggagacagatttgtgatcaagtgtgtgtaacagacaatgagaggtcagctgggcacgggggctcatgcttgtaatccctgtgctttggaagtttcaagtgggaggatcatttgaggccaggactttgagaccagcctaggcaacaaagcaagaccctatctctataaaaaataaaaaaattagccaggcgtggtggtgcaggcttgtagtctcagctcttggggaggctgaggtggaaggatgacttgaacccaggagttcaaggctgcagtgagctgtgatcacaccactgcctctccaggctgggcaacagagcaacaccctgtcttaaaatcaatcaatcaaccaatcaatcaatcagtccatgacaagtcttgacagagcaaagcagatgctgtcaggaccgctttccatcagctctcggtggccttgaagtcccaacagccatcgcctgtaccctcaagttgccggagccacttagtcaccaagattctagggaagtgggaaatgcctggaaattcacatcctctgaggtggccaatgtctgccagagggatgccgactccagatccagcatgacctaccctgtttcctgagtttccaactcggtcaaatctgtgactctctgtgcagccggactttgcttggccccttcccgcgccgaccagattcccagtcccccgatggtctctcgtggaagcatctcttaataaaccacaagcccatgaatccctgccaagggtctgctttggggaccctgacccaggacaaggtatgggggtggtgggtgggaggaagggaaacataggagaaaccaggggccgggagcggtggctcatgcctgtaatcccaatgctttaggaggctgaggcgggaggattgactgaggccaggagtttgagaccagcaggggcaacatagcaagaccctgtctccaaaagaaatagaaaaattagccaggcacggtggtatgcgcctgtagtcctagctacttgggaggctgagggggcaggatcacttgagcctaggagtttgaggctacagtgagctaggtgagcaccactgaactccagcctgggtgacagagcataatcctgtctcttaaaaaaaaaaaaaaagaaaggctgggtgaggtggctcatgcctgtcatcccagcactttgggaggctaaggtgggaggattatttgagcccaggagttcaagaccagcctgctcaacatagcaaaaccccgtctttaaaaaaaaaataaaaagaaaacaaaaaaaccacgggaaaactggccaattgtgccaggaggaaagttcaggagggactcatagctgacagctgcactgaggttggaggacagaaggcactggcaactacgcggaagcctgtaagtcataacgtccagttcagttgtaagggactgaggcaactttatgaggcagagtgggacatggctcccacctcactccacccccgattccaggatcc

SEQ ID NO: 586255 - DNA, 4001 bp, Homo sapiens
aaactcaccaaccaaacaagtaattacactaaacccccttggacactctctaattggatgtcctgggtcctcccaattcttagtcctttaatacctgtttttctccttctcttattcggaacttgtgtctttcgtttagtttctcaattcatacagaacggcatccgggccttcaccaatcgttttatatgacaaatgctctttttaacaaccccacaatatcgccccttaccacaaaaatcttccttcaacttaatctctcccactctaggttcccatgccgcccctaatccttctcgaagcagccctgagaaatatcgcccattatctctccataccacccccaaaaattttcgccgccccaatactttaccactatttcgttttatttttcttattaatataagaagacaggaatgtcaggcctctgagcccaagctaagccgtcgtatcccccagtgacctgcacgtatacatccagatggcctgaagtaactgaagaatcacaaaagaagtgaaaatggcctgttcttgccttaattgatgacattaccttgtgaaattccttctcctggctcatcctggctcaaaagctcccccactgagcaccttgtgtccctcacccctgcccgccagagaacaaccccttttgactgtaattttccattacctacccaaatcctataaaacggccccacccctatctcccttggctgactctctttttggactcagcccgcctgcacccaggtgactaaaaagctttattgctcacacaaagcctgtttggtggtctcttcacatggacgcgagtgaaacccatctctactaaaagtactaacattagccaggtgtggtggtgtgcgtctgtaatcccagctactcaggagaatcccttgaactcgggaggtggagattgcagtgagccaagatcacaccactgcactctagtctgggcgacagagcaagactccgtccaaaaaaaaaaaaagaagaaaaaaaaagatgggagtcagaagagtggtcaccctttggggcaactgacttaaagcggtttcaagggggcgttctgggggctggtatgctctgttcctttatctgggtgctggttcaccttttaacccttgtggaaattctttgagttgtactcttagagtttgcatacctttcttttctctttttcttgttttttaagataggatctcactctgtcacccaggctggagtgcagtgatgctgtcatagctcactgcagcctcaactttccaaggctcaagggattctccctccttagccacccgagtagccaggactacaggtgcgcaccaccgtgcccagttcattttttgatttttttttttttttttgtagagatgtggcgggcgggggggtctctctgtgttgcccaggctggtctcaaactcctggcctcaagtgatcctcctgcctcagcctcccaaagtgctgggattataggtgccagccaccgtgcctggcctgcgtacttttctatatgtatattatatttcaataaattagtaaagaggaatgaaatgatatggcgaataaacaaaacaaataattctgcagttaaggaaatgtaatatgggagccatggcctccctacgttctctccctccttccttgagatgagaatatttctctctctctctctctttgccactcttctgggaacatccatttctctttttctcttttttttttttttttgccagaatgtttctcatttcaagagaaagtgctggctgcctacagcatgtcagaccccagctgttttccatacttctgcctttccctgcctttggcaatggagtctatcctctgaaaattctcttctgcaatgagaaacccccacactttgcccccctccccaccaccaaacaaggcccattacttccttccaaaccccaacctggcaggttcccagaaacaaagtccctgacccttacctggggtctttggctcagcctcaattccagactcctggctcatcctccagagcttgctagtgctgctccagtccctgggatctgcggtacccctgggaccccaagtcaagacctcctcttggcttacgtaaggacatttacaaacagccattcccaaataactcacatttctgaggttctgggtggacaatgaattcttggggtatattattcaacccagtacagatgtattgcagaaataatctcccatcccacagattgcctttctacgtcttacggttctccctccctccctccctcccttccttccttccttccctccattcctccctacctctctttctttctttcccttcttttcttccttcttccccagctctctccctccttttctctttctttttctttctttctttctctctctctctttctgtctctctcccttccttccttccttccttcctttctttctttctttctttctttctttctttctttctttcttccttccttccttccttccatcctccctccctccctccctccatacctctttctctctctttcttttctttttcttttctttgcagtggtgcaatcatagctccctgcaacctcaagatcctgggctcaagcagtcctcccacctcagccttctgagtagctggaactacaggcatgcaccaccatgttctgctaacttaaaaaaaaaattgtagagatggggtcttgctgtgttgcccaggctggtcttgaattcctggcctcaatctcctggacttaagtgatcctcccacctcagcctcccaaagtgctaggattacaggcaggagctgctgtgcctggcctcttatggatgtcttctaatggattttaatatagttttatttatcagctttcctcctgtatgggtaagtgattataccctgtttataaaacatttgaggctggacatggtggctcacaccagtaatcccagcactgtgggaggccgaggcaggcagatcactggaggtcaggagttcaagaccaacctggccaatgtggtgaaatcccgtctctattaaaaatacaaaaattagccaggtgtgatagtgagtgcctgtagtctcagctactcgggaggctgaggcaggagaatagcttgagtttggaaggtggagtttgcagtgagccaagattacgccactgcactccggcctgggcgatagagactccatttcaaaaaaaaaaaaatttgagtcccttcacccaagaggcatgtctgtctataaatggcttctgctgaaactcctccttttttttttttttttctttttttctttttgagacagagtcttgctcttgtcacgcaggctggagtgcaatggcacgatctcggctcactgcaacttctgcctcccgggttcaagcaattctcctgcctcagcctcccgagtagctgggattacaggcacccgccaccacacctggctaatttttgtatttttagtagagacaaggttttgtcatgttggccaggctggtctcaaactcctggcctcgtgatccacccgcctcagctcccaaagggctgggattacaggtgtgagccaccacgcctggctgaaactccctcttggtacttgtgtccgaggccccctcagtcaggaccttgagtatgcccttgatgtcagcccatagctggcggccctggctcctgctctcttccctccaggcccttccctgtggctgaagccccttccctgtaccctccaggttgcttcctgggctccagattcctctgtgtggatctcccaggagcccccatctgctgtggttcccagggtctaggctgccatctgggcttcccacttctcggcctctcaaagtgctgggattacaggcgtgagctgctgtgccaggctgtaagttttaatgaggtcataaggatgggactctgatccaacatgacagatgtccttataagaaaagaagccaggcctgggtgactcatgcctgtaatcccagcactcccaggcgggaggattg

SEQ ID NO: 586256 - DNA, 4001 bp, Homo sapiens
ttataagtcagggcacctgtttattaatttacaaggagaaatgaatccactaaaagaaccagcaaaagcagactcatgaaacagtggcctctacttggggaccaaagtaaatagtatggctataccttctagctgcattctccatgcaaaacattgagctcagtattactctggagaaagtgctaaaaagtctatgaaggaagaaagagaagaacacttagtcacactgagcagtacccagcatgtctctgctacagggttcaggcattttcatttgcgcaaattatttaacccttatgaataaactacaaggtgggttttatctaataaaacaaaaccgcctctgaacaaagatgtttaaagtattataaaaaggcctaggtatccttaaggccaacattcagtacatctcatgagtattcactatgcgccagacactggggctgtagaagccaccgtccctgcccccagggaacccccagtctaaagagggagacagacaaaccgcaactgcacagccacatgagggcccagcaggaatgagggaaaatgactggaagaggcaccaaactcagtgcctgggtctgagaagacagtggaacctggagcgatgattctgtccagctggacagtgataggctatagtcccagagagacacctgccatcctcataaatcacactgcctaaggtgcacatccgaggcactacgacaaatcccctcctacaagctccatgacaaagaactcctctgtggacacccacattgcacccctgcctatgtgaatttccacaaacttccagcactccctgcagtgtcagttgacagattagctttttttttttttaagtgctttggtgcctaccaatggaaaaaggacctttcctcggtgctggagaggtctaaatgataagtatgacacagccggtgtgcacccgcatctcaggacacggctaatttctttcttttctttttttttgagccggagtttcactctgtcacccaggctggagtgcagtggcgcaatctcggctgactgcaacctccacctcccgggttcaagtgattctcctgcctcagcctcccaaatagctgggattacaggtgcgtgccgccacacccggcaatttttttgtatttttagtatagacggggtttcaccatgttagtcagaatggtcttgatctcctgacctcctgatccacccacctccacctcccaaagtgctaggattacaggcataagccactgtacccggctgacagagcgaatttcaaggggaaccagagctctgcccactaccgcctgtttgcttcagtgagaaaggcataggcaccttagtgcccacaggaggccacactggcggtggccaggatccatgctggtggagtctcaagcagaaccccactagtgttgcaggcttcgtggatgaaattccagctttgggtgctctcttgcttggccatctccctacatcatttttcaaccaggctcttgggtcccgaccacaaatccataggaaaattacttctccgtggaagatgtaaaacctgtggcttcttcttccttgagtcaagatggatgaatccaacaacctatactccccacctgggtggaacggcacttctccatacacgccccttgccacagggtctcagaccaggaagccagcaaatgaaccctccacccaccccatcctcccaaagcaggggtcatggagactgggctaccctagctcacaatgggcaagccctgggaagcagccatgaaagccacccacaagggactcacaccatcatcattctaaatggcgctttccacactggacttgcacctacctcattctccatggaataccctgtgtgaaattctgtttgaggaatttctttggagagattctggttcctcctctgccgacagctactatgcattctctactcacttctgaatttgttgaaaaatatggccagatgttagccctccctctgaaaaaaacatgactgaacaggaagaccagaaaccacagcttccttctgcaaagccactgaagctgtttacaattttttaaaagtttaaaaagcaggcagcacccagaaactgttggcaaaatccaaacagtctgcatgcacaaaaagacacaaagtaaaccagctcattttccctacttcccacagcacgcgaaccccacaagcagcctccctgcatttccagcagaaattctgcagtcaacagaaggacattaatttcaaagtccaccattctgcacattcaaatgccaaagctaaacaagcagacagaaagcactgtgaggggctaccatttcctggagacaacaggccgtgctgttggtgaagacccatggtacctgcctcatacgaagggtggaaacacgcgacaaggctgttccagttaccccatttgcagtgcttgctcaaaggcagcaagatctttacagagataactccattcccaggtggggcttgggcagggcacaccgggctctacgggtcctcagcctacaagtgcctctacctgcctccaggactcatgagtttgagtcagcagcactttgaaattaaacagcgtgcctctggccaagctcacttcttcaaggcaaatttcctaatctagaaaagcagaagttggatctgttgctggtgaaggctcttagaactctgataattccagaatggcttgcaaatagggagggctacttaattaaatattctggttggctgggtgcggtggctcatgtctgtaatcccagcactttagaaggctgaggcaggtggatcacctgaggtaagaagttcgacaccagcctggccaacacggtgaaaccccgtctctactgaaagtagaaaaattagccgggcgtggtgatgggcacctgttatcccagctacttgggaggctgaggcaggagaatcgcttgaacctgggaggcagaggttccagtaagaaaagatagcaccattgcactccagcctgggtaacagagtgagactccatctcaaaaaaaaaaaaaaaaaaaaaaatctggttagagtgactatattcacagatcaataaataaacataacaattacaatataattttttaaatattaggttgaaccaaatcaaagtgctgattttcaacagtgttttggctataaaaatggtactttcatacaattctatttcattaacctgtaacaaataaagtttaatatttcctgattccaaaaagactgattgcttcagaataaaatttagtgcttcaattattattccatataccacagatgtagaaactgtcataaagttggaaaagcagcatcagaactagatttgagtcaatatccggtattaactggactgtcactttctgtctttaaaaaccagagtagagtcacaatttcagattgctccttcctaaaagttgcctatacagggcagaaccagctgaccctgaccttcaggtaggctcaaagggaaaaaggcaaaccaggagggagatacagaaagaggtgccactcagctgagcagcctcacctctattttggctactgcagggaggggaaggattccagggaaatagacatgactaaaaagaaaacccacatgctctgaacactagtcaaccccaaccttccctcacaaacacagtgatccccacggtcagcatgagagagaaaagccaaagaacaaatgggaagagacaggcacaggaacctacattctagctagtatacttagagacacttgagaagaactgcatccataaaataagactagatagctatgaaaaagagaaaacggccgggtgcagtggctcccgcctgtaatcccagcgttttggaaggctgaggtgggcagatcacctgaggttagaagtttgagaccagactgaccaatatggagaaaccccgtctctaccaaaaacacaaaattagctgggcgtgatggcgcatgcctgttaatcccagctattcgggaggctgaagcacgagaatcact

SEQ ID NO: 586257 - DNA, 4001 bp, Homo sapiens
gtgtataagtttagagcaatgcaatttaccttaatgagaatgatttaaccaccgaagttattaaactggaggtgatctcacattgaatgtggtagctgagcaggaaggttctgccagcttgcaactggcagagtacacgaggtagtgttaagtcatgacctggagaagaatccatgccccaaagctccttgtctggcttgtctacaggaaacaagctaagacaagtggcagaatacagaaaaaacacaaaacccctggcttaagcaactacataacaactgattatctcctctagtgagaaaatgaaattaataattaacctgtttatgcctaaattttttcattacccaactggaaaattcttgataattttactgttttttcacttgtaccccaaaaacagtcttactgcttctctctctctctccctatttgctgggtgtttcatgtttctaccaaagctgatagacagctctagaaaaaaaaatcactcaattccatccttgcctatcacacacaggtagatgggccaggtactcctgtaagcggtgcacaatgaggtcatcagtccttagcgcgctcttggatcccggcattccacagagcacatggctcactttccgcaaagctcagcatcatccacactcgggcctgatggtccctactaagcagccaccgggttagcacctctcctttccagctaactccttttacactgcttggctcctccctcttctgtgcgcagcacgcatctctaatctaacacctgcaggctgaatcactatcttgagctattttccagacttaaaacatctttgtagataaccgcaaattatactgcacctaaattagacatgcatggtgctaacatgaaacaatgagttgagaaagtagagaaccagcaccacaggactccctgaaggccacctggctacattctatttcaaacaggacttttaaatggggcactctgtcaaacaaggtggtgagtagctgtcaattaaaggacacttccctgcagagttcagggtagtaaaatcatagttaggaattatcgaggtctgctttaaacttgtggataaaagtgcgcacacacacatcaaaaagaaaatgatagccaagacgtgaagattataaagcatttatttgaaaaagatacattttattaaaatccattttccactttaatggtagttcaatccacatcgtttttccagtcttaaaatgtttctttatcgactactataaccctttactgtaattaaagccacattttgtaaaactacataaactggggtttgactatgaactatgtcctaaatcccactgccaaatgtagctagcgtcactaaaatcaatcaatggttttaggtctgagtgatagtggacgagtgagctggccataaggtgaaggccacccttgcttttactggatatccaaaaacgaagtccagtgagcagcaaacgtctccacgttaaccacacagcccactagctccagttccagccctggacagctttctggcccctcgccgggcccacttcctctgcagccccaggtcccgacgcgcagggaaggccgtctggggccgaggtcggggcgagccgctgcccgggccagaggaaaggcgcggcgcttcctgcccgcccggccgcgaaagcccacctgaccattgtccggggtctcgccctgccccgccccgccccgccagctggcccactgcccccccccccgggccccaaggaacacccgcccaccccaccctggcccctcaacccagccgcccgccgaccacagcagtaggacgcccccgcgcacgctcaccttcttgcccttcttgccctcctcttccatatcgccgcgtgcggctcccgcggcccgcccggcccgccccgggagccccgccgccagcagccgctacatgctcgacccgggcccgccgcccccgcgctcccggcgccgcccgccagccgggcccgaagtctccgccccggccgcgccccacacccgcacttccgggcccgagccccctccgccccgcccaggccccaccttccccagcgcaggccccgcccacggttgtcgctcatcctcactttcaggcccaagggaatccgacccgcagcgatcagaccccgccccttcagggagaacacggcccgttggccccgctcacggcgagagcaccgcccacaggctgaagatcctgccccttcaggacggccgagaacgcgcctgccttgcaccacccccaccccgccccgcgtccttcaggagagccggaaacgctcctacccctacttcgcttctgcacggccgcgagaacgcacctgtccagccccctgttcgctccgcccactcagcgcgcgcgggagcgcgcgcgggagcagctccaactttttcaatttgccgccatctttacggcggccgacttcccagcctgcctcgcgtccagggaggcggagctcaggtctctgaaaaggggacggggggcgggggacgggggacgggggccggcgggaggggacgcggccggcagatggcgaaggaggggcgcgaggaggcggccactgttgaggggcggggcgtcccgccgagagtctgggtgcggtgcggttttcttttttcttgtgtcccactttattccctgagccacagggaatccgttttctagtacttctctgttataaagtctgcctgccttagacaaacacatttggaaaatagaagtgcaaccacaaggatgtgcagaccctatcagaataaaatcgtagaaccttaccagtcatccggtataatttccacattttccagatgaggtccggggaatgaggtgattcgcccaaaagcacactacaaattggagtcaccagcaggtctgctattttgccactaaaccaatctgccggtaagaactttgtagcacagctagaatgtaaactgtgtttttttggtggtttttttttttttttgagacggagccttgctctgtcgcccaggctggagtgccagtggcgtggatctcggctcactgcaagctctgcctcgcgggttcacgccgttctcctgcctcagcctcccgagtagctgggactacaggcgccagccaccacacctggctaatttttgtatttttagtagagacggggtttcaccatggtctggatctcctgacctggtgatccgcccacctcggcctcccaaagtgctgggattacaggcgtgagccaccgcgcccggcctaataattctttatattaaacttttctttactgtgtttctgtctcctgactgggcctatgttatactgatattcaaaagaaatacttggtctctagacctctccaaaggcataagtattccattctctgcaagataaagcagagatagtggaaacaccctttcaatctgccttctgcaataatccagcttgccacatttacacacgcaaatgatgtagcgcatctggttgtcattattttcccaccattcacagaacaaaggcctgatatttaaagtcttccaccgtcttccacaaatgcatatttatcactccataatacagtaaacaacactactaaaacttctcttagcctaactctggatgtgctgacttcctcaggctgttcttatccatcagaatacctttgccctgtctttgcatacacaggttcatgcttcaagcaaaagtccactggctaatgatcagatggtgataactgggaataaagacaataaaatgagaaaagcaaaaaggctgttagcttgctataacaagggagtcagccaccatcatttgtatttggatgagactcaatgtcaggcagaggagtgggtaagctttatagtgaaaaaagggaagcctccagggatgtcctcatttgaggctgttggcctggggaagcaaggggcagggcatcccaagtgattggttaggggcacatatttgtctttctctggttgctcctaagctggaagcaggaccgaaaactaggaaagc

SEQ ID NO: 586258 - DNA, 4001 bp, Homo sapiens
cccaggtttaagcgatcgattctcctgcctcagcctctgaagcagctgggactacaggcgtgcaggaccacacccggctaatttttgtatttttagctgagtcggagttttaaccatgttggccagggctggtcgtgaactcctggcctcaaatgatccacctaccttggcctgccaaagtgctgcgattacaagcataagccaccacacctagcccccaaacaattctgaagtcaagtttaactgtggctccacttttcaaacacgggccaccactgagcccactaaaaacaaaaactacacctcctaggttagcaagtccttactaaagatatttcatctggatgttgatggcatggtataccactagcaaaaccctacatattattctgaactcaaatcagcaggaaataatttccttttcttggatttgaactgctaagttttgggaatttagggatgagtaaaaagcatactcccctcaataatctaatattctccatccctaagacttgcaaagagacagatttatctcccctccagttggagatagagatgagacctaacagagaaactgctgttttaaaaagagaaaacccagctgggcacgggcctggtaatcccagcactttgggaggctgatgcggggggatcgcctgaagtcaggcgttcaagaccagcctggccaacacggtgaaatcctgtctctactaaaaatacaaaaatcaactgggcgtagtggcgcgagcctgtaatcctagctacttgggagactgagacagaagaatcgcttgaacccgggagggagaggttgcagtgagttgagattgtgccaccggactccaggctggtcgacagagcgagacttcgtctaattaaaaaaaaaaaaaaagaaaagaaaagaaaaatcatcctcatgcattttgcccatgtgattgtgtcaacctctcttaatttttcaagttttaaaataattaactttaatatacaattacagccctttagcccggactgtgaatggcaaaaaagcagggattcaaaggcagggctgtcagactccaggcactcaggactattactgattacacgccacttctgaatgttctcctaccttgaaaatggacactgcaaatctttctacaaagaaaacattctacggaaaatcaagacctttctgacctagcccagagcacctctcaccatttcgtgaagcagcacattgccgtctttagtaagtttgatgtctccagcgccagaaacgagcctgtttaaaggacagaaatgaaccagactatgactttttcaacgataactaaaagtcccattagaaaacgggcttttcccagattttagggagccagggatgtggggctagttatgtccagcaggatggaggacaggtgtagtgcccaccccgtccccgcagagattgtgccgagtcctcagggtgcctggaagccccagagggcggggaacgccgcgctctagagccgctttgttctccgcggagactgcatcgatgcgggaagaaatggccgggacggtggggcttaggagggacacaggaccgaccccggaggacgccgagaaggacggctgcgcagccccgaggcggcgggctccagtccgcggtcccgggcccgccaggagcgcggcggcgcgcggtgcccgcccggccctccggttcagccccgccttacatcttcatggtgcccttgggccccaggttggtccttagcacgtcctgcagaccccgcgctgcgctgatgttgaccgccagcgccgcctgcgctcgggccacctcggccttggggttcagggtcttcaccgccgccatagctgctccagcggaggaaaaggaaacgatgctgagtgcccagagccggcgcggcgtggccgggaggaactatccgggtcttctggaaaagtcggcccgtctggccggcccccagcgtgcccgcgcgccgccgccattgggccacaggtcgtccggcgcccgctcattggtccgcggctgcacggctcctgcggtcccacccttcgcgcctcggccttgtcgtcatcgcgcacgggaggagcttgttcccggcattccgtgctccttggttccggcgttggagctctttggggcccagctttgcggacccgggagctcgggacgcaggcggggcttgtgctccgcgggggcagggcgtagggtgggcctcctacctcccctgatctcgcggtttgttccgtttcattggagcttcccggaccgtgtgctcgacggtgccctaggtgccgtggggccacacgcgagtctgataagcaccctcccccggaatcatgcggtgctgtgaggcctagcgaagatgaagatagaatgcaaggtagaaagtgctggatacctttagaaagctgcaggactggtgcgatgggagttgagacgtaagaacctgcccgtccgtagggctctggatgctgctgaggcccgaggcccctatggcagatttgaaaattcacccttgtagagtcattcctgcctttgagcggactcccttttaaggtaaatttccaaagagctccacaattgtttccagtatccagtgtcccgccaaataccagggattcagtaacacgtggtattttactttatttattttctttttgtaaacatagggtctcactatgttgcccagggtggtctcaaactcctgagctcaagtgatactcctgagttcaagtgatcctcccgcctcggccttccaaagtgttgggattacaggcgtgagccaccgcgcccggctgtattttatttttaataaataacggaaattgttctgaattcaaaaggcaccaaagggcatgtagtgaaaattaaatcttcctcccacttctagttcaacactagagacaagcaaagttacccctgggtactctatgaattttcggaatgctttctgaatttataaacttacatatgaatataatcatttccccacacaaatggcaattcataatacacactgcagggtgtgttatactttaagtgtcttggagattgtgccatatcaagactaatgggaagtcctcggtaacagcagcgtgatgttctttgtaagaatgactcaactaggggccagggctgggtggctcacgcctgtaatcccagcactttgggaggatgaggcgggggcatcacttgtgcccgggagttcaagaccagtctgggtaacatagcgagactccatctatacaacaaatacaaaaattagccaggcgtggtggtgcacgtctgtgatcccagctacttgggaggctgaggtgggaggattgctggaatctgggaggtggaggttgcagtcagctatgatcttgccactgcacttcagcctgggctacggagctgaccctttctcaaaaagaatgacacaactaaccggtcacctactgactgatgtttaagttgttcacagtctgctattcagactgcagtgaatatctgggtatatgatgctcttaggtgggtttgtgtatttgagaatcacaaaaacatctatatatgtgactagtagcactgcacgatagaagactagttattagttccataggcattacacggtgtgcatgcggatttattataactgctgttaaaaatgttatgaggaggccaagcatggtggcgcacgcttgtaatcccagtactttgggaagccgaggtgggcggatcacttgaggtcaggagttcaagaccatcctggccaacatggtgaaaccccgtctctgtaaaaatacatcagcctggcctggtggtgtgcatctgtgatccaagctacttgggaggctgaggcatgagaattgcttgaactcaggaagcagaggttgcagtgagccgagatcatgtcactgcactccagcctgggcaacagagcgagattcctcaaaaaaaataataataataataaaggccaggtacagtgattcacacctgtaatcccagcactttgggaggcagaagc

SEQ ID NO: 586259 - DNA, 4001 bp, Homo sapiens
gaacttgattttaaaattgcaaccaattttattttaattttacttggatgcaacagccagagaactttcctaaattctgaacagtaaagatcacccataacttcaccatacaatttcagaaagatacactgtgtatgtaaataccatgaccatccagaaattttcttctggttcattgaagaactgtctgttcttctgtgtatgtaaagattttgcaggttttgatgggctaaatgtcctacaaaggttaaaaaaatatgtttgggacaattctccagcagcagttttaagaattcactgaacgctaaaagcacacttagaggtattaccttgtaaactgtacaatagcttcacacaatccgacatttctaatcttctcattcttttctacctcatttggatgataaaataaaatcttattttcctcctgaaacatgaggaaacagaagcacaacatgaatagaaacatttcatcttagctattgaaaacgctaagttcaatgtcgacctcttgtgtcacacatgctaatgacaaaacaaaacaaaaaccggttttagaaaaacaggaattgtaatcctagtattttcagaggctgaggcgggaggatcacttgagctcaggagttcaagaccagcatggcaacacagtgagacgtctctattatttaaaataagaagaagaacaggaatgatctcatcattgtgcaaatactgcccaccagtcagaaaggcaatttcgatagtcagtaagtcacatctgaagtagcaccaggtaatttttatgaaaactcaagtctctaggtttctttcctagtgctaatttgtaatacaccaatgcttgtaagaaataaaggtgtgcccatctgcagacacatagctccctgaaaattaaatccagtcagttcccagccatttgaactgacaagttgcttttttttctttttctggagatggggtctgtgctgcccaggctgtagtgcagtggcgctattacagctcacctgcagcctcaatcacttgggctcaagcgatcctctggcctcagcctcctgagtaactggaaatacaggtgcgtgccaccacgcccggctcacttttcaattttttttttttttgtagagttgggggtcttgctatgttgcccaggctggtctggaacccctggcctcaagcaatcctcccatctcggcctcctaaagtgctgggattacaggcgtgagtcacagcgcccagcctggacagtctttaacagaagtctgacttgctggaaacaaaacacagctccggacatcctttgagaaagtcgccgtccccacctcagaaaaaccacacacacacacacacacacacacacacacacacacacacacacacacccccctcccgaaattaatttatttcctcatttgggcgaaaactattacagggacctccaggcttgcatcatttgaaggctagcgtctgccaccctggttccacgcttctagttggggactacccacttaacaaagccaagttcaattttaatttcccagaactgacgcaaagcaaagcgcaaagagcctcaacctggggtgtggagtgatatagacccgacggggctttattccatcgacctaggacctgaagcggtccctgcctgctgtcaggtccccgccgcagccccctgcccggactcgcacctggcacaatgcaggctaggtcagtgcccctcgaggtgggcagaaccacagggccaccttcccggggaacaccggcgccgcccgcccgcgcgccgccccctccgcatacctgtccttcgcgcggcccgaagcgcgggttgtagatgaagaaactcagcagcgccggcgggaactgcttctcctgggccgcccagggcccgctcccggccccggccgccgctgcagccatcccgccccggcccccacctcgggagcctcccacggcccgcccagagacagcagccaccggctaaaacaccgcacttccgcctccgtcgccaccgccccggaagcgctcgccgcaggcccggaaaaagaatccgcctcgcagcgtcctcttcaggcacccccgggtggctgtttcctggccgagtttgtgttttcctggctcgcggagttttctcctggctacaggcgagggctgcgcgtttcaggaaaaaccgagcgggcactgttttttttttgttgttgttttttctgatagggtctcagtttgtcatccaggctggagtgtagtggcgcgatctcagctcactgcagcctcaacgtccgagactcaagcaatccccctgcctcagcctcccaagtagctaggattacaggcgcgcgccaccaaggccagttttatttttttgtagaggtggggtctgtgttgcccaggctgctctcgaactcctggcctcaaatggtctcccacttcggcctcccaaagtgctccgattacaggcgtgagacaccaccgcccagcctgttgttgttttggtggtattgttttaaatttaatttagagacaagatctcgctttgtcacccaggttgcagtgcagtggtgccatcatagctcactgcagcctcaactcctgggctcaagggatcttcccacctcagcctgaggagtagctgagaccacaggcatgcactaccatgcccagataattaaaaaatagatagatagatagtagagacagggtctcactttgttgccccggctgctctctaactcttggcatcaggggatcctcctgcctctgctactggatggaaggtcttgaccgtggattgcccaggttcttggcttgttgaacacagaactgaacaaaatgcaatgcacaaagtaacaaaagaacaaagcaacgaaaagaaacaaaagaaaaaactgaagtaaggaagaaacagatttattgaagcgaaagtacaactcacagagcaggagcaagctagagcaaacagctcaagagcccccattaggatttttattaagctggaagaattaggtaacgcccctaggtgcccgttagaggtctccgattggttacaccctctgaaggattggcctgtgaccaatcagaggctgaagtggagacgcgcacccgcccccccccccccccccgtcaatcagaggctgtcaccctcccccccgcccccccccccgtcgtccatcaatcagcctctgattgagggaatgaacacgtggcctctatgctgcctaatcttgcctagaactggctgcacctgctgttcttttgtttatgccttaacccttggttaccctcattccctattctgcctcacctgccctcccaaagtgctgggattacagatgtgagccacccacaccaggtccattgttttgtttttagtttatttaaaaagtattttattctaaaacagcactttgctctgttgcccaggctggattgcagtggccagatcagacgtcactgcagcctggaactcctgggctcaagtgatcctcccacctcagcctcccgaatagctgggaccacaggtgcatgccaccatggctggctaatttttaaatttttcgtagagctggggtctcactatgttaacccaggctggtctcgaactcctggactcaagtgatccactggccttgggctctccaagtgctgggattgtaggcataagcccctgtgccatggcagttttttttgtagaaggaaatgtagagacacaaaggaagcctcatttagaaataaacaaggctagccacggtggctcatagctgtaatcccagcactttgggaggccaaggtgggtggatcacttgaggcccggagttccagaccagccccgtctctactaaaatacaaaaaactagccaggcgtggtggcacatgcctgtggttccagctacttgggaggcttgaggcagaagaattacttgaacccagtaggtggaggttgcagtgagccaagattgcaccactacactccagcctgggcaacagatccagaccctgtctcaacaaaaaaa

SEQ ID NO: 586260 - DNA, 4001 bp, Homo sapiens
taaagcaaataggaagaacttgattttaaaattgcaaccaattttattttaattttacttggatgcaacagccagagaactttcctaaattctgaacagtaaagatcacccataacttcaccatacaatttcagaaagatacactgtgtgtgtaaataccatgaccatccagaaattttcttctggttcattgaagaactgtctgttcttctgtgtatgtaaagattttgcaggttttgatgggctaaatgtcctacaaaggttaaaaaaatatgtttgggacaattctccagcagcagttttaagaattcactgaacgctaaaggcacacttagaggtattaccttgtaaactgtacaatagcttcacacaatccgacatttctaatcttctcattcttttctacctcatttggatgataaaataaaatcttattttcctcctgaaacatgaggaaacagaagcacaacatgaatagaaacatttcatcttagctattgaaaacgctaagttcaatgtcgacctcttgtgtcacacatgctaatgacaaaataaaacaaaaaccggttttagaaaaacaggaattgtaatcctagtattttcagaggctgaggcgggaggatcacttgagctcaggagttcaagaccagcatgggcaacacagtgagacgtctctattatttaaaataagaagaagaacaggaatgatctcatcattgtgcaaatactgcccaccagtcagaaaggcaatttcgatagtcaagaagtcacatctgaagtagcaccaggtaatttttatgaaaactcaagtctccaggtttctttcctagtgctaatttgtaatacaccaatgcttgtaagaagtaaaggtgtgcccatctgcagacacatagctccctgaaaattaaatccagtcagttcccagccatttgaactgacaagttgttttttttttctttttctggagatggggtctgtgctgcccaggctgtagtgcagtggcgctattacagctcacctgcagcctcaatcacttgggctcaagcgatcctctggcctcagcctcctgagtaactggaaatacaggtgcgtgccaccacgcccggctcacttttcaattttttttttttttttgtagagttgggggtcttgctatgttgcccaggctggtctggaacccctggcctcaagcaatcctcccatctcggcctcctaaagtgctgggattacaggcgtgagtcacagcgcccagcctggacagtctttaacagaagtctgacttgctggaaacaaaacacagctccggacatcctttgagaaagtcgccgtccccacctcagaaaaaccacacacacacacacacacacacccctcccgaaattaatttatttcctcatttgggcgaaaactattacagggacctccaggcttgcatcatttgaaggctagcgtctgccaccctggttccacgcttctagttggggactacccacttaacaaagccaagttcaattttaatttcccagaactgacgcaaagcaaagcgcaaagagcctcaacctggggtgtggagtgatatagacccgacggggctttattccatcgacctaggacctgaagcggtccctgcctgctgtcaggtccccgccgcagccccctgcccggactcgcacctggcacaatgcaggctaggtcagtgcccctcgaggtgggcagaaccacagggccaccttcccggggaacaccggcgccgcccgcccgcgcgccgccccctccgcatacctgtccttcgcgcggcccgaagcgcgggttgtagatgaagaaactcagcagcgccggcgggaactgcttctcctgggccgcccagggcccgctcccggccccggccgccgctgcagccatcccgccccggcccccacctcgggagcctcccacggcccgcccagagacagcagccaccggctaaaacaccgcacttccgcctccgtcgccaccgccccggaagcactcgccgcaggcccggaaaaagaatccgcctcgcagcgtcctcttcaggcacccccgggtggccttgttgtctgtttcctggccgagtttgtgttttgctggctcgcggagttttctcctggctacaggcgagggctgcgcgtttcaggaaaaaccgagcgggcactgtttttttgttgttgttgttttttctgatagggtctcagtttgtcatccaggctggagtgtagtggcgcgatctcagctcactgcagcctcaacgtccgacactcaagcaatccccctgcctcagcctcccaagtagctaggattacaggcgcgcgccaccaaggccagttttatttttttgtagaggtggggtctgtgttgcccaggctgctctcgaactcctggcctcaaatggtctcccacttcggcctcccaaagtgctccgattacaggcgtgagacaccaccgcccagcctgttgttgttttggtggtattgttttaaatttaatttagagacaagatctcgctttgtcacccaggttggagtgcagtggtgccatcatagctcactgcagcctcaactcctgggctcaagggatcttcccacctcagcctgaggagtagctgagaccacaggcatgcactaccatgcccagataattaaaaaatagatagatagatagtagagacagggtctcactttgttgccccggctgctctctaactcttggcatcaagggatcctcctgcctctgctactggatggaaggtcttgaccgtggattgcccaggttcttggcttgttgaacacagaactgaacaaaatgcaatgcacaaagtaacaaaagaacaaagcaacgaaaagaaacaaaagaaaaaaccggagtaaggaatagacagatttattgaagcgaaagtacaactcacagagcaggagcaagacagagcaaacagctcaagagcccccattaggattttcattaagctggaagaattaggtaacgcccctaggtgcccgttagaggtctccgattggttacaccctctgaaggattggcctgtgaccaatcagaggctgaagtggagacgcgcacccgcccccccgtcaatcagaagctgtcaccctcccccccggccaaccccctgtcgtccgtcaatcagcctctgattgagggaatgaacacgtggcctctatgctgcctaatcttgcctagaactggctgcacctgctgttcttttgtttatgccttaacccttggttaccctcattccctattctgcctcacctgccctccgaaagtgctgggattacagatgtgagccacccacaccaggcccattgttttgtttttagtttatttaaaaagtattttattctaagacagcactttgctctgttgcccaggctggagtgcagtggccagatcagacctcactgcagcctggaactccggggctcaagtgatcctcccacctcagcctcccgaatagctgggaccacaggtgcatgccaccatggctggctaatttttaaatttttcgtagagctggggtctcactatgttaacccaggctggtctcgaactcctgggctcaagtgatccactggccttgggctctccaagtgctgggattgtaggcataagcccctgtgccatggcagttttttttgtagaaggaaatgtagagacacaaaggaagcctcatttagaaataaacaaggctggccacggtggctcatagctgtaatcccagcactttgggaggccaaggtgggtggatcacttgaggcccagagttccagaccagccccgtctctactaaaataaaaaaactagccaggagtggtggcacatgcctgtggttccagctacttgggaggcttgaggcagaagaattacttgaacccagtaggtggaggttgcagtgagccaagattgcaccactacactccagcctgggcaacagagcaagaccctgtctcaacaaaaaaaaaaaaaaaaaa

SEQ ID NO: 586261 - DNA, 4001 bp, Homo sapiens
gtttgtctgtgatacagttttctctaaaatgagtttacttacatcaaataaggttgcaagtattaaatgaagtaaaataatatatatttatattgtagaaaatgttattgttattttgaaatattactatgaagtatcatttcaaaccataacagtaaagtgttatttcatattggccaagtgttttaaaaatctaataaatgtgtatattttacaaaagtagaaatgagtatttgcaaaatagttagattataatgaaatgtgatcatatatgtatggaattaaaatatgcaaatggaaagacagctactagtttagaacaatgctacttgcaagtttcagacacatcttgggccagtgaacaaaaacatcttctgattagatgcaaggatacttacagaattaagtatctgatagttacagaattatcttaaactttccttttcaggaaacacacaggaaatacacacacatgcagggttcaaatgtgttaaagtaaacaaggttaaaaaaattccttaaaaaaatagggtggcaactataacttccaaggtaaattccaaattcagtacactctgtgcaagtacctccagttgtaattaatattcttcccaggctaacccattatctgatggttctctgtttggtttattgttctggttcactaatgagtctgggaaattaaatgatttctactttagttcttattttcttgtaaattccaaaggaccactggactttctatataacaaacatttttaaatatttcattttggcttccttgtgaaccaatatttaaagcaatattttttagcttcaacacacattactgacttcaaaccacacagaaaaagactaaaaagtacatgcaaatctttacaaaacaggtttcaatatgctacttgatgatttcagaaactgggatgtactctagagaatttatgccatttacagttatttataattttagttaatgtataattaatttgaggcttttacttaattcctccaaattgatttctcctttacttcaacttggcatcatcatctaataattcagtactatttgtaataagcttcctgaatcgaaaaaaaattaactttatttttattctactaatttacactaattaaatttcagattatttaaaagtaatatactttgctattcccagtaacaatgacaatatctttgttcattacagaaaagaacttaaaaagcacatatccaaaatacacattgcatttgatcatgtagagcaagtcaggtataccaaaagttgtgcaattcagattgaaaattaaacaagctaatgactctgtaaagtaatagttaataattgcatattagacaacatgttgacataagagctgtaagtcatttataacatctaacctcattatattggtctgcagtataatgatcttcatcatttaaacatcatgtataaatagcctaagtataaaatgaaagttttataataatccaaattggattataaatcactttaaatattaacttatacatacgacatgaaatgccattgggtatggtttaagcataaaatataggaaggttgataacttgaaaataatgcaaacctgatttttagataaagcctagtgactaagaaaacagttactaccttttttcctgtcctcctatataacttcttaggagtatttatacagtagtgtcacctcccgtcatctgggtgatgggaaaaatcccttaatcttttttatttaaagaaaaatcatacaacttacctttaaaatggctaagaaggatttttcaatcaaatgctccaacatttggacaattcttaataggatcaaatggtattctgcaggaaagtcctacactgcagtcctcagtacataaatgcgtgagagtttaaatatgcaaccacaccccctcccccccccaaaaaaagagaagagaaagcactctacagtgtcagatcccagtgtgtggtttgttgccagaggaattgaaagaaaaaaaaaatcccccacacagcacattactgatatggctaataagggtctatttttatgttctggtgaagacccattacctatatctgagatattcagcattttttttttttttggctatttcccatccaagtaagtcagaggccagaaaaacaaaaggaactgacttgctgagtttcccctaacatattctcagatgctgaactgagaccgctggtggaaatagtaaatttggaagaataatcatattctcacttccctgtcttgactgagcttgcgaaacttattttattaagtttaaatttaatgtacttttttatacagcgtaattctgaaatactgtgagactaataattctgaaaacaattggagactgtcaatcagcaaggatgacaaactgacttaaaaaaaggaaacagcctattgttctagctggaagttcttaactgtttatcattttctgttagttttgcaaaaatttcatgatcacagcacagtgctcctacaaaaaataaactctttaaatttcttcaaccaaaatatgtctaagtagaattactattgaggataatctttagtacttaagtcactttcaaaaaaaaaaaaagcattatgttgatattgaatcaaaatagaaggccttgcactttggggaaagaaccttcactatcaagaccctgttcttataaagaaattctcagaatcatacaggaaaaccttcacagggttaacctggcatgtatttgataggagagctggataaatgcattcaaacaaccttagaagtaaagtaacctaagaataccagacagaaatatatttagttcattaggtcatatttaaaccagtccttaagttagaatgctcgtgctgtcctttttgggcatgtgaggcacacaacgaatcctttcatttgcaagcagtgccatacaactgaaaaaaaaaaccccaaacactcttttctcctcaagaattttttttccccagggaagtttttactgacatatttatttaaaaaataagtcataaaaatattgtaagtctattacttttttttcaaatctcagaccacttaattaggataaagtagaaatgaccatgtgcaatctctttataatttatgctttcagttagaaaagaataactcacagtgatttcatgaaacttaagaaggtaattcccttaaataactgcgaccttttatcttggtggcacgatataaaatggtagtataaagacatattattttggttaagaatatctattttgtagatagctgttttgtatttaagctaatttatttctcaaccttaattctcacacactcacactctaatatgacaattcagaaaaagattaccaacgaaagggttcagataagacctgtttaaaagagcatattttaaagatattaaaagactaaagtataatgaaaatatgatcgcaattagagaaagattatttcagaaaaaatacatgcaaaatagatgcctaagttgacattaaacttacttgggtattatttaatcagtagcctaatgccattcaaatctgctgtcactggagaggaaaatgtcacagagtcccatgagcagtccaaagaatcaaatttacattcccagagacagctgttaagtgttcaatcccatagacaacagttcctgagtagcttagcatacaagatctgaaagcacacagctgagtcaaatctgcaactgtggatttttagaaaaatatagaccttaaacaataacatagcaaaatgctgtacccattttaaagtaaagagtgttggggttttcatttttttaaagactatgcacccaccatattttgaagggatgtgttttatgtgagcatataccttgctttatgtaaatccactataacactggattaatttattagaatgacaggatataattttcaatctacttcagtcagtttagacaattctttggaaattcttttttttttttttttgcaagagatcacatagg

SEQ ID NO: 586262 - DNA, 4001 bp, Homo sapiens
agacatgactgaggattctagtcacatgatatggaaacccaacctcattcccctcctctagtacctcctcttgctcctcacaggtggcaataaagtaacctgttgtgaagcgcgttgcacacacttcacaatttttatctgaagtgcacttcactcattttatagcatttctttatttttcaaaacaatttaacctgaagctttgtttgtaaatactaagaatatcagattaaattccttaagtagtcatcttaatcagtaatttgtgccaaaagcaaaatgagccgcagtcacatcaagaactttatatttctttgctctgaaacatttccttccatttaatcatcccactctacaaccttaagcagtctttttcaatcatttctcagcagtttaaaactctttttttttttttttttgcctgactgtaattcttgagttccagagcttatcttttccccaggtgaaaactgttttattatcctcaggtgttagctttcttgaactcttagaacagttaattacacagttatcattatcctttacaaaagtatcagattccaaataattagtatttgcatagtacatcatttgaaaatatttttcctttcctcttgtcaggattacagaagtctcatatattgccccacaaatccacttttattatttagtcagttacacctgaaaacaagataggttgcctatttctctttgagatagagatcccatctgaattgtgagttctctcaaggagtgtcaacaagtttacccctttggaagtattagccttaaatggttccccagaattcagtctagcaccaaccaaccattccccaaataataaaagaaagtgaccttttttgtaaaggcaaagaagcctatctaattcttttccagggcttgtagaatagcagaatagcatggagaaacagaaggaactgcttttctttttttgtatcaaccttaattgtgtctcgaaatatgcataacttaagttgactttctgtataagtaacgactctgtcattcctggcggtgttgtctgatcttatgtagccatattatgaaacacaccatataataaaaattctgctatgtaacaaaatctgcccccaccccacaaataagacatgtggcacccacactcaagaaaatttctatgatcactaatgattagtaagttttatgtataaaaagatttttgttttcttctgtctaggagtcaaattgttaagattggtcttttaggttatttcttaaatatatttgtcagttgtgacagcaagccaaaaaacattttcagagttccatgaaagaaggtcattcaaattctagtctcattttaaatacatattttttccaagttggaagaggataatcaaattggccagatttttagagcatccttctgaaaagattaatcttaaaaacctatcagaaaacataaataagaaatctgaaggaaaagaagtttcaggtacaattacactttttgaagtcacgagaagtttgggttttctgacgttttctaagtaaaagacatgaactaggcaactagaaatccatagcatcctatggaatttagagacttgtggatatgtgaggtttaagggttaaaaagcaaatttctttaaccatttggttaaaacttacaaatatgttaaaagaagcatcacagactaaactattatatcagataataattacctttctagagagcccaaaaataatagttacttactagatgagagtgcatcaactacaaagacatttatagccacacttctaaacaaaaagcattctgctcaccaacttctagaagagcttgctttcggagatgtaggacctcaagactggctccagagtcttgcaggagcagatgcagaaagtaaacaggatttccacggcatagcagctgagaactcagaaatgaggcacaggctctcaacccttcatctatccttaaggttatcctgacatctgaaagccattgacatcctcagccttccagctcttcggacgcatgcctaacacaagttaaatatagatccctgacacctgagccaaatggaatgaaagttaacttgaaaaatctcactcattttgggcctcagttgaggaaaataaaacccttaatcctttccctgctaaaacctgttattcctgttaacagatggttgctctacttataaaacatagaaattcaagtaatcagtaatcaataatcaatttgcttcacttcatgattaccatttgctctgatagtaaagaggaaggctcaggttttcctgtcttaagcataaaacaacataaaagtgaatattgattactattgagtcaacaaaacagatttttgttccagtaacttttgttactggaaagtctctgtaaactttcttagtattttttctcctctatgttttcagtagtcatttggtcattttttgtttgcctcatttaatgaggcagaaaatgtcatgcactgccagagttctttggtttaaattattgttttttgaatctttttgaagggttgtagaatgtacttggtttaaaaaatttttgcttgggacttctggtaaacatgaataaagctctactctcagcccaaacagaccctgtgatgaaagttattactctgaagatataatgacaagatttctaaattactttctaggatttatatgttaagaatctctaattctatactaaaacgaagtgaacagagaaactggaaaagtcatatttctctcctgatagttaaatattttcaattaaaatttcttttacagaatcacattaaagggaaatgatagactagagttaccactctttaaatgaaactattctgtatcaagtagtaaccactatccacaaaagaaggttgttttgtcaaatcaccataaccagtattttcatcatattttaataataggtcctatgtactgagcactgctcacgtgcctgaccctttacgacgtagataccatctaattcactctccttttctaatcccaaaataagctttcaaattaatattttaggctcactttccagagaagaaactgcaactaaaaggataagttttgacaatggacacatggtgaataactgattcatttgagagtctaacccacaaaattttgacccacaagcaagttttcttttccatcctacaacatagttacaggctaaaaatgagtttcatccacactttatctgtatcagattagccaccctttgagcaagtccaaagcttttttgcttttttgttgcttaaacaaagttacagaaagcacagaaatggtccctaaagagtattgctatgacaccaggacattcccagaagcattatgtccctaagacaggaaaaagagagaggatccataagccaccactccagccacggagatttctcatttcttgcatttatgcttttcacgttctccttgccagtttgtatgagcagattttgatcttccagatcctggaaggccagccctgatggctacctctcagccagtcagaggtctgatatgtgacagagaaagggacaatcaggtggcaaggagttggccctttaggtcagatggtctttacgtgaaaagtagggtcacatatttccaaatattgtagaatgtgaactttttaattaaggaaaaaaatgttgttccctatgtgtaaaaggtttctctattatttgaactaggaacttttaaacaaattattttatcaaagaagaaggcatgttaaaaattcagtgaacacagctatgcatattttctaggaacacagtaaatatcatagactgcctctgacattgtaagcactgttatcttcaaatatggattatgtcccataagaacaggaaatcctgtatttcctttccacgaatcatatatgcattatcattaaattgtttactccctgctgggcatgagcttatagggataggtggtgagggagagggaaaagttgtggtagattgtgctaaaaagcac

SEQ ID NO: 586263 - DNA, 4001 bp, Homo sapiens
tttccaaatgatgttgtagtctgtacgttaacacagacactgatcttgtactttctctgcataagatctgggtgagaacatagtttatgagtaggaaggatgtcagatcaatggccactccatcccactattagataagccccacacctcactattacctgtctgtttccattggcctgtattaaaaatactatcaagaaaactaagaattccaaggcaggggatactaatttacatatgttttttcagttaaatgcatgaggctgaagttctgcaatatgttagcaataaacacaatacagtcagccctctgtattcatgggttccacatctgcagattcaaccaactgtggatcaaaaatattaaaaatactaacaatatagcaataaaaatttaataaaaattcaattcctcctgttctccatcgtgcactatgcttactaaccctttgtctaggtcattgccatcctaaccaggtagagagttgaaggcagaactcgttttatttggccagtattatgtttaataaaatgaacatttatgccttcaggcagtaaacacacagtctagttcacagcagttcctgttcttcattttatcttgttcttggcaccttaaattttgtttaacccctgtatccaaactcctgcagccatttgaatttgccatccctgatttagaacttcagcagaactgcttccctttattctcttcttccccctatcaatcaacgtttctgatgagtgagtgtgtagctaattcgaataagctagggtgggagatgaattctaggttgttgtgcaaagcccatctattcaatcattctgttttttcacactacagtcaatttgttttatactaagacatgttctgcatatttctgaaagtattttctaagattccaatatgaagcttcacaaatagaaaatatttatgagatgagattattacacatatataaaaatagtggattactaaacagtgtattaccaaacaagtttacctacaatttaataaggatttatgtttcaatattaaacacattacacacacacacacacacacacacagttttacttttctcagtattaactaaagtgcaacttcttttataaatgtgcttttacaaaatatactcacttatttcctactcaaaagcatgccaacatgctctttggacataacttaaaacaattatttctactaacatgcatacctgtagacagcttttaatagaatttggtatttatatttaagacagcaatggagtcatgttaaatatacattatacttataacatttcacataaagtcgcatcatatagagttgcagtggttcataattacctttatgtcaaagatacaaaattagcagttaccatgaaatataaagcaggtaaatacaaagcaaaaaaagagaagttagaatcaatcaaaatgagaaggcatattctttggactacttgtacctttttaattgtcttctggataagcaggtctccaactggcattagaatacctccaaacacagccaggacagcaccaatgacagccccagcgatgagcccacagttccggtcacagcccatttttcttgttcaggaggtgaattagtgttaagcacctgtttcttgcaaactcctggatatgattaaagtggtttctacaagctctggttctatcattagaaagagatcataaaacagaagcttaaatatcagtacaaaaagatcaaagtacaaagaaaacacccactgaaacgtatcattttgcccgttctaaataaacaaatgcttttctttttgtttcaccaaagtggcttcctcggtccgtctcccttttcttgcttctaatgcctaccagtggcagaactaataatgtcatatctgaatttcttcatattcctcctttttaattttctttctacacatgattaacatattgaaatcttatctaaggagaactctcaccctcatctctcttcccttgtctcagcaacttagttgcatcctcactatctggtttctccacccaacacaaccttccacaccccttctggagctctcctgcgaacagaatgtgggttgactgatgtgttttccattaaatgataagcaagtatggtaacagatgttttatttacgataccttattcacaaatcaacagcaagacatgaattttacaggaaatgaactgatgagtcacagaaagaatcaattcgtctaatcattggaaagctatctgtgaaaataagaaaagcatgggtaaatagaaaaaaattctcagaaattttatactgggacactctctaatatcaccatacttaaaataactgttaaaagaaagtctaattttcatgaatactgagttcaggcctgaatggcttgtcctaaaaactgtttaaaacatggaatttttaaaataagagtatcttactttcagttttattgatgactttggatagactacaggtataaagaatttgaagcaaatataaaatgtagaggatgtcttgtttcaaccatggcattgctctcttactgaagaattttttccctacacattcaactacaatatagtttgtcatttgcagttgattcatgctaattctgttaaaattaggtagtttgtgttagtatatatttgtcaatctaatgtttggtgtcttcataaagtatgtgattattattattttttgagacggagtctttctctgtcacccaggctggagtgcagtggcacgatctcggctcactgcaacctctgcctcctgggttcaagcaattctcctgactcagcctcctgtgtagctgggattacaggtgcacgccaccatgcctggttaatttttgtattttcagtagagatggggtttcaccatgttggtcaggctggtctcgaactcctgacctcgtgatccacccacctcagcctcccaaagtgctgggatgacaggcgtgagccaccatgcccagccatagtatgtgattattatataaagattgggagagccgggcgtggtggctcacacctgtcatcctagcactttggaaggctgaggcgggtggatcacctgaggttgggagtttgagaccagcccgaccaacacagagaaaccccatctctactaaacatacaaagttagccgggcttggtggcacatgcttgtaatcccagctactccggaggctgaggcaggagaatcgcttgaacccaggaggcggaggttgcggtgagccgagatcatgccattgcactccagcctgggcaacaagagtgaaactccatctcaaaaaaaaaaaaaaagattggaagaaagaatacagtttgtgaaatgagtggatcctactgtaataatcagagttaattctaactagtatttgaaaacacatttatttgaacttctttgttgttgcaatgacattttgtcaataatggggttggcgtgtcatttatagtcagaatgcgctttatagtttataaacaattattctctactttgaaatgctcatggccaaagaaaacatatgtgccaacggaatgaaggctacagtcaaaaaagggcacatagaatattgttgttaatgttgtaagtgtattaataattgtggtttgttataatttcaggttttccctccacagctgtcttgcaacagaggtaccactcttatgattttattagtatttacttccactttagtaatcatatagtttttcaaaaatattacctgtagagctaagaaaagaataagaaaatgatattttcccccaaaatgtaggaataaatgttacaaatatttttcttggcaattttattatttacatatgttcccttaacctttgggattcccctttgcctattcccttatacataggatactttccagtataaaccataggatgcaataaacttcatttacatcaaggtcttggtgattaagaagactgactagttctttagtgtcatttttctccaatgtaaagggaatgcacataagtc

SEQ ID NO: 586264 - DNA, 4001 bp, Homo sapiens
gaaaaaaattaaatcatcaatactcagttattgaccaataattatgtgtcagcaaaaaaaagtagtctaaatcgctgtgcattggaagattattgtgatttttgaatttggaaaacttttccaaatgatgttgtagtctgtacgttaacacagacactgatcttgtactttctctgcataagatctgggtgagaacatagtttatgagtaggaaggatgtcagatcaatggccactccatcccactattagataagccccacacctcactattacctgtctgtttccattggcctgtattaaaaatactatcaagaaaactaagaattccaaggcaggggatactaatttacatatgttttttcagttaaatgcatgaggctgaagttctgcaatatgttagcaataaacacaatacagtcagccctctgtattcatgggttccacatctgcagattcaaccaactgtggatcaaaaatattaaaaatactaacaatatagcaataaaaatttaataaaaattcaattcctcctgttctccatcgtgcactatgcttactaaccctttgtctaggtcattgccatcctaaccaggtagagagttgaaggcagaactcgttttatttggccagtattatgtttaataaaatgaacatttatgccttcaggcagtaaacacacagtctagttcacagcagttcctgttcttcattttatcttgttcttggcaccttaaattttgtttaacccctgtatccaaactcctgcagccatttgaatttgccatccctgatttagaacttcagcagaactgcttccctttattctcttcttccccctatcaatcaacgtttctgatgagtgagtgtgtagctaattcgaataagctagggtgggagatgaattctaggttgttgtgcaaagcccatctattcaatcattctgttttttcacactacagtcaatttgttttatactaagacatgttctgcatatttctgaaagtattttctaagattccaatatgaagcttcacaaatagaaaatatttatgagatgagattattacacatatataaaaatagtggattactaaacagtgtattaccaaacaagtttacctacaatttaataaggatttatgtttcaatattaaacacattacacacacacacacacacacacacagttttacttttctcagtattaactaaagtgcaacttcttttataaatgtgcttttacaaaatatactcacttatttcctactcaaaagcatgccaacatgctctttggacataacttaaaacaattatttctactaacatgcatacctgtagacagcttttaatagaatttggtatttatatttaagacagcaatggagtcatgttaaatatacattatacttataacatttcacataaagtcgcatcatatagagttgcagtggttcataattacctttatgtcaaagatacaaaattagcagttaccatgaaatataaagcaggtaaatacaaagcaaaaaaagagaagttagaatcaatcaaaatgagaaggcatattctttggactacttgtacctttttaattgtcttctggataagcaggtctccaactggcattagaatacctccaaacacagccaggacagcaccaatgacagccccagcgatgagcccacagttccggtcacagcccatttttcttgttcaggaggtgaattagtgttaagcacctgtttcttgcaaactcctggatatgattaaagtggtttctacaagctctggttctatcattagaaagagatcataaaacagaagcttaaatatcagtacaaaaagatcaaagtacaaagaaaacacccactgaaacgtatcattttgcccgttctaaataaacaaatgcttttctttttgtttcaccaaagtggcttcctcggtccgtctcccttttcttgcttctaatgcctaccagtggcagaactaataatgtcatatctgaatttcttcatattcctcctttttaattttctttctacacatgattaacatattgaaatcttatctaaggagaactctcaccctcatctctcttcccttgtctcagcaacttagttgcatcctcactatctggtttctccacccaacacaaccttccacaccccttctggagctctcctgcgaacagaatgtgggttgactgatgtgttttccattaaatgataagcaagtatggtaacagatgttttatttacgataccttattcacaaatcaacagcaagacatgaattttacaggaaatgaactgatgagtcacagaaagaatcaattcgtctaatcattggaaagctatctgtgaaaataagaaaagcatgggtaaatagaaaaaaattctcagaaattttatactgggacactctctaatatcaccatacttaaaataactgttaaaagaaagtctaattttcatgaatactgagttcaggcctgaatggcttgtcctaaaaactgtttaaaacatggaatttttaaaataagagtatcttactttcagttttattgatgactttggatagactacaggtataaagaatttgaagcaaatataaaatgtagaggatgtcttgtttcaaccatggcattgctctcttactgaagaattttttccctacacattcaactacaatatagtttgtcatttgcagttgattcatgctaattctgttaaaattaggtagtttgtgttagtatatatttgtcaatctaatgtttggtgtcttcataaagtatgtgattattattattttttgagacggagtctttctctgtcacccaggctggagtgcagtggcacgatctcggctcactgcaacctctgcctcctgggttcaagcaattctcctgactcagcctcctgtgtagctgggattacaggtgcacgccaccatgcctggttaatttttgtattttcagtagagatggggtttcaccatgttggtcaggctggtctcgaactcctgacctcgtgatccacccacctcagcctcccaaagtgctgggatgacaggcgtgagccaccatgcccagccatagtatgtgattattatataaagattgggagagccgggcgtggtggctcacacctgtcatcctagcactttggaaggctgaggcgggtggatcacctgaggttgggagtttgagaccagcccgaccaacacagagaaaccccatctctactaaacatacaaagttagccgggcttggtggcacatgcttgtaatcccagctactccggaggctgaggcaggagaatcgcttgaacccaggaggcggaggttgcggtgagccgagatcatgccattgcactccagcctgggcaacaagagtgaaactccatctcaaaaaaaaaaaaaaagattggaagaaagaatacagtttgtgaaatgagtggatcctactgtaataatcagagttaattctaactagtatttgaaaacacatttatttgaacttctttgttgttgcaatgacattttgtcaataatggggttggcgtgtcatttatagtcagaatgcgctttatagtttataaacaattattctctactttgaaatgctcatggccaaagaaaacatatgtgccaacggaatgaaggctacagtcaaaaaagggcacatagaatattgttgttaatgttgtaagtgtattaataattgtggtttgttataatttcaggttttccctccacagctgtcttgcaacagaggtaccactcttatgattttattagtatttacttccactttagtaatcatatagtttttcaaaaatattacctgtagagctaagaaaagaataagaaaatgatattttcccccaaaatgtaggaataaatgttacaaatatttttcttggcaattttattatttacatatgttcccttaacctttgggattcccctttgcctattcccttatacataggatacttt

SEQ ID NO: 586265 - DNA, 4001 bp, Homo sapiens
atcttcccctggttatagcttacaatagatgagattatattattctcttagtcattatacaaaagcacattttgatgtcagaaaacttactttctcatggttaactattataagcataaagataaatattaaagaattaaaataaatgctagcacctcacatgctattcaaaagaatctacatgtaccagttttgttgcatgacaaagaaaaaaattaaatcatcaatactcagttattgaccaataattatgtgtcagcaaaaaaaagtagtctaaatcgctgtgcattggaagattattgtgatttttgaatttggaaaacttttccaaatgatgttgtagtctgtacgttaacacagacactgatcttgtactttctctgcataagatctgggtgagaacatagtttatgagtaggaaggatgtcagatcaatggccactccatcccactattagataagccccacacctcactattacctgtctgtttccattggcctgtattaaaaatactatcaagaaaactaagaattccaaggcaggggatactaatttacatatgttttttcagttaaatgcatgaggctgaagttctgcaatatgttagcaataaacacaatacagtcagccctctgtattcatgggttccacatctgcagattcaaccaactgtggatcaaaaatattaaaaatactaacaatatagcaataaaaatttaataaaaattcaattcctcctgttctccatcgtgcactatgcttactaaccctttgtctaggtcattgccatcctaaccaggtagagagttgaaggcagaactcgttttatttggccagtattatgtttaataaaatgaacatttatgccttcaggcagtaaacacacagtctagttcacagcagttcctgttcttcattttatcttgttcttggcaccttaaattttgtttaacccctgtatccaaactcctgcagccatttgaatttgccatccctgatttagaacttcagcagaactgcttccctttattctcttcttccccctatcaatcaacgtttctgatgagtgagtgtgtagctaattcgaataagctagggtgggagatgaattctaggttgttgtgcaaagcccatctattcaatcattctgttttttcacactacagtcaatttgttttatactaagacatgttctgcatatttctgaaagtattttctaagattccaatatgaagcttcacaaatagaaaatatttatgagatgagattattacacatatataaaaatagtggattactaaacagtgtattaccaaacaagtttacctacaatttaataaggatttatgtttcaatattaaacacattacacacacacacacacacacacacagttttacttttctcagtattaactaaagtgcaacttcttttataaatgtgcttttacaaaatatactcacttatttcctactcaaaagcatgccaacatgctctttggacataacttaaaacaattatttctactaacatgcatacctgtagacagcttttaatagaatttggtatttatatttaagacagcaatggagtcatgttaaatatacattatacttataacatttcacataaagtcgcatcatatagagttgcagtggttcataattacctttatgtcaaagatacaaaattagcagttaccatgaaatataaagcaggtaaatacaaagcaaaaaaagagaagttagaatcaatcaaaatgagaaggcatattctttggactacttgtacctttttaattgtcttctggataagcaggtctccaactggcattagaatacctccaaacacagccaggacagcaccaatgacagccccagcgatgagcccacagttccggtcacagcccatttttcttgttcaggaggtgaattagtgttaagcacctgtttcttgcaaactcctggatatgattaaagtggtttctacaagctctggttctatcattagaaagagatcataaaacagaagcttaaatatcagtacaaaaagatcaaagtacaaagaaaacacccactgaaacgtatcattttgcccgttctaaataaacaaatgcttttctttttgtttcaccaaagtggcttcctcggtccgtctcccttttcttgcttctaatgcctaccagtggcagaactaataatgtcatatctgaatttcttcatattcctcctttttaattttctttctacacatgattaacatattgaaatcttatctaaggagaactctcaccctcatctctcttcccttgtctcagcaacttagttgcatcctcactatctggtttctccacccaacacaaccttccacaccccttctggagctctcctgcgaacagaatgtgggttgactgatgtgttttccattaaatgataagcaagtatggtaacagatgttttatttacgataccttattcacaaatcaacagcaagacatgaattttacaggaaatgaactgatgagtcacagaaagaatcaattcgtctaatcattggaaagctatctgtgaaaataagaaaagcatgggtaaatagaaaaaaattctcagaaattttatactgggacactctctaatatcaccatacttaaaataactgttaaaagaaagtctaattttcatgaatactgagttcaggcctgaatggcttgtcctaaaaactgtttaaaacatggaatttttaaaataagagtatcttactttcagttttattgatgactttggatagactacaggtataaagaatttgaagcaaatataaaatgtagaggatgtcttgtttcaaccatggcattgctctcttactgaagaattttttccctacacattcaactacaatatagtttgtcatttgcagttgattcatgctaattctgttaaaattaggtagtttgtgttagtatatatttgtcaatctaatgtttggtgtcttcataaagtatgtgattattattattttttgagacggagtctttctctgtcacccaggctggagtgcagtggcacgatctcggctcactgcaacctctgcctcctgggttcaagcaattctcctgactcagcctcctgtgtagctgggattacaggtgcacgccaccatgcctggttaatttttgtattttcagtagagatggggtttcaccatgttggtcaggctggtctcgaactcctgacctcgtgatccacccacctcagcctcccaaagtgctgggatgacaggcgtgagccaccatgcccagccatagtatgtgattattatataaagattgggagagccgggcgtggtggctcacacctgtcatcctagcactttggaaggctgaggcgggtggatcacctgaggttgggagtttgagaccagcccgaccaacacagagaaaccccatctctactaaacatacaaagttagccgggcttggtggcacatgcttgtaatcccagctactccggaggctgaggcaggagaatcgcttgaacccaggaggcggaggttgcggtgagccgagatcatgccattgcactccagcctgggcaacaagagtgaaactccatctcaaaaaaaaaaaaaaagattggaagaaagaatacagtttgtgaaatgagtggatcctactgtaataatcagagttaattctaactagtatttgaaaacacatttatttgaacttctttgttgttgcaatgacattttgtcaataatggggttggcgtgtcatttatagtcagaatgcgctttatagtttataaacaattattctctactttgaaatgctcatggccaaagaaaacatatgtgccaacggaatgaaggctacagtcaaaaaagggcacatagaatattgttgttaatgttgtaagtgtattaataattgtggtttgttataatttcaggttttccctccacagctgtcttgcaacagaggtaccactcttatgattt

SEQ ID NO: 586266 - DNA, 4001 bp, Homo sapiens
atgttttttcagttaaatgcatgaggctgaagttctgcaatatgttagcaataaacacaatacagtcagccctctgtattcatgggttccacatctgcagattcaaccaactgtggatcaaaaatattaaaaatactaacaatatagcaataaaaatttaataaaaattcaattcctcctgttctccatcgtgcactatgcttactaaccctttgtctaggtcattgccatcctaaccaggtagagagttgaaggcagaactcgttttatttggccagtattatgtttaataaaatgaacatttatgccttcaggcagtaaacacacagtctagttcacagcagttcctgttcttcattttatcttgttcttggcaccttaaattttgtttaacccctgtatccaaactcctgcagccatttgaatttgccatccctgatttagaacttcagcagaactgcttccctttattctcttcttccccctatcaatcaacgtttctgatgagtgagtgtgtagctaattcgaataagctagggtgggagatgaattctaggttgttgtgcaaagcccatctattcaatcattctgttttttcacactacagtcaatttgttttatactaagacatgttctgcatatttctgaaagtattttctaagattccaatatgaagcttcacaaatagaaaatatttatgagatgagattattacacatatataaaaatagtggattactaaacagtgtattaccaaacaagtttacctacaatttaataaggatttatgtttcaatattaaacacattacacacacacacacacacacacacagttttacttttctcagtattaactaaagtgcaacttcttttataaatgtgcttttacaaaatatactcacttatttcctactcaaaagcatgccaacatgctctttggacataacttaaaacaattatttctactaacatgcatacctgtagacagcttttaatagaatttggtatttatatttaagacagcaatggagtcatgttaaatatacattatacttataacatttcacataaagtcgcatcatatagagttgcagtggttcataattacctttatgtcaaagatacaaaattagcagttaccatgaaatataaagcaggtaaatacaaagcaaaaaaagagaagttagaatcaatcaaaatgagaaggcatattctttggactacttgtacctttttaattgtcttctggataagcaggtctccaactggcattagaatacctccaaacacagccaggacagcaccaatgacagccccagcgatgagcccacagttccggtcacagcccatttttcttgttcaggaggtgaattagtgttaagcacctgtttcttgcaaactcctggatatgattaaagtggtttctacaagctctggttctatcattagaaagagatcataaaacagaagcttaaatatcagtacaaaaagatcaaagtacaaagaaaacacccactgaaacgtatcattttgcccgttctaaataaacaaatgcttttctttttgtttcaccaaagtggcttcctcggtccgtctcccttttcttgcttctaatgcctaccagtggcagaactaataatgtcatatctgaatttcttcatattcctcctttttaattttctttctacacatgattaacatattgaaatcttatctaaggagaactctcaccctcatctctcttcccttgtctcagcaacttagttgcatcctcactatctggtttctccacccaacacaaccttccacaccccttctggagctctcctgcgaacagaatgtgggttgactgatgtgttttccattaaatgataagcaagtatggtaacagatgttttatttacgataccttattcacaaatcaacagcaagacatgaattttacaggaaatgaactgatgagtcacagaaagaatcaattcgtctaatcattggaaagctatctgtgaaaataagaaaagcatgggtaaatagaaaaaaattctcagaaattttatactgggacactctctaatatcaccatacttaaaataactgttaaaagaaagtctaattttcatgaatactgagttcaggcctgaatggcttgtcctaaaaactgtttaaaacatggaatttttaaaataagagtatcttactttcagttttattgatgactttggatagactacaggtataaagaatttgaagcaaatataaaatgtagaggatgtcttgtttcaaccatggcattgctctcttactgaagaattttttccctacacattcaactacaatatagtttgtcatttgcagttgattcatgctaattctgttaaaattaggtagtttgtgttagtatatatttgtcaatctaatgtttggtgtcttcataaagtatgtgattattattattttttgagacggagtctttctctgtcacccaggctggagtgcagtggcacgatctcggctcactgcaacctctgcctcctgggttcaagcaattctcctgactcagcctcctgtgtagctgggattacaggtgcacgccaccatgcctggttaatttttgtattttcagtagagatggggtttcaccatgttggtcaggctggtctcgaactcctgacctcgtgatccacccacctcagcctcccaaagtgctgggatgacaggcgtgagccaccatgcccagccatagtatgtgattattatataaagattgggagagccgggcgtggtggctcacacctgtcatcctagcactttggaaggctgaggcgggtggatcacctgaggttgggagtttgagaccagcccgaccaacacagagaaaccccatctctactaaacatacaaagttagccgggcttggtggcacatgcttgtaatcccagctactccggaggctgaggcaggagaatcgcttgaacccaggaggcggaggttgcggtgagccgagatcatgccattgcactccagcctgggcaacaagagtgaaactccatctcaaaaaaaaaaaaaaagattggaagaaagaatacagtttgtgaaatgagtggatcctactgtaataatcagagttaattctaactagtatttgaaaacacatttatttgaacttctttgttgttgcaatgacattttgtcaataatggggttggcgtgtcatttatagtcagaatgcgctttatagtttataaacaattattctctactttgaaatgctcatggccaaagaaaacatatgtgccaacggaatgaaggctacagtcaaaaaagggcacatagaatattgttgttaatgttgtaagtgtattaataattgtggtttgttataatttcaggttttccctccacagctgtcttgcaacagaggtaccactcttatgattttattagtatttacttccactttagtaatcatatagtttttcaaaaatattacctgtagagctaagaaaagaataagaaaatgatattttcccccaaaatgtaggaataaatgttacaaatatttttcttggcaattttattatttacatatgttcccttaacctttgggattcccctttgcctattcccttatacataggatactttccagtataaaccataggatgcaataaacttcatttacatcaaggtcttggtgattaagaagactgactagttctttagtgtcatttttctccaatgtaaagggaatgcacataagtctaaacaagtgatttgtttttcctgtggaattttctgtctcactgagcaagtagggctggctttttattaattgttcagggtggagtggtaacaatagctttccctgcccttggaaatcgtataccatgctacctcatatggctttgtccatggctgtcctaatgcaatggaatgagtaatttaatgctggtaatcaggactggatattgtcaaatagaatttcctttgcaatgcata

SEQ ID NO: 586267 - DNA, 4001 bp, Homo sapiens
gattgaaccactgtggattagacatgactgaggattctagtcacatgatatggaaacccaacctcattcccctcctctagtacctcctcttgctcctcacaggtggcaataaagtaacctgttgtgaagcgcgttgcacacacttcacaatttttatctgaagtgcacttcactcattttatagcatttctttatttttcaaaacaatttaacctgaagctttgtttgtaaatactaagaatatcagattaaattccttaagtagtcatcttaatcagtaatttgtgccaaaagcaaaatgagccgcagtcacatcaagaactttatatttctttgctctgaaacatttccttccatttaatcatcccactctacaaccttaagcagtctttttcaatcatttctcagcagtttaaaactctttttttttttttttttgcctgactgtaattcttgagttccagagcttatcttttccccaggtgaaaactgttttattatcctcaggtgttagctttcttgaactcttagaacagttaattacacagttatcattatcctttacaaaagtatcagattccaaataattagtatttgcatagtacatcatttgaaaatatttttcctttcctcttgtcaggattacagaagtctcatatattgccccacaaatccacttttattatttagtcagttacacctgaaaacaagataggttgcctatttctctttgagatagagatcccatctgaattgtgagttctctcaaggagtgtcaacaagtttacccctttggaagtattagccttaaatggttccccagaattcagtctagcaccaaccaaccattccccaaataataaaagaaagtgaccttttttgtaaaggcaaagaagcctatctaattcttttccagggcttgtagaatagcagaatagcatggagaaacagaaggaactgcttttctttttttgtatcaaccttaattgtgtctcgaaatatgcataacttaagttgactttctgtataagtaacgactctgtcattcctggcggtgttgtctgatcttatgtagccatattatgaaacacaccatataataaaaattctgctatgtaacaaaatctgcccccaccccacaaataagacatgtggcacccacactcaagaaaatttctatgatcactaatgattagtaagttttatgtataaaaagatttttgttttcttctgtctaggagtcaaattgttaagattggtcttttaggttatttcttaaatatatttgtcagttgtgacagcaagccaaaaaacattttcagagttccatgaaagaaggtcattcaaattctagtctcattttaaatacatattttttccaagttggaagaggataatcaaattggccagatttttagagcatccttctgaaaagattaatcttaaaaacctatcagaaaacataaataagaaatctgaaggaaaagaagtttcaggtacaattacactttttgaagtcacgagaagtttgggttttctgacgttttctaagtaaaagacatgaactaggcaactagaaatccatagcatcctatggaatttagagacttgtggatatgtgaggtttaagggttaaaaagcaaatttctttaaccatttggttaaaacttacaaatatgttaaaagaagcatcacagactaaactattatatcagataataattacctttctagagagcccaaaaataatagttacttactagatgagagtgcatcaactacaaagacatttatagccacacttctaaacaaaaagcattctgctcaccaacttctagaagagcttgctttcggagatgtaggacctcaagactggctccagagtcttgcaggagcagatgcagaaagtaaacaggatttccacggcatagcagctgagaactcagaaatgaggcacaggctctcaacccttcatctatccttaaggttatcctgacatctgaaagccattgacatcctcagccttccagctcttcggacgcatgcctaacacaagttaaatatagatccctgacacctgagccaaatggaatgaaagttaacttgaaaaatctcactcattttgggcctcagttgaggaaaataaaacccttaatcctttccctgctaaaacctgttattcctgttaacagatggttgctctacttataaaacatagaaattcaagtaatcagtaatcaataatcaatttgcttcacttcatgattaccatttgctctgatagtaaagaggaaggctcaggttttcctgtcttaagcataaaacaacataaaagtgaatattgattactattgagtcaacaaaacagatttttgttccagtaacttttgttactggaaagtctctgtaaactttcttagtattttttctcctctatgttttcagtagtcatttggtcattttttgtttgcctcatttaatgaggcagaaaatgtcatgcactgccagagttctttggtttaaattattgttttttgaatctttttgaagggttgtagaatgtacttggtttaaaaaatttttgcttgggacttctggtaaacatgaataaagctctactctcagcccaaacagaccctgtgatgaaagttattactctgaagatataatgacaagatttctaaattactttctaggatttatatgttaagaatctctaattctatactaaaacgaagtgaacagagaaactggaaaagtcatatttctctcctgatagttaaatattttcaattaaaatttcttttacagaatcacattaaagggaaatgatagactagagttaccactctttaaatgaaactattctgtatcaagtagtaaccactatccacaaaagaaggttgttttgtcaaatcaccataaccagtattttcatcatattttaataataggtcctatgtactgagcactgctcacgtgcctgaccctttacgacgtagataccatctaattcactctccttttctaatcccaaaataagctttcaaattaatattttaggctcactttccagagaagaaactgcaactaaaaggataagttttgacaatggacacatggtgaataactgattcatttgagagtctaacccacaaaattttgacccacaagcaagttttcttttccatcctacaacatagttacaggctaaaaatgagtttcatccacactttatctgtatcagattagccaccctttgagcaagtccaaagcttttttgcttttttgttgcttaaacaaagttacagaaagcacagaaatggtccctaaagagtattgctatgacaccaggacattcccagaagcattatgtccctaagacaggaaaaagagagaggatccataagccaccactccagccacggagatttctcatttcttgcatttatgcttttcacgttctccttgccagtttgtatgagcagattttgatcttccagatcctggaaggccagccctgatggctacctctcagccagtcagaggtctgatatgtgacagagaaagggacaatcaggtggcaaggagttggccctttaggtcagatggtctttacgtgaaaagtagggtcacatatttccaaatattgtagaatgtgaactttttaattaaggaaaaaaatgttgttccctatgtgtaaaaggtttctctattatttgaactaggaacttttaaacaaattattttatcaaagaagaaggcatgttaaaaattcagtgaacacagctatgcatattttctaggaacacagtaaatatcatagactgcctctgacattgtaagcactgttatcttcaaatatggattatgtcccataagaacaggaaatcctgtatttcctttccacgaatcatatatgcattatcattaaattgtttactccctgctgggcatgagcttatagggataggtggtgagggagagggaaaagttgtggt

SEQ ID NO: 586268 - DNA, 4001 bp, Homo sapiens
taagcatgaattatgaatatcagtagtggaagtgcaaagaactctccagcttaacaacaggagtgacacattccagaaacattttctgattacattcacaaggagctccggagtgataaattccagatacattttctgactaaactcacaaggagctcaaatctccatccagagggtttgttttttgtttttagtcctgtagcaacagaaactcctagaaggttaggacgccagccggaagtggtggctcacgcctgtaatcccagcactttgggaggccgaggcaggtggatcacctgaggtcagcagttcaagaccagactggacaacattgtgaaaccctgtctctactaaaaaaaaaaaaaaaatacaaaaaattagacaggcgtggtggcgggcgcctgtaatcccagctactcgggacgctgaggcaggaaaattgcttgaacccgggaggcgaaggttgcagtgagccgaggtcgcgccattacactccaccccggacaagagcgaaactccgtctccaaaaaaaaaaaaaaaaaaaaaaggatgctaatacacggtaaaagccagtggcaaaaaataaaaaatcgaaccctgtctcattccgtaggctttactgtttcccttgcttttaatagtttatctcacaggaggcattttaaaaatattctcagaaacatcaacaacagatttttctcaagcgaccattttcaggaaggcttcagaaattactaaaaggccaaagctaccgttagtggctcagtctttgccgccagactcgggcaggtgacagcggtttgggctcgggcgccgggcactctgcgccttccaacgctggcggccccgcctccccttctcccgggccaggcacgcaggtggaggaaagtaaacaccagtcggaagcaaggtggaagcagtgagtctcgcgactctcaataaaacaagtggaaaaaaaaaaaaaaacaatcctcgcacaaagcatctccgtgctcccacaagcagaggcgtggctgcttgtttccctttttaaaggttgtatttttagttcttatgaaaaatgtttttattgcttacttctaagtaaacatgtatctccattacgataacgtagagaaaagctcttttaagaagtaaaaagagaaaactgaagtcacgttcacattcccactactcactgaaacgtttgggggaacttactcaagtgtttgctaatgagttttaaagacgagttaggcccttaacgcgtaattggggtcgtgctgtgcatatgatttgggatcttgcagcttgtttaactcggcccaatgacgttaccatttcccccaaatggttactaattccttgaaaacgtttacaaaagttctagaataaacactaaagttattatttttaaactccattatccaagttggactggtctggcgatcgactgttaaaaaaaaaaaattacaactttcttaagcttcctgatctctgtgccaattcccggagaaagtgtggggagtgcacaaaaaaagcccctcccccgtctcacgagggctgcaaacgcaggcgctgcgccccgctagctccccgcctgcacccccggcggccacccgagactgagcagagcgccaggctgagcgcggttgtgtgctggggcgaccggcctctgtggtccgcgtagcacaaacgtgacccactgcgcacacctgcagggcgcgcccactccggcactcaaccggctgggcgcgccagatccccagtgccgcagccaagggccacgtttccagcccaaggccagcaggaccgggtggcaaagggaagtcaaactgtgggtgcgtccggacggcggcgggcggccggaccctcacctggtagcgagtcgccaactccattcttcctaaccgggctccagtctcctcccagcacgcggccacgggagcccggactcaccacggcccggcgcaccaagaacgccccgcgcccgagcagctagcgcgctccgcccggagcacaggcgggccccgggaggggcgcacttgacgccctggacagggggagcgcgttgcgctgccccctcggtgccgcctcactgggcctcgtggctccgatcacgttccaacttcgcggccactgaccttgtcttcgcaggcggcgcgagagggggctgcagttgggcgcggcaagagcaattaccagtgttagggcgccgggctcccccctgcagcagagggagggagtggagccgtccggcggggtttagcgcgggagaaatgagggggctgtcccggcgcagcctccagctggcacgcgcgctggatacttggcagggtttattccaggtcatgccctggggcgcgagcttctgctgcaacccctgtctctgatccaggcaaatattgtagggcggctttggggcttgttttgttttgttgttgtaacggggcagggttctctttgggaagattctgtctcccaaaacatttgctacagggttcactttgcagaacaggcaacccaggtttctttaccaaggcccaggtggacagatgcaaacccgcctgaaactttagacggccattacacagtaggcctccacacccaccagacaaagagtttgtagaggtcaggaatgctgactaatttaacagaattgaccccggcatctactaagcatcaggcactgggctagtcctaggaacagaagggtgaacaaaaacaggcccctgctctgttggagtttacagcctgagagccagttaccaacctaattgcattattctaaataaatacaataatgatgcaaataagtgtaataacgatgtaaattttataaattagatttataattaatattaatttgataccactatcaatgacaaatgtaatgatgatgcaaataaatgtaaatttggagcgatgatgccatgagaaaaaaggcaagtggtattaatggtggtgtgaaataggaagacaatctgatagaggtcagggaatacttcttagagttcagatatgaagagtgaggaattaagtttgtggaaattgtgggagagttgaagtagagagtggggagaatggtaaatgaagttgtcctgaaatcacagcaggtttgctggacagtgttgcacacctatttagaaccgtggtcataggtttacagtagagcatcctgtacgcataggaccttctgcagcccctctcagctgcttaggatctgacgttcatcttttctttattgaacgagtgaatgaaatttgccaaacatttactcaagcttgaagagaaaacatggaaaaggtttccttccttcctttggttagttcagcaaacaacatgtgttatgtgctttcatgttccagccctcagtgttctcacttcctggtggtagtaaaaccaatacaacattgtgtgacttaaaatgttttgtttttattggataatgttatttattcattatggccacttcatttttattatgctttagagttttccttcacatgcagtatctccttgaatcctctcaatatccttccagatccttattgtccacatttttaaaataaggaaacagaatctaagaaaatacattaagagatccctgccaccctgccactaagtgacagcagcagactgccaaactgaaaaccattccttatgcctccagatccaacattctttccatttttctgtattttttccctttggctgccaggaagcttagagtgaaaattaattcaatcagagctcttcttcctctttttttttttttagatagttgcttcctcatgaactgctgatcttgtttgcacttcttttcattgtaggttaaatcaaatcaattttggaaaagggagcacaaatttgaagcaggtcagattttgcaaaacacttgaagcagcctagactagctacttctgtatcaggaaacctgtaagctgttgaacctttctgtttagaaatttgccataactaaccctaagtcttcagatgacaacccctaaattttcttcctg

SEQ ID NO: 586269 - DNA, 4001 bp, Homo sapiens
gagtgtgagggtaatgaccaggttctcagactcacaaaagaaacagtttgtgtcacagtagcccttccaaaaacaagatttgacctaagggattctattgtgtgttttaaataagaaatctcaagtatttcttgcaaacctttgtgatctatccctttcacacttctgataaaattccaaatgatagtgttcagtataagaaattgggttcttcctaacctcactctttccccagtgacaataaaagtcacctcgactcaaatgattgtggccctaaaagcccatatttctgggggaaatctgaaatgtttacttcaagtgacagtctgaactgctcatggcccacttcacattcacaggtcatcctgccctctgctgagttgaaaagcccaagatagaagagggctcaatattaggaaacccagttatttatttatcttattagcagatcgaagaggaaaattaaatggtcattttcatagatcttgaaaaagcgtttgatttaaaaatccatttttatttagaaataagtacttgaatattcttacatttagttttattatatttttatttagaaataaatactgtaatattcttatattaataagaataaaagccacctccttaacatataaaacatttctctctcacaccaaaagttaacatcatgcttaatgggaaacaagacaggaatttacactcttgtcattatttaataatggtcagaatgtccaggcctggcagttagataagaaaaaaataggagctatagacataggagaagaagaatataaatgttcattttttcaaacgtggaaaattcatgagaatcacctgaaaaaccatgccaaataataagataatttgttaacagatttccatacatcatacaataatcagttgaaagatgtagggaagaagagattccatttacaaatgtaaaaaaagaaaaagtaaaagaactagaaataaccataataagaatgtaccaaatctatatgaaggaaacctcaaaatactcctaagaaaaacaaatgaagactcaaacaagtatctagaaccctgttcttggattaggaagactcaagatcataaataatactcactaacatttactaagcatttactatgtactcagacactcttctaagtattttactacataacttgtcaaagatgtaaattatccctaaattaatttgcaaatttaacataaattcaatatattatgcatatactacctattcagaaataaaatttaattttaaaatctcaatttcaataatccaagctgacattaaaaagatcatctaagattcttgatgcccttgaatgaggaagagagagtaaaatgatcactagcttgagtctttgacccttctatcagaaggtgttttctttgctcaagaggaagacaccccctcagtaactcactttcctcaaaggatcacttgtcaacctcaagttgccctacgagcctccagaaaagggccagaatctccacaaagactcacttgacatactcacaaagctctgctatgaacactattttcccaaccttaaatctcaggaggactaccaaatgcaggccagttaacccaagagggaaagtgaagtctacaccaacatagattagattaggctctttaagcatctctcttttccagggctcctacctggtcccccagggctccctggagcggcatcacctcattcattactgcagctaagccctcaattgaacaagcctcccaggggcaatttcctttctgggggacattgtcattcaatggtattatgcagaccaagtaggcaagcaaggttccaaagcaaaattgagttcctacctgacatggcacccaggagagccaggagaatgattgcttcctgcatacttgatggtcacaactgtgcgtgcttccagcacattagccacagcctgaatcccgtctcacacccaaagtttattccagaagccactcagcttcccctcctggttttgttgccatgcaagaaatcaaacagaggctttggcggtagccaagggagactccaaacaccacaggactgtttgttctttgattacctgcttctgtgactgcatagcacccaagagaccaaccagccagtcctggtcagctcagagtttaccttaaaagtccacactcaccaagtgtctcaaccaagagctccaaaagagaagtcaaaagagaaaaccgagacacggagaccacactaagagctggacgtgcgtagtccacccatgatggtctcggtcgccctgtagccaggcttgtggtcatttccagaaacaggggtgggaagtgggagtttttctgctgtcctgaatcaatgagtaggattcagacttgggaattaactggcactcgttctaaagacaagatctgagagctgggagcagacccctcctcgaggctgacttgaggtggaagactgccctctgactccaccccccaccaccgcccctccagccctcgaagaaggctgtgaaggaaggttactggagtggtgaggcttctgcccactggggagtgatgcaggtcttgcccttcacgatgcctttctgttccacacagccctgtgccagggcacaagatgtggcatgtgaacaaacgcgggctggggtctagtctccactgagaaggagcaacagcagagcagagagagaacggccgagcagtggcctgtccccttgacatggtgcagtaagagaagtagtgggcacagtggaaggcagctgggcttggaccacctctcccattcctctgccagctaggggaggagaggccagcagcccaaggctgggggcaggaatgcagtgaagaaggtggggagttgagtcagagcctcccagtctggacgagaccccacaggcgctctgaaaactacacatgccccacaggtgaaccagcttttagcacctgctacacggaggtcaccaacgagggatagagggagacagtgttatggaaccaaactgggtccactcaccctgtgcagtaaaaccggatatccacaccgaggtttttgcagcaatagaaaggaaggcatttatttgcaagggtgccaagcaagaagggctcagagagtgaggggtttgacccaggctgcgccacctgccagtgtcccctgtgtcccctgcgtcccaaacctagggtggcaaggctgcccttcccttccaccacatccaaacatttgacaagccctttccagcctccagggcctgctgccgggccccttcccatgcttgttgctactgccctggcttaaggtccttgcctctggcctgggctctggcccgcagcacatcctacagaaacttaggttaatttccccaaagtacaattttggtcatttactttcctgctcaaaataacaagaacctttcccttaagaaaagttgacttttcttgtgtaaagcatgaaggaaaggtagtaagattaggaaagctagtcgataggtctctgttcgaagcacatagatagtaacaacaacaacaaaacaaaagggagtgttgctgtgtcacctttggcaatttacctaacctttcagaatctcagttccactcacttctgtaaatcagggaaaataatacctgctacacagtatcatcgcaagcgatacacaagagaaagaagtgaaagaaactggcccatactatgtgttttaaaaatactttttttttttttttttttttttttggagacaggatctcactgtcactctgtctcccaggctagagtgtagcagcgcgatcatagctcattacagcctcaatctcctggactcaagcaatccgcccacctcagcctctggagcagctgggaccacaggcgtgcaccaccacaccaggctaattaaaaaaattttttttttagagaggacgtctccctatgttgcccaaactggtctcaaacttctgggctcaagcgattctcccacctccgcctcccgaagtgttgatattacaggcatgtgc

SEQ ID NO: 586270 - DNA, 4001 bp, Homo sapiens
catttctgtaataatcataagaaacatctgcaatccacatctaactctgacatcagtacctgattcttattcccctgtacaatactagatcttaagttgcagtccattcctaaattcccaacaatgaaacctcttcacagaactttcaaaattaagacttaaaccacctctaggtttacccaaattgtaccagaaaagcaaagagcaactgagagaaacctgttaacacattaatgcaacaagtctgaaacttttaattcttccttagaaatcttccctgccacagctaggagaaaagttcccttcgcccagttgctttgtcccttcgaccccctaaaaaagtgtcacgcgcgcgaaaacgcctatccttcctgggaggctcaggcggtgttgtctcgtctcggtggtggacctgagtcgttctgaggacccgggcaccactttcccttcctcctggggatctggccagcgcagccaaggcacacacaggcagaacggcagaactcacctgagcacagggctgtagggactgcgagagcggcgccagctgctgctgctgtagggactaggggacacgtcgccgccccgctcgtaggagctgtggcggctgtagctgggggagcggcggcgactgtaggggctcggggagcgcggcagccgccgagaataggggctgctgccacctcctgccgggctgggggacttgcggctcctcaggctctgagaggccctgtgggacaccgggctgtcgtcccggcctcccagtgggctgagggaccgccgccgcctgtaggccttaggctcggtcttgtcctcccggtaggccttgggcggttccttgtaggccgaaggcggctccttggacgacttagtccggctgcggtgggccttcgagtcccggtccttgcggctgctactgctgctggatgtggccgaagcgcttttccggcggccgccgctgctgctgctgctgccgctcttggcgacctcggcccgttcctcgccgctgtggctgtggcggctgcgggacttggaggcctcgctgccaccgcgctgcccatcccgccgccggtgctcgcggtggcgctccttgctgcggccactgctgctgcggcggtcccggcggggcctgcgctccgacccctccccgcgccgctgggtgccggaggaggaggccggactcccgccgctgccccccgttcccccggcagccgtcgccgccgttgccgcgctggccccccccagcagcagcccctgctcggactgggagctcacatcctcgtattccaccagcggggtcacacccccgccgctactagcaccgccaccgccgtcctgctgcggctggggcagcgagaagacccgacgcttctccgcctcctgcccggcgcggggcccgcgacgccgcttctgccgccctcctgcgcgcctcttgcctctcgccagccgcttgacctccagaggggggcccgggctgaagcaagaggaggaggccgcggcggcggcggctgcggcggcggccgtgccgggagcagccaggaagagcagaggcggcgggggcggcggcggttgcaggagctgcggctgcaggagcggcaacagcagcggcggctgctgaggggacaggaatcgcctccgcttgcggcgttcctccaacttcttctccgcccagctcaggcccccgcctccccccagcgccgtgtccgagctgctcggcatcgcctagagccagccgcagagcgcggcgcgggtgcggcctcctcccgggtcagatcctggccatctcccccgccggaaacgggagcggcggcggagggacaccgagcaccagagccggccgggaaaagcgccacgataatccgggtcgggactcgggtccctgggttccaggtcacagtggggtacgcagcagcctccgggccccagggaagcaggaatccgggcggcggagctcccgattgcgctcgtcgtcctatcctcggcagcgaaaacaccagatgcgccgggcgctgacctgcgggggagtcccgagtcctccaagtgcccccgggggtgggggagcggccttggccgcgctctcggctcgggcagcgcaacgcggaagtaccaccttcgtcgccgcttcactccatcgcgccctgacgttgggtgcaagttcaggggaggggagtgggcgagacaacaacacgcctccaccgcctcctcctcggcgtcgacgtcgtcctcctgtggtggcggcgacacaccgcaggcgcctcggaagtggcctgggcctgacaacaactcccggcctagggcctcgcgcactctgcggcccgcggggctgggcagcggggcggggcgaggcgggggcgaccgggctgcggctctcggttggggcagcgactgtgcggggctgggcggggggctatttccggggagatgggggcaggggcgtttctgagtctgtggcggtaggtacgggccctgactttcttcttctttcgccgccgccgccgccgccagcagaggtggcggagctacccctttcctccgctccccccctccacgaggaggctcctggtgtgcgcggcctgccccggctcgctcctccccttccctctccgctcctcgtcaggaggagggagagcaacgggacttgctggttgggccctaacctccacaacccctccttctcgcctcgctctttcggcttttcccctcagccctgacgtacgaccgggagcgcgcccgcaattcacgctcagagaaagccgaagatgagaggtggccggggcaagagaggcgggaacaaagttaccgcgcactggcgtgctcgctcccgccaggggccggcaggccgcaccggaagtggcatgatgtagaaaccgctcggcttccggcgagggtgggactccgtgtgaagaagggttaaagaaaggagaggattcgtgtgccgcccactgctgttgcttgagactctgcccgtggtggcgcgcctgtcgtgcttgttgcttgcgtccagcgcgcagtgccggttccggctctgcagacgccgcactgcctgcctgttgagcgaaaggtcacagtgagaacaagtgtttctggagactgcgagggaaataatgctgttggtggccttctggagtaggcagttaccccccgtgtaccttcagtcaagccctgggagtggaacagctgcgaaaggagagaaaacaccccgcaaaacagggtggagatggcgttggtttaacttgtctcacgtacgccaaagttcgaggccccattttttttttttttttttttgagactgagtttcgctctcgttgcccaggctggagtgcaatggtgcgatctcggctcaccgcaacttccgcgaggccccttcttatcctaaaaaacacacttgggaatcacagctcaagcttcggtaacactatttactttaaaataaaaatttttaaagctttaaatcaatacaggaaataagtggaatgttaaaaggaactactgaaaattccaaattctcaggaggcttgaaataaaaacatcttgtgcgaatgaggactgccctcttagtacttcacccactttcaccttcatatctaaacctttggggttgccaaacatagccatatagtgacctcacatctcatttcttgccttagaattgcccttcagttacagactaagcactcgggataattagattaaaatgtaaatggcttattggcttttagaatggttggaaacgcaagctaaccctgtgcagtggcacacgcctgtagtcccagctactccggaggctgaggcaggaggatctctggagctcaagagttcgaggctggagtgagccatgaccgtgccacagcaccccagcctggccaatcagcagggcgaggccctgcctctaataaaagaaaaagctaagccgtctgttcaatgactaaatgtagtaacccctttgaaaattcatttgttcagatcatcagttggtttagttcttaaacacttggtatcta

SEQ ID NO: 586271 - DNA, 4001 bp, Homo sapiens
agaaaatccaattaactataatacccccatttgccagcactgtacttaatccaaattttactgattgtcgatcaaaaccttgaaattatttaaatataaggaacttttagattaatgtccttggtttcttactgagactcaattgcaatgaattatttaacacaaaactggaggggctccagcagaatcattagcattagtaaatatatagttaatgtgttttagaacacggcttaatggactccagaacccgcctctgcgacggtttgggtcagggttgaaacatcctcgttaataatgcacacgactcaacatttccctctctcacactcttcttggcttcaaacttcatcttaatgcagggactctccacatgtatccctaattctgaagagtgaaattaatatccaatacatgcaataaataaaactaaagattggtttcataccataactttacagtcatctggggaaagattttgcataccaacacaaaattttaagtcgaaagacaaaaaaaaaaaaaaaaacttggctaaatttcgatccattgtactctctcacttgaagaaagtttgcatatcttacaatgaatgggtggaaggatatctgtaacactcatgtgcatcccagggttttattttaaggaattaagtacctttatgtttaatttccattaacactttcgttaacatggatgacatttaaaacaagtgaaacaaagactaggcagcttcctagggactcgcaggggttatcttttgtgtctatagcattctcttgctcagggcagttacatgttattagtgaaagttgtgacagtaggggaggcagctaactcttcaggttaaaaggggttttctatgcccagtactcaaaatctaacaaacccattccacgtgatactgctgtcaccctattacaacctgtgacatgcatttattcgtcactgtcctaaacactgttggtcagttggtttgttgtttggtttaaagacaacagcccctgagctctattaaatggaacaagttcgagagacattcctaaatgtccagacaactccacagcgcgcatttctctccagcagcgggaagattcagagacctcgagactgaacacccaaatctcgctttccaggacccgaagtaccgaacaataggtcccaaggtaactgtcccacttccctttaggttggatacgttaaacaataccagggcacagtctaacgtttcaccaatttccaaagctaaattactgactaaacgcccaatatccaagcctgtgcgcaaaaaataacaagtggcccaagcagccgcgcagccccttgcgcggtgggggccgaggggtcccctcgcccgtcccccacgcgcgcgaaagggcgagcactagtggcggaggaggggagaacccatattgtaggcttgagagaatctacaaatgaacccccagatcctgaggaagaggggtctctttcctttacgtccttgccctcccccgggtccctagcactgtgccctcgatccccgcctacaacgcaccccacgccagccccgctggcagctgcatggctggtgccaggaacgcggcgggggcgcaggccgaggggagcgggcgctgggggggccgggggcagcgcgctactcaccaatgcgactgaaactctccgacaaagttctccgcaacttcttcatcttgccgatcttctcggccggctgcggctcaatgaggtcacacatctgggcgacgcggagccccgacaacttccccaaactggtccaggcacagctcagacaacggcgagggcgcgcgccgcggggaaagcggcgcctcctcctccaccacctcctcggcgggccgggaagcgacgcgcaggtctagggaggcgagcagcaggcaggcggaggacggcaggctccgctccggcctgggccgcagctgggcgggcgggggcggtttacgtggtgccgggggcggccgcgctcgccgccgccgtggtggccccgcgccgcgccgccgccgcccggctcattttccctcctttgtaacggagagaagcgcggccggcagggggagtggtgcggccgaaggaggaggcggggcgggccgggtacaaggtgcgggagtcgcctggcgccgagtgcgcggggcgagggcgagtgggccggcgggagaagttctcagcccagagttgcgggcgcagcgcagaaggagccgcggcgcggaaccgccagcctgacagctcctgctgccctcctgctgccgccgccacgcccctccctcgacgaaggcccctgggcgcgggatcctagcacgacctcggctccccgctcgcctcccgcgtcctccgcggccctctgtgtctggctcgcgccccggcggcgccccctcccggccgcgcccctcccggccgcccccgcgctcctcccccgccccgcccgcgcgcgggaggatcacgaagggaccggggtgggagcgggcagcgtctggggacagcgtgttgggctgtggggaggttaccgaaaggaaacgggccgagtccagttgtttgagcggttttctccttccacgagcgtgtgtgaaaaagcgcggagttcggtggagggcagctgccaggactgcctcctggactgggtgcggtaaggccttagggatgcattcagatgtagggtgccttattttgggccgagaaagctgtcaagtgaaagatccaaggggaaaggtgggcctggatttttttgttgttgtttgcggtgggttttttgtttgttttgaggtcaagtgcagaagcagcggaagcttcaactgtaaccctccagaaggcagggatcatgctgtttccctcatccttgtctctgatcttggtgacacatgtaggtgatttctgataggaatacccagttctgcagtaaatagcagacacagcccttggtctttttctattaaattcttagaatatatttctgaattgggagatttaaaggctaaacagattccgacctccttttcccccacctcaaaaacagaactttaaaaaggagtgggggaggtgtttataaaatcccaggacaaacagttccagcagcgaacacacatcgtcttcattctgaaaaaacctggtgcggcgtgagttccaaacgtcagtctcccaggggagagagaaggaaggtgggggagggcttgattgtgttgatctgaggccagcaaactccttatgaatagaaacgttagtaatcttgagtcatttggctgtgtaagtaataagagcttgtgagggtgtgacaatgctgtttggcttgtaggaaattttggggagtttatgttttgttaaaagatttttatcttaaaaactagccccctgccttccttaaattgtgaggtaaaacagtgatttgttccgccctacactgagcacattgtaggatcttgatagattgcggatgataaaagacaggaagtcaagctaagtggggagcagaggggggcaaggaattcgccaggaaagaccatatgagttaaaacgcaaagctgttggatcctggctgccatgtctagataattacagacagcaccaagggtggcctcataccggaaaaaagtttgacttttaccacttcctcaggttagttagggagaaagttttcagcagttatgaatgaaaagacaaatgcaaccaatcaaaacactaatgggttgtacgagtcaacaaacacgaagaaatattaatttaacgaactttcactattatacacctgtgactgttatccactgtgacaatggctgtttcaaatatataatatgttaaatatatgtttattttaccttcgcagtatttttttttttttttccgagacagggcctgtcgcccaggctggagtgcagtggcgccatctcggctgactgcaaccttctctcctgggctcaagccatcctcccacctcagcctcctaaatagctgggactacgggtgcgcaccaccacgcctggctaatttttgtagaaacg

SEQ ID NO: 586272 - DNA, 4001 bp, Homo sapiens
actccaaaaatgtttaaccaaaaaatgcttttttaaaaggagaggattaaaaagcaccaaactgactatccatgagaaagtataatggggcgtattccaggggaaaatactaacacaactatatctaagcttcttcaggaaaatgtactgtttcatccatacttcctttacagcaggtcttacaatgttttacacatagtgggtggctaatcaatatttgcagaatgagagaaatatcgtatgattgtaaaatcagtcacgttattgctctactttttaaaaattacttttcgcaaacttacaattccttctgtcacaggatgaaaaaaaaatcctcacaactcacacaaagtaaaggtaaaaatatgaatagctaaaacacaagattctcagaaaaagaaacagtaaacacagggcgcatcatcttccaaacagaaaaaaaaagtttaaaaaaaaagagaggtaaatttgatctatctttggaagaaaatccaaatattcactcccaacaatcaatgtccaacctcaacagtaaatagttgagtgaatacagaagcactgcaccatttaaagaaatttactcatagtgaaccacaacagttacccatatttctctcaattagcctatcaactaatcaggcgatctttcttaaatttacttatgtcacaaaattatacagaactggctacatgccagttctgtataatagccaacatgcaagctactgatttttttaacattcaccatctacattttacataaagtactaagttaattaaactatacacaagtggaatatttttaaagcaaaaaatcaaatgctgacatccttaacattcagcacctatataataataggtggatccatataaagtcactaggactaagtaatgttattaatctcactttgaacactattaaaacatgtccttcaagttcaaacccccgccacatcaaatatgtcaactgtgtgacaattaacaaaggaaacaaaaattcagtctctgaagacgtcaaggtttacattcctatctctcaattttatctgctttacaagcaggtaagcctcattggagtaggctgtctgctaccacggtccttcatgaatgcaggggttctccattagcatccaaaatgctaatagtctactattagagctggcacttcacgcagaactgcacgaagaattatcacttctgtacataaaagcataaccactacaggtgtaatgatgcaaaataccagcacactgacctctgctcagcagtacacacttaaagcaggtgtatttctgtgatccaaaaaggaaggaaataggatgagcagggaggaagccccaggtctctaatatattagagatatttattctactcagatccaatccagctaaattcatggacatcagtttactcaaatggaaaaagtagtctctcgtccttcacttgcttgactcagagggcattcagccaagcacagccaggcaaaaaaaaatgtaagatctctttcagctgtaataaataaagactagtttcagaaggaataagactcagatatggcaaagaagcagtcgttaaaccttttccccatcttatcactgctactggtgtttacaaactacaagcagtagcctcgggagcctcaaaagactctcccatgagtaacctccagtcagtctctaatttaaataccccctttatcaatctgtgatgtttctggcagttaaatagaaggaagtgagtaaaatgacatgcataaaatgaatcctttttaagttgtaaatgagtgagtcaggattcagacttgccgagatgctccaaattaaaacccctcctgtaattttaagcatgctctgtcttaccgttttgctgttgtctccctcaggcttgattcacctggaactctttaacatgtctctagcaatgtgtttgcaccaggccaggctcatacagcaactgaattcacatctttctgcactagcaagctgaaatggtacggccgtactacaaccaagagagggggatgcataagcaagcaaaaaaaaaaaagcccagaaatcccctaagagaagctaatctcagtggaataagaccaaaaactgttgagaagaactcaaaggacatgctaacattcagtatcaatagctttaacagctcaattattttctccaaaaaatctaatttttttttccaaacacgatggacttgcctgtggagttcccacgaaggcagagtaaccgggctctgcagcagcattgcagccaaagtaaccgtgcatatgctgtcaaggcaattcacaacacactgtcttttcagaaagatattgatttgcaatgcagggctgcttcagaagaatacagaatgggagccaaacagctaatggtgattgcataggaggaaaaacatttaatcaaggggatgcacctcatcatgctcaattcaattttttaagagcactggagaaagccagtaagtgtcctgagtgacaaccccattaaataataatctgggatcctatagaaggccaagtttcagccaccatcatgcatgctgcaaaagctgctaaaatggtgtctacgtgtatatatttgtcatatgcaaatggagtatgatgagaagtctaaaataaccacgcaccaaatatgtggttaaaaaaaaaaagcacaggtgcagcatatgcagcatacacagaaccaaagtaaaagaatgcatagttatgagcttgcagaatttttggtggacttagagctcataccattctgaaaaataaaataccaaaacaagccagatctcacaacccttaggcaaattgtgccaagtcatgccacaaggtgctaggcggcaaaggaaggatgccagactgctactctcatagcgacccctacaggagagtggttgatccactcttttttaaaggagttcctgtcctcggtacacagaatcacaaaaggacataaattagattaagatacaacaatacaactgagaaataccttaggcaagaaataaaaaaggcatgaaatctaaccttgtaaatattcacgtattttaaaaattacaagaggcggtaactactgtgtcaatgataagtggtcgatattcccaaagctccccaaactagggtatacaatgatgatgagaaacctcaggcaaagtgttttcccttcacatcctaattggtttaaatgaatcatctcttctttctcccacttgcaaactatcttcaccttcatcattttgaatgacactgtgaagataattcaactttgttttcttacaacacaaaagctcatgtaaaatctttttaaaaagttattgttcaaatacaaatattacatactttcatcttcaacaaagtcaaaagagaaagctatctccttaatatctgaaaactattgaattatatgagcatcatttttgcagaatagacttcaacaggtctttcaagaacctgacttttttgtgattggttatccctccagcccacaaagacaccttttccagaaccaacagcacttcttatttgagtcattcaagatttaatcatacaccacctcataaaactctcttgtactgttggcattttccccattttaaggcccttgataaatcacgccaattgcatttttcaaaatttacttaaataccacataatacaatgctaggcatctagcaaatattaaattaacatttaaaaaattaatgaatttcccaactccaaattttagggctaaaggttcttcttaggcaatcccctttcccctaacattcgtacaatgtttgtgttcactaagatatcttgtataaaaaccaacaaacacagtaacatttctcctttaatctttcatctattcattcagcaaacgtgctaatgtgcctagcaatgtgaagagccatgtgctctgcattcaatgaatgccttaagtgattagaaataaagcaagtgattataatacactgaaatgagtattttgagagtgctctattcagtataaataatattc

SEQ ID NO: 586273 - DNA, 4001 bp, Homo sapiens
catcatcttccaaacagaaaaaaaaagtttaaaaaaaaagagaggtaaatttgatctatctttggaagaaaatccaaatattcactcccaacaatcaatgtccaacctcaacagtaaatagttgagtgaatacagaagcactgcaccatttaaagaaatttactcatagtgaaccacaacagttacccatatttctctcaattagcctatcaactaatcaggcgatctttcttaaatttacttatgtcacaaaattatacagaactggctacatgccagttctgtataatagccaacatgcaagctactgatttttttaacattcaccatctacattttacataaagtactaagttaattaaactatacacaagtggaatatttttaaagcaaaaaatcaaatgctgacatccttaacattcagcacctatataataataggtggatccatataaagtcactaggactaagtaatgttattaatctcactttgaacactattaaaacatgtccttcaagttcaaacccccgccacatcaaatatgtcaactgtgtgacaattaacaaaggaaacaaaaattcagtctctgaagacgtcaaggtttacattcctatctctcaattttatctgctttacaagcaggtaagcctcattggagtaggctgtctgctaccacggtccttcatgaatgcaggggttctccattagcatccaaaatgctaatagtctactattagagctggcacttcacgcagaactgcacgaagaattatcacttctgtacataaaagcataaccactacaggtgtaatgatgcaaaataccagcacactgacctctgctcagcagtacacacttaaagcaggtgtatttctgtgatccaaaaaggaaggaaataggatgagcagggaggaagccccaggtctctaatatattagagatatttattctactcagatccaatccagctaaattcatggacatcagtttactcaaatggaaaaagtagtctctcgtccttcacttgcttgactcagagggcattcagccaagcacagccaggcaaaaaaaaatgtaagatctctttcagctgtaataaataaagactagtttcagaaggaataagactcagatatggcaaagaagcagtcgttaaaccttttccccatcttatcactgctactggtgtttacaaactacaagcagtagcctcgggagcctcaaaagactctcccatgagtaacctccagtcagtctctaatttaaataccccctttatcaatctgtgatgtttctggcagttaaatagaaggaagtgagtaaaatgacatgcataaaatgaatcctttttaagttgtaaatgagtgagtcaggattcagacttgccgagatgctccaaattaaaacccctcctgtaattttaagcatgctctgtcttaccgttttgctgttgtctccctcaggcttgattcacctggaactctttaacatgtctctagcaatgtgtttgcaccaggccaggctcatacagcaactgaattcacatctttctgcactagcaagctgaaatggtacggccgtactacaaccaagagagggggatgcataagcaagcaaaaaaaaaaaagcccagaaatcccctaagagaagctaatctcagtggaataagaccaaaaactgttgagaagaactcaaaggacatgctaacattcagtatcaatagctttaacagctcaattattttctccaaaaaatctaatttttttttccaaacacgatggacttgcctgtggagttcccacgaaggcagagtaaccgggctctgcagcagcattgcagccaaagtaaccgtgcatatgctgtcaaggcaattcacaacacactgtcttttcagaaagatattgatttgcaatgcagggctgcttcagaagaatacagaatgggagccaaacagctaatggtgattgcataggaggaaaaacatttaatcaaggggatgcacctcatcatgctcaattcaattttttaagagcactggagaaagccagtaagtgtcctgagtgacaaccccattaaataataatctgggatcctatagaaggccaagtttcagccaccatcatgcatgctgcaaaagctgctaaaatggtgtctacgtgtatatatttgtcatatgcaaatggagtatgatgagaagtctaaaataaccacgcaccaaatatgtggttaaaaaaaaaaagcacaggtgcagcatatgcagcatacacagaaccaaagtaaaagaatgcatagttatgagcttgcagaatttttggtggacttagagctcataccattctgaaaaataaaataccaaaacaagccagatctcacaacccttaggcaaattgtgccaagtcatgccacaaggtgctaggcggcaaaggaaggatgccagactgctactctcatagcgacccctacaggagagtggttgatccactcttttttaaaggagttcctgtcctcggtacacagaatcacaaaaggacataaattagattaagatacaacaatacaactgagaaataccttaggcaagaaataaaaaaggcatgaaatctaaccttgtaaatattcacgtattttaaaaattacaagaggcggtaactactgtgtcaatgataagtggtcgatattcccaaagctccccaaactagggtatacaatgatgatgagaaacctcaggcaaagtgttttcccttcacatcctaattggtttaaatgaatcatctcttctttctcccacttgcaaactatcttcaccttcatcattttgaatgacactgtgaagataattcaactttgttttcttacaacacaaaagctcatgtaaaatctttttaaaaagttattgttcaaatacaaatattacatactttcatcttcaacaaagtcaaaagagaaagctatctccttaatatctgaaaactattgaattatatgagcatcatttttgcagaatagacttcaacaggtctttcaagaacctgacttttttgtgattggttatccctccagcccacaaagacaccttttccagaaccaacagcacttcttatttgagtcattcaagatttaatcatacaccacctcataaaactctcttgtactgttggcattttccccattttaaggcccttgataaatcacgccaattgcatttttcaaaatttacttaaataccacataatacaatgctaggcatctagcaaatattaaattaacatttaaaaaattaatgaatttcccaactccaaattttagggctaaaggttcttcttaggcaatcccctttcccctaacattcgtacaatgtttgtgttcactaagatatcttgtataaaaaccaacaaacacagtaacatttctcctttaatctttcatctattcattcagcaaacgtgctaatgtgcctagcaatgtgaagagccatgtgctctgcattcaatgaatgccttaagtgattagaaataaagcaagtgattataatacactgaaatgagtattttgagagtgctctattcagtataaataatattccttaggtggctcaaaaaaagacttcacagaggaggtaacgtaaagctgaagcttccagtactacccaggagaagaaggacatttggggaatagcatgaagcctgaaactggaagctgtatgaggaaataaccaagccatactcacagtggtcaccactgcgaaggctcagaagaaaggtggctcaatgccagggcagaaagggccctgtaagccatgctaaaaagttgggaattttatcctatatgaagttgccattttatccaatagaaaagccctacaggactagaggcagaagagtggctggatgagatttttcatcttacgacagggtaatggtgtagaaatggattggagaggtgaaggaagggaagtggggaggccacttgggaagctaagctagtgtttcagacaaggccc

SEQ ID NO: 586274 - DNA, 4001 bp, Homo sapiens
tggttcagagtgacaccattcattcgccatccaggacctgctttatactgtgctaggcattagagggaccaaagtaaagaagctggctctggtccccaccttcctggaccatacagcctaatgggccttggcaggtggatcctagatccggcctagatcccagcccatgctgatcttcccttcctggccgcatctgagtatgcacgccgtgaacatcaacataaatatcgtgctgtagtatcattcaggactggctcccctggaacctggaccaaggcatttggtcttgggcctagaaaagcacctggcacacagtgaagcattcagtaagtatgtgttgaatgaatgagtgtatctccttgaacctcattttctcatctctcgagtgtaaataatatcactgacatcagaatgacactgtgcgggtcaaagatgaccacgtgaaaatgctcactaagactggagacccctggaggacagaaacagggttttctcattctctaacaccctagagtgtccctgttcagggcccaaacttagagcccaaggggtgcttacaccgaatgcagactccgaccccagcctgaggggtcccccaacaccactctcctcacctttacaatctcaggatcgaggtcaccattgcaactgtcaaaatacttcttcaggtcctgaaaagggatatgagtgggggaatgggacagagtttaacctcaatctgggcccctataccttcccaaggctactgtcctccaaaccccgcctttcacctggtcacagaattcaaaaaccaaagtcagcttcttgtcgctgtgcaggacgtcatgaagcctagggcaaaagaagggctcagccaggcaggtccgcctgacagacgtccagtgtcagcccccgcctcccccaagcggccacaccggcaaggagcacccgcctcccgcacacctgacgatgttcttgtgcttcagctccttgagtaggcagatctcccggagggcggaactcggcacaccctgcatatgtgagggggccggtgggcagcagtcagatcccacccagcccaggccctcaaacccctccccaggccgtatcccactccccagtcctacctcatcatcgtcatccagcctcacccgtttcagagccacgatctcatgagtctcccggtttttggccttgaacacagttccgtaggtgcctaggggaaggaggtcaggggtcagggtgaggatgcggcactcttccctaagccaggaaatgcctcctgagagaggtgaaggcagcgtctcagtatgcaagggaagggattcagggtgaaggtaggttggtgagctttgtgagtgaggatgtggcaggtggggagggaggagaaggtgcccaccgaggctccaggggctcggcaggaggggcgagtgcggttgccagggcaaggatgtctaaaatgaaggcggtgctccggaagggtctggaaatagtgaggaggggtctgggagaggactgaggggctgcagaaatattgaggttggaggtctgcagcaagaaacgaggctgggggtcggggtgaggttgtccaagtgctgctgaggctggggtgagaaatttcaggaagtgtcgcggttgggaggtcgggtctactgggaacgctaaggttggagtgagagccctgcgggaaatgctaacacggggaagactggtgtctgcacggagtgctgagctagggggccagggctgcagccgctgctgagatcggagcctgtaggcattgctgacggtaagggagccagggcttcaaggaatgccgaaggatctgcagaggagctcttgcaggaacatctcgagattccattaccttccccaatcttttccagtttctcgtatttctgcatcgcggcggccgcggggacccctgcgggccctcggttttaagactctggccccggcgttgcagaggaggcggcacctgagcctccagccccgccccgtctgcccgcgcagggccttctggggcttgtagtcctaaaacgactaggtctccccgcaatgcccgagaccgaggacaagaagactacaacccccagccgtctgcgctcacgctctctgcagcactcgactccagggctccgtttctaccgcggaggcaaaccttggacttcaagtcccaggaagcaacgcgtgtccgttttccgggcgccccgccgcggcgccgtggttcccagtgtgccccgctgttgttattccttttatgtgctcccagccctcttgaaaagggccgctccgggactacgcgttccagaatgcagcggaaatgggggcggagcgctctcggttaggggtttggggtttggcggcctagatcccgggcactggcggcccagcgctgacctggttggtggcattgtgttcccaacggcctcttgacgacctcagcacgggtttccacctctccccaagccacctagtgaccccagaattgactggggaatgcctgtgagcgatgatgacctcacagggaacagctgaccgcagggctgggagaacagctgtgccccttcgaggctggattttagtggagggacacacgccaaagaccccctctctgctgagccccgtttgttgtctcggagcccacccgactctagccgctgaactctgacatgctgaggaaaactgggtggagccctgggggtccccctcagaccccagtctccggaacagggcccactggagtcagccagggtgtggcaggcaggttggttaaccccctccacagacaagaccacagaccgatgctcaacttgcagcagcctctgcctcaccccttaaaggagctgattatagattcccttacgctgcctctctaattgtctcatgattgcattcttgagggctatggaccgagggaaaaggatcccaaacagcactcctcagcaccggaaccagagttgctgctaaacacgtgttaattaactcgtttctatctgaatgcttttgcatacacaagggaaaagaagcaaaaagtgtattccttatctggaagactttgtgatttcgttgggcaaaaaagaactacacacaaaggtcttgaatgataagtgatggctctgcctagggttcggttcagtgtggaggttccattcaagaggaaggaggccagcacagcgaatctctgtccctctctggaagtggagagcctctaacaagttaccctctcccagatcagctcagggtaccgggcggccagcctccagcccctgtcacccttctcacccactcgccacccgtccctcaggggctttcttggaggcacgggggttattgaggggggcaagagaatctcaaccccgatacgtttatgtttcgacttccccgaatttccttgtgcctgcgttttgctgcctgggatccctagcgtgagaagggctcctttacactcagaggtgccgtaatggagccaagggacggcatcctcggggctcccgagccccgagtggagaagcttggggcagagggacggcgggggcggcccctggtgccgggctgtgcctggaagcgcgcccccgccccggcccccgctcccgcctccccacccgcgaaggcgggaccgcgcacggtgcgccggggggcgcgcacgcagggggctggcctgcccgcggcgcgggggaaagttgagttgggagaagttgggagcggcgggggcgcgccccggggtgggcacggggcagtcgtcgggagcgcgcgagtgcgccggaggacggggagagaccccgagacccccggggcacgaagtccagagcgagcgggtaggcggagaggtggtggcgggggacggccagggccgcagagggaggaagggagggggaaggagaggggggaactcgggactcgagcggggagggagtggaagtggaggaaagggcggagactggggcgcggggaaccgcggtcttggggagaaggatggggaggcggatggagtgctggtcggaagcgggcattccggggtc

SEQ ID NO: 586275 - DNA, 4001 bp, Homo sapiens
agttttaaactgatttcgacctgagcaaaactcaacctccctttcaaagggtggggggtggggggttaaatcctgcgcctccaggggtgagagagaaggtctctgtcctcggggcccggactcgcgaaccttttcccattcccaggacctccccgctgtaggtagcagaggtggctgccccattccccctccggctaaaggcccggtccagtctgcagccggacgcccccggagccctctgcacaacaaagcgccagagtagggtaccctaactttccctccccattcagcagctatctgggacctagggggcctccctcctccagggccgccgcggcctcggcaggactttcaccacgacggccgcatgtccggaattcccggggcacctcggaattacctgcctcgcaaccgctggcccgctcgccttttgccaggaattaaacaaacggcgcgacccccacgatgagcgggtggagcggaccgcggcgagagcagagcttctggcactcactacattcagaactttccttaaaagccgaggaaagagcccccagggactgcccgggggtctgagccaggtcgagggccacacaggtagccggggagccgccgccggccgcccaacccgcctgtcctgcatccccccaaccccctcccgctcgagtctagccccgggctccgcagcgaaggaagcgtcggggacgtcccacccccgcagggaactgcgcctgctgcccccgccgggccccgcactgccctggctctccccccactcgccccccagacggtcggcttcggcggagagaaacgggagcagcaatgccttttccccccctctcctccacttttttttgttgttgttgttgctttcccacgctggctgaatgtgacttgaccccatttcaaaaaaagtttgacatagtgcttcaacatttccgcattcctccgcgactacaaaggctgcagccgcctccttctgctttctgtctctgctctctgtcttcacactcaatgaaatccttcatgcgcctctcccgaagcctgccaagcaccacaagggtcgccaccagcacagcgacaagaggccacaccggggaccgcgactcccgcgtgtgcgcacacgcagatgcgcccatatgcacacggacgggcgcgctgcggggaccagggctgctcactgcggggcgtgtgtttaactccaatattttaaattataaaagtaaacttggaaactacagcaaacgtgcgtcttcgcggggctccaagcctgggcactggccggctgcgtgcacttttctgtgtataacacgcccgcaggaagcctgcgttaacatttatctcgtggaggggaaggtggagcccacacccacacctcagcgagctggagagggagttttcgagggggaaatgcaagcacattctccagcatggagtccctagaggcagtgcattttaaaccctaaatgtgaattattatgtgagtgtccgagtagagttccagttccgtttggagaaactgtatgaggcgtgttccgtgtgggtgtgtgtgcgtacggatacgtggaagcaggatctcggtgtcgcgggtgtccctaggctgggatctccccctctcatcagataaggagaatcctctagctccccaaaactggcccccataaccaatcccgtctcagttcgtaaggggttaaccaaagccgattccaaggaaacacaggtcccccccaccccccgccaccctccacttaccccacccacagttctgcctcggaccccggccaatcccccagatctcccccgggaccccccaccccgcagcccacccacccgagcgcacagctcctcacctgaggggcccagtcgcgtcgggcctcccgagggggctgcgagtgtcagtcggctctccgcacgtgtccgcggcctcgcggagcaggtaatcagactctggggaaggagttaccagcactctctccggcgagggggtgggcacagcggcggagggcggagggacggcggagggcgccgcccgcgccgctcgctgggggcggacgggggccgctgggctccggccggcgctgggggccccagccggggaggcagctggggcgaccgtgcggggtgggggcagggacccgcgaagccaactctgccggagacccaccccccggcggggctgggggctcgtggcgcagtggcaagaaagtgtgcaaattaaagccttccggagagaaatgaggcggccgagtcccggcagtgctccgagctccgggctccctagctcccttctacgagtcgggggctagaagggcgcggtgggggtgggggtgggggggagagttaaatgaaaatttccggctttcgctgaaactgtagtagggggatcctgcgactaaaataagcggcattagtgggagagagtgggacgtgtcgtcgggagtcggcggagtttccaaacccagggtcgcccagagttggggttttgacagggtgaagcggggggcatcctcactgtgtgacgtggacggatgggaaaaacacaaaacaaccaacaataattatgagcggccaatgggggtggtaaataccaatactttccaagaaactgaaaaatcagaccaaaaaataactcttctcttaaaaaaataaagaaaaagtttggcaggatgccttgcagaaaagaaaatactaatctatccaagcacttttcactttcagcatgagctacatttgttttgttttccttcgcttcctttctgcctcacaaagccctatcttttccttttagacagaggatatggtttggaaattgtcaggcactcttatggttaacgatctacttgaaggggctggcgggctcacaattattaagtggttagtaactgctgagggttcactaacgtatttcagaggagctaaaaagactaaaatttagtgtaaataatagaactgcagatagtagatacatacacaaaaagaggagtgctcagtttaaatgcattattggaaatctgaaatttgaaaccttgtaagaatgtatactttacctgctgagaaacccttgaatacaattatttcaggtgaaaattagattttggagaaaaaaaagtctttaaaactttctacaatggagtaaaagaaaacttgaaatagctgtctttttggaaagaatttggtgttctccccaaaatctctatctgtagaatacttgaaaccctttaaaacatcttaaagcaaaacttttcacaaaattatttacttaagtgctttgtagaaaaattaaaacctggcaaaattctgtttgaattggaaatactacttctataaatcttttgactttaaaaccatgttactaatctcacagtaaatcaaatttttgcctttataaaactgattctatgttatagtgtgaggtaaggctagggaaataaaaattgatgcattttcagtagcacatattttgcaatgcattataatacttttttctttaaaaataaaagtgaataattgtatgtctttaagcttaagataattcataaaatacatttgtgttaagagcatgtcttctaaaataagatccagttttctgaacaaaatttgtatttataaagctatctataatctcatataccttataaatttaagaaggcaaatcattagattttatatttacataaaaatattggatcactacaagtcactaattagactttaagccagagacacaagtgggaatcctccattttgataattgttcacacttatcatttgccttttaaaacaagatttacttgctggtaattaacatgtttatataatccagaaataattgccagcaaataggaagcagcacatcatggctagaatttatttgaataaatcatttattaaaaaaatagtaagctacaaatattaaattaacagagaagtgtcttttctacactgggttgaatttttagttactgaatttgacaacaaccattgctagatcagaaattcca

SEQ ID NO: 586276 - DNA, 4001 bp, Homo sapiens
gatgactaatgttaaattgtttgactttttacaaaaatatttagctgtgcttatttacatcatttcatcctcagcgcacacagtaggcatgtatttgttgaacagaagccctaaatggatgagaaaaaagatatttctgctacacattttctcaagatcgagaaaggtaaaatcacaacccaatttgcagaagtttctaggcattccttttcaatgtaaagctatgcatctctgtttaaaaaagaaaaggatgacacaaccaaacaatgtcaaccacacaatggggaaattccaggatcactaagaaaacaccattatcctaagtcacacattttcatttaatactggttaccacacaggagagagtaagaactgctgtctccccacccactcgcacaatccatctgggaaaagcatgggcagaacatttatgatctaaccataccacatcttggactcacatttaaccctttggagaattagtctaaagagtatgtccgcccagagatataaagtaaaacagacacagggataacagttttggaagaaatttttatgacgctgtttgagattgggcatcagcactcaaactccttagaccaccaggagtcattcttactacgcaactttaataaagagaaactgagagtatgactggcaaaaatattatgatgtttctgcatcttgttaacctgatttacacttggctccacccataaagttcccactgattatcacacggcatcctcattctccagtctcacctactctgtctttcaaaaattccccaacggcatggccacgaaaaatatgcgggggctagcggggcatgtctcaggttggcttatcctgtccctaaaacgcacccacttcccccagaccctccttcagggtgggcagggagaaaacgcttctaagttgcacagctgcagggaagcctgctcaggtcatgtttttttgacttgtctttcggctcgctgtctggcaaggtcaccggctctggctcgcggctctgtcgacaaaacttaactctcactctgtaagaccaacaggtcgcgcaggacctccccagtcgccctctgccccgcacctttctgggcctgaggattcccggctcggccctccccgcgcgcgcgaggccccagatggcgagggcgcagctccctggctcacctgaccacgttggggtgctcgaaggtctccaggtgcctcagcaccgccacctcgcggatggtggagagcggcatgccctcctcgccggtctgcacccgcacgcgcttcaacgccacgaaacggcctccgttcttcaagtcgcgggccttgaacaccttcccataggcgccctccccgatctccgccacgcattcgtactgctggtcagcgcggcacaggccgtccttctccatgccgcctggacgccgcccgccgcggcgccgctggggcgggcggggggtgcgctcaactagctggcggccgccgctcgcctactccggggctccccggagatcggtctagctttacttgctccccgccggctcaggcgctcgggcgctggggctttcgccgctgcagaagctggatggagagacctccccgcggggctggcgtaaccctggtgccgccgccgcgaaactccgcctgcagagtcgccgccgccgccgccgccggaggagcgagccgatccctcctcttccctcctcgaagcgaagtcctcaacacagacacgattacatagcctctgcccaagcgcgtctcagtccagaatcattgcacctaaaggaggagacgggaggataagaagaaagtgcaatcagacagcccagaagccttcctcggggttcctccagactcccctcctcctcctttacgaagcctccatcgctaccctccgcgcgctcctgccctctcccaagccgcttaatccttcctggttcctccgagaaaagcgaagttacttttctttccctgcagggctgaagccgtcttcgcgcggagaggttgcaggggcccctcggggatgagcgagcggcgcgggacgcagtggaacgggagggggcgtgccgagcagcccagagtgtgccgggagcgcgggggaggggaggcgccgggcacgtcaatgtcacggcttaatatttatccctatatcattgtgttgcgccgctaccctccccgcctcctgaggcccggacgtgcagggagacggggtccaggggtgccggagggcgttcaggggtcgcgcacaagctggagcggaaggactgtgggtccatccgtgtggggccgcagaatgtgggtgggggctcccaggaccctgtaacccgatgctgggagtgtgcgagaaggggtggtcagacatctgctcagaaattgcttcctttctttctactttcagtttttctacgaggagacatttaaaaacgactcgcatacacaaatggtctttttggggtaaaggagtctcggttggaaacggaattctctctccggctgggaggacctccctggtggaaaccttgggaagaccagccatctggtcggggagggttggggcttatcgggggtgggcgagcgagcggtcctgggggaggggagacaccgtcccccacgggatcccaagggtgggagaaaggggtgttcgccacaatttcgcttgtcgtctccttaaagaataacttcaggaaggggatagcataatcgcgcctcgtccttaagttttaaactgatttcgacctgagcaaaactcaacctccctttcaaagggtggggggtggggggttaaatcctgcgcctccaggggtgagagagaaggtctctgtcctcggggcccggactcgcgaaccttttcccattcccaggacctccccgctgtaggtagcagaggtggctgccccattccccctccggctaaaggcccggtccagtctgcagccggacgcccccggagccctctgcacaacaaagcgccagagtagggtaccctaactttccctccccattcagcagctatctgggacctagggggcctccctcctccagggccgccgcggcctcggcaggactttcaccacgacggccgcatgtccggaattcccggggcacctcggaattacctgcctcgcaaccgctggcccgctcgccttttgccaggaattaaacaaacggcgcgacccccacgatgagcgggtggagcggaccgcggcgagagcagagcttctggcactcactacattcagaactttccttaaaagccgaggaaagagcccccagggactgcccgggggtctgagccaggtcgagggccacacaggtagccggggagccgccgccggccgcccaacccgcctgtcctgcatccccccaaccccctcccgctcgagtctagccccgggctccgcagcgaaggaagcgtcggggacgtcccacccccgcagggaactgcgcctgctgcccccgccgggccccgcactgccctggctctccccccactcgccccccagacggtcggcttcggcggagagaaacgggagcagcaatgccttttccccccctctcctccacttttttttgttgttgttgttgctttcccacgctggctgaatgtgacttgaccccatttcaaaaaaagtttgacatagtgcttcaacatttccgcattcctccgcgactacaaaggctgcagccgcctccttctgctttctgtctctgctctctgtcttcacactcaatgaaatccttcatgcgcctctcccgaagcctgccaagcaccacaagggtcgccaccagcacagcgacaagaggccacaccggggaccgcgactcccgcgtgtgcgcacacgcagatgcgcccatatgcacacggacgggcgcgctgcggggaccagggctgctcactgcggggcgtgtgtttaactccaatattttaaattataaaagtaaacttggaaactacagcaaacgtgcgtcttcgcggggctccaagcctgggcactggccggctgcgt

SEQ ID NO: 586277 - DNA, 4001 bp, Homo sapiens
tgattttcttaataataatctttcctccagcttactttaagaattcagtacataatacatatgagatacaaaatatgttaatcaagtgtttctgttatcaggaagccttccagtcaatagtaggctattagtagttaagtttttttgcaggggggaggggagtaaaaagttgtacatggattttctactgggggttatgagtctgctgtaattattattaactatagtcaccatgctgtgccagagatctcaaaaaccattcctcctgtttaactgtaactttgtgcccttggatcaacatcttcccatttctgccctccttccccccaccctccaggctctggtaaccaccattttattctctacttctatgagctggactttttaagatgccacgtataagtgagatcatgcagcatttagacattaccaattgaccatggctctcttgcagggcttagactcagccttacagctttctcagcctagtaccaggcagccaccaagagatgaaacagttacaactcctatttgggataaaggctaagaacctcagcaaggcagagaaagcctggactcctacaggggcctgttctgagttcacacactccttaccttcacttgggctgttctacccgggatgatgcttcacctggctaatgaatggccttgccaccccttccatctccacaacccttctctcactccctcagttgagtactacctattttctcgtaacatcttgctccccgaccacactgtactcaaattctgttcacaggctccttcactagacgcaatttatttattgtttatttttatttttttgagacagagtcgctcttatcacccaggctggagtgcaatggcacgatctcggctcactggaacctccatctcctgggttcaagcgattctcctgcctcagcctaccgagtagctgggattacaggcgcctcaccaccacgcccggctaatttttgtatttttagtagagacggggtttcgccatgttggccaggctggtctcaaacttctgacttcgtgatccgcccgcctcggcctcccaaagtgctgggattacaggctgagccaccgcgcctggtccactatacgcaatttattaaagggcagaggccttgtcttctttgtacgtctagcacctactgcaccgtggaagtttccaataacgtttgttgaaactgccacaaatgcagcaggggactagcggtgaaacagatgaagaaactgaagggtcctatggagagaggggtaagcctaatgtcctattttgcccgttttccaaaggtttggtcagcttactcctgctcttcctgtatccccacaatcagagatgctggctggctttcaacacgtgccattagtgtgcagcgcttcctttgtcttttctgttttgtaactgtcactccgagactgtaagccatttgagggcaagggctgtgtctttgggtacttcgctcctcgcagtcacaagtactggcgtgcgtacgcggggagagatcgctcctcaaaacggggtcctgaacgctgccccgcggcccccaagcccggcccgccccgcccctgcatcccgacccctcctcacgccggccccttcccgccttccgggcggcggaagtcgctggctgctcttccctgcccacatgagccttttccggtgcgcccgccccctccggctctccggccgagacctggccctcacctcagggttcccaatgtgcctccggagggacatattttctccaaccgaccacgttcggggttctagcctcacgggttgcctctaaccctagcttcctacccccacaaccttgttcagccgcctccctataccctcttctccgattggcccgtcttccccggccggccaatgggggccccgtttactctctcatctcagggtcgcagaagggcaagacgccgctcaatggttgccaagggcaacgcgggacgccggctagcgaggccttttgttctctgggctggggctcgccggctccagccttagggcgggaagagaggcgcggggggaggggaaggctggcgcctgcgcaaagccgggggcgggggcagtggcttgagagccgggacaaaacacgagttttagctaatgtggaaccataaatacaacacaagactccccatcccccagctccgttttatggccgtttcaaccaaacatctgggctactgattccacaacagggaatattatatgggccagggttgttcagcagaaatgggagagtatggtttattattttctggttaagttaatatgcgaattatgcaaaatacatgggtaaatacagtaattatcggtgctttaaaagcttttaggctagctatagagcgacatccttaattgcaaagcacacgcgctattctgtggttcatcgttcatttaacaaatacttaataagcaccttatgagaaaagctgcagtaggtcttgtggagaatgggaggatgactaggacccaatcccgtcgtcatggaaaccattgtgactcctgccaccagccaccacctgttcccattccggatctgaaaatgaagtcctagcacctttacaaaacaattacacacacagtttgacttggctcctaaatgtcccaccaaatccatcaaaattattatttccttttacatgaaaggaacaacacagtaaccctttgtcctttgctctaagttgtttttccaggaatggagaaaggttactctgagcagttcatactcgccagttgtctgttagtgaataatagcacacatttgagctacttcagggtctgtgagatgacccattcaacaacatggcctcacatgcccttgttctcttaggcacttcagcaacccaaccttagggctacaccttggatcatgttgccagtcagtgctgcttgaccagaattttgaattctggccacagctgcttcttggacttttcatgtcactctttcatgtttattaagttttgtcttaatttccataatctttgccagttctttaacccctctaaaattctcagtctctcactcctctgctaaggaagggtttgaaggctgcaaaaaattggaaggaggcagagggaagaatgttaatctagaagcttttgcatagcaagcagaaacttctagattcattagtatttagaatgtatgcttacctggtgcaccttgtgggtaaccatagagattatggatagaataacgggaaaggagagagggagatgataggggactacactcagaggtggtgagaaagacagaaaaggagagatttaaagacgtgtaggtaaaatcaatagtatacatgagaagaggtaaggggtgcaaggaatagaaattcatcaaagatggctatagtttctctaacttgaggaactgagtagatgggcgataatgcattaatcaagttaaagaacaacagtcaaaaagccaaaacagcagaaagtacaagtaggtccaacagtccattcaacttccattcttcagtgttttggctcacttctttgtacggttgtctctcttttgttccagagaacatctggtttacttgcctcactagtcatcgtggttgtcacatttggactgcacaggaagcattatagagagattatagaacccggctggttcttggatccaactgactgtgtgtctgtgtgtctgggtggggtaatttaaatacatgttccctccccaatccctcaattctgattctggccggcgggtggggagcggggggtgttgtggtccaaggagactctcctttaaaagagtcacccctttccttcacatttggcctcaatggaatccttggaaagcttaaagctataaaccaaaagacttttaacatcatgtatttctctttaggattccttttggatcctgctatgccaaaactggatcaaaacgaacgccaagtgcttactttgaaaaaataggcaaatggtggtggcaatggctcacgcctgtaattcca

SEQ ID NO: 586278 - DNA, 4001 bp, Homo sapiens
ccacaggcaaaaaacaagaaggctgaggatcactaagatttctcccagctataaaaagttcctattctatttctttggggagaaactacctttttcctcagtacttcgaaaatgttactactcttagaattagtaattaacaagtcagaaacatgaattaatgcaaattgattgctttcttcttggaagagaatcctaggccctggaaagagcagtagtaatgaaagaaaagaaagaaaattaaaatggggagaaaatgcacacacatatacacaggtatacttgtttcatttggtatgttttggactattttggcaatggcttttaaaaagtatttttccctaaaaaaaaaaaaaaatccacgcttgcttgccttgtataacgttgcccaatttttcttggagcaagtaaaggaagactgagagccatcagttatcaaattcacatacttttcagttttgccccttgcctgggagtatggctgtattgttgatctttcttgcagcccagggagtggagagctattgttcctcaaaattctccccgcccagaggggaataggtccacaaaatcgattaggcaaattcccctaacacctatttctcctcatgcaaaatgctgttgctccgcaggttactgcgtaaatgtcagacctcagagagctcaactctattccccagtcaactgaccactcccaaggaactctccaaggctccaggatgtgaacgcaagagacagggttcctgacgcagcctgagatttgagaagcctcaacaggaattcccacagtggccccacaccattagtgtgaggcaggacagggttcctccaggaattcgcggcttttaaggcacgatcagggctctctgggggatcaatggaatcctagtaggaaacaaacaacttggggtttctaaacacctccgcctcgaatagagatccaagggcctcaaatggaatttctcaacagatcaacttccaagagtgaattttgtattcataacaaaagcaaacccaaaaccaaatacagtacaagcataataaaacaaatcaactctattctctcccggttctctccgacccaacgtgtaacaaccagcttccaatttcatattttaaaaatgcttaatttctaatttaacagcgttttcctcccctctgggtgcaggctttagtcgcagcaaatttaagcatgggaaaatttacatctatatcaagaacatcactcggtaacagggatctacgtattaaaaagttcagttcaaactgatcaggtcatcaaatcaagattttgctaagaatgattcctttcctccctgtagctctatgaccacttttcgaagaagcgcggcaaaaccccgcctactcagtttgctaggaccctccaggaggaccacacagcgctggtccccagacaggatggttgacaacagccagcccctcgcaaccggtgcagttcgcagggggtgggggatcaggattagctctgcgcttggaatctccatcccgcggcttcccccatcttcactcctgtccccagttccacccttgccacccccaggtctggaccccgtctcgagacttcactcccaccccctccacctctgaaagcacagacacctgctcatacctgcgcctcatcgtcctccgtcaccaccccaaccaccgggatttgactggaactgctagacttgttcctgatgccggattcctgggcctcggcggtcgccccggcttcctctgtccacatggccggtggcggcggggtggagagtggggggatcttcctgtcctacagtgcgcccgcagccgctgggcccaaagaggccccgccaccgagaagggaaggcagcctgagagtcgctagagtcgcgaaaggtcccaaaattccgccaggggcctaggccaccgccatacagtccgcttagcgccgctgccgccccccagttgacccagacctctgatcccgggccggttgttaacacaagccagcgcgttgctagggggcggggccagaggctacggaaagccggagagccaaaccaccccaaagcctaattgcactccgcgcccggcagggcgagtttgcaggcttgcggtaaggagcctgcaggatgcacctcggtaggtagcggggagtggtgccttaggctcccggtgtgtttcggtcttcatagtcttgcttcaaacaggcatgagtgggtggaggggtgagggatgtctatgggatacgttaggcgtgatacgatggacggatagtgttgaaagcgtttctctcaccccagggaagtgaccagtctcgcttacattccccagcttttatctgtactttagtggcccaactggacagttaaataaacaaacataaaaggtattgtacagaatgttaaaaggcttttgagtcagtttattgaatctagagcgagttatcccttgaagtctcacttttctcatctgtaaaataggactgttgtgaggattgaatgagatgacagtgtttgttaagtggtgcttggcacagcatcccgtatggtcaagattatcattatctttattactgtttgagaactaaaaattaaatcctaagccccacaaccgactgaacggacccccttttggccaagaggacccccgataaaccttaaaagctgaattcctcgccctgacgggacggaaggacggacacgcctcgctatacccccctacctcctcccttttcacgtccccctcacccctggttttttgagacagggtctcactgtgtcccccaggctggagtgcagtggcaggatcgtagctctgcaacctccaacctctggctcaaacgatcctcccgcttcagcctcgggaatagctgggagtacaggtgcacatgccaccaagctcggctccccctccctttgagggcttagactcaacaactgaccagcattaatgttaaaatggagatcagaaggctaacagaatggactctgtggcaataacaaattataagcaagacctaaggccatgccaggcaagagttaagtcactcacacctacacttaaagaataacctttgttttaactgctgcaatgtttttatttttctctagctgttaaataagaactgccctcgacataagcaatattgaaataattgcagctcatccatggccagatgttgactaacaagaccctcctgttccacaagtcataactgcaggtttgattggacaagggaccgattcagtaactttcccctgataaaagaccacccactatggactggttctggcaggtttacagagactgagcactagtacattcatgtctctgcttctccttttgatgtatagggactgtaatgcatttaaatgttaagtttccactccacagtgagcatgggatgcatgtcacatgcatgtttattcagcacccctcttagtgaagattcacagctcttcttacaatctgttgaatatgtctgtttagccaactcattcagcataaagcttctgctccaaccccacctccttcaaagtgcctgttgactgtctctgtgggagcctgggcttcccagcctgcagaatggccagcctgcaggttgtaactcattataagaaacaaagtctcctttctaaatttatagatcttatgatttttcagttgacatgttgttgcctatccattgtagactgaataataatacaagaagggtcaagactataatggaaagcttctcatgatgatcatcagtataatttaataactcaaacaccataactgaaaatttaaaaaactctaactcttttaatctgttttttaaactttcaaaaattattcaagatttaaacgtgcatttttgtatcttccatagaatttatgaatttaaaattacatataaattcaatgaaaataaatattacttcacttctcagagcttctctcctcatttctagaatgaggttgataagtgattttgaaggttccttctgcctcagacgttgaatatttctggc

SEQ ID NO: 586279 - DNA, 4001 bp, Homo sapiens
gacagtctccaaattttaaaggtcaagtcacacacagagatgttaagggacctgcctcaggcaacagagctactaaacagtagatgtaggatctgaatcaaaataatctgactccaaagcctaccactttgaaaactaagcaatactgcctaacttaatgcagaaaatatgttttttacacttttagaattgcagtccagaaggccagaaggaagtttgtaatcattggtattttaggtgattgtcagttcctataaatagtaggaacttaacttttaaaaacatacctattcttaaagcaccttatgaaatattttggagaacagaaatgagtatgctcttaacacacttagcagcctttgtaatacattttctttgcaaaccagcctgatagcattttttaacctatattaaatgtgtcaggtgatttgtaaaaagaaaattatataaaaacccactttgacagatcaatagtaagctattttaaagttcattagtatttagaactatccatgaaatattcattcttctgaaaactgcatttttagactggttggcatttaggttcctcaaagttctctgctaaaaaaagtctataatttatgccaattaacattttgactttataaggactaggaaaacagatcaatagataagccgattttataggtggagtaacaaaaggtggataacatcaacacaaaaagataattccaaagagtaaagtccttctctctcatccacagggaggagctctccttcaagggccaacagtctctccttagcaccggagttccaggattaactgcacatgcagagaactaaacataagagagatgtgaaagctaaattccttcccccctacacacatatatgagctatttataacatatttgacttttttgatacctcagtatgcttattcattgggtaattatgtgtcaagtaatgtcccaagagagagcagtacctattcattcattcacaccagtataataacaggaacaaagtagatgcaatatccaaagaacacttcaaatatgaagtgctacatctaacaacactttgcctaagattccgaacttagatgctattttaaaaaatctcattaaagtttgcaagcttctgtggctcatcacattaggctatgaatacaatttattaaatgtcagttggatataacttcggtatctattcctatggcttttaaaatttatagcttgtgaagtaacttttttcaaaataaatatttcaacaaatttgctttcaatttttgaagaatcatttacctgtgacaaatactagatatatccagtctcataacaataaatactttaagcatatattttctacctaccccaaaatttttgttggctgaattcagtcaagaaatgttttctgagcacttactatatgcaggcatggcacctgtatgtgccaagaagacaatcaagtgtccaaggcatgaagggggaaaaccaataaaccatacttaggtacttattaacaagtatttttagtttcttagaaaaatgaaataaaacaagtgcatagtagcgtacttgagtcttgagattctaacttttcagttgcaagtagatgtggctctctattcaatcagcttcagttcattcttccatctcttcttaatgctttctgttttattctacaatacccacattttctttcaaaacaatgaatgatagcgcatctttttaaaaactgcttattcctttaccccaaacccaacccatacacacgccctcctctttcgtgggcacgtgtctttccgaagctcggttggccaccttctcacctgaaaaaaagtttggagacaacgctggccttttccagaggcgacctctgcatggtctctcgggcgctggggtccctgctagggccgtctgggctcaagctcctaatgccaaagacctactactctgggtgcctgccgctcaaccctttttctctgacctgctgtgatgtcatttgcttccaattccccccacccacccctactccgcacaccaccccttccttttgctctttcccccgccttcactgcccaggttaaaagccgagtgctgcctggtccggccccaaatttgctctagcggctttctccacccactacgcacccccgccagcacccctcccgctccttcctcctctcctccttcgctccctcgccgccccgcacctccctttcccgattctgactcccagcctccctccctcgcgcgcgctccttccaggtccgtgtccttaccgcccagcaccaggcccatcccgcaggtgggcgacagtcgcggcctctctttaggtccagttggcaacgctggaggacagaagaagccaccggcgggagaaccggctccccggagagcttcctagaccctccttcgcgtcagggtccgccagacccaggacccgctgccaccagcttccccggagcctgccttcctcctcctcctccttttcccgatgatcctagtcgggttcctgttacgtttgcaaggtgcattttgaaaagggaaggaaaatgtgcctttcgtatatcaaaatacagccttagagagccgaaaagttccgcggcagtgtgggtctgatgcatttaccttagcgcttcctttgcgtgtcggagaaaagaaccaagctttattagtttcaggtttaggtgagtgaactccaagggtggcacagaaatcttaggacacgtactgaaagagaaaaaaaaatctgcaaggaggtaagaggagataatgctttgcgtaattaccggcccaggatgtgttccttgtctatcctttttagcccagtgcgcatttttaaggaaggctttggagtgttttagcgataatgacaaggaacaatgtaaactaacccgccctcctatagatttcctagtctcagtcagcaaaacatcttgactaatccaccgaaaggaagccaagcagtctttgaagcgaaggtaatgtgttaactttgacctgactcagagaaacgccatcttcaactctctgaggggcatctgggcattcccaggcgtaggcgccttccttctgagaattttgtgtaggattgcctgtgtctctgacggtttttaaagagccaaccctctaatccctgaaccctactgtgtaaaagcaagcatacattgtgtttgaattgaaaaattcaaaggaaagtaaaaattttggcctgattactttattgccgacacatctaaggcaagggtcttgtgaattatcttgttgttgacttgtggtcacccaaatacagtacaaataaaatgtgcatttcatgatggaaagacaagaacctgtgttgaaaataaagaatgtgttcagcaggttttcatagctctgctttgcccttccgtgggcaaaagcatacctttttttcttgatattgtaaagtaagatttagaaacatttaatctttattatcctaaatttgaatagtagagaaaagagcaaagagataaaccacattgcattaagttagacaccaggaaagaatttcagcatttttaactcaccatccactctgttgtttgaaatcctctacctgtgttttcatctctccattatgacaaaaaattgtgagactctgtcttcactattgacttttcccagacatgtgattgaactcaccacatccacttccccattcccaatctgttgtttggtttataactgttagtgtggcccatcaaatataatacatgcattttgaaataaattaataattagttcttctttgttatcaacaagcaagtgaaaataaagggattaagaattaagctccaaagaggatcatagaagctgaccaaggaatatggctggaggagactccaaatatttttcagccaatctccttctggaaagagtgaaacagttacttgagttcttactatttgccagacattattcatataacccttataacaaccatgtaaataggtgttattatcttcagttttcagttaagcaaacaag

SEQ ID NO: 586280 - DNA, 4001 bp, Homo sapiens
aacatcaagttcccaattccaaccagttttggaaattgtcaacttaaaataacttacatattaaaatggacctcaagattttcatttcaaattatttacatcattttctctcttcaatttttttttttttgagatggagcttcgctcttgttgcccaggctggagtgcaatggtgcaatctcagctcactgcaacctccacctcccagactcaagcgattctcttgcctcagccttccgagtagctgggattacaggcacccgcgaccacctccggctaattttttgtatttttagttgagacgaggtttcactatggtgaccatggctggtctccagctcctgacctcaggtgatccacccgcctcggactcccaaagtgctgggattacaggtgtgaaccaccacgcacggcctaattttttttttttttttgagacagggcctcactctgatgcccagactggagtgcagtgtcacgatccaatctcactgcaacctctgcctcctgggttcaaccgattcttctgcctccgcttcccaagtagctgggattacaggcgcgcaccaccacacctagctaatttttgtatttctagtagagacggagtttcaccatgttggccaggctcgtctcgaactcctgacctcaagtgatccacccgcctcgacctcccaaagtgttgggattacaggcatgagccaccacgcccggccactttaatcttttcttataatagtaatagcctaggacatactagttttttctgcttctttgcaacaatttccatgtattcggatagcccacagtatctttaaagacatatccaacatgtcataagaaatacagactactaaaagttagaaagattcttacaggattcattcattcaagtattaggtaactacaaggcgctggtaatgtaactgtgaacaagagacaaaaatctctgcattcatggagtttacattttattgacggatcaaataattaacataggctgcggagtggtggctcttgcctgtaatcccagtgattagggaagtggaggcgaaaggatcatttgaggccaggactttgagaccagccagggccacataatgagaccctgtctctgctaaaatataaaatagaataaagtcgccaagtgtggtgcacaggtggcgcatgcctgtagtcccagttactctggaggctgacgtggtagaatagcttgagcccaggaagtcaaggctgcagttagccataattacgtcactgcactacagcctgagttagactctgactcaaaatataaataaataaacattctaattaggacttaaagatggtcaactggggaaataatctagtccaattccttcattttacacattacaaaacaagactggccaaagtgactcgtctgaactattataccaaaagcaacttcaactattcctcatctgttcaacgttcagatgctttcaacaatttcgagaccccttctcaaataacaaaagactaattatgtcctgcacgtatttaaaaatcttcatatgtatcacgctccctctgaccatttccggattatttccttgggtgctcttttccccgaaatcaagctaggtcaaaatttatgccttcctaccacctggccataacgttatgcctttcccgttgtttggataggaagctttttccgtaagtgaattccctccccacactcccctaacataggctttacgttcaatctacccccgcctggcagaggcgagcccacgccgcagccgaccttagttcacccccgcccgcggcctccctctgcgtcattgccccagtagagtccggacggccgcgctttggtctcaaaccctgcgatggtctcacctggccggaggggccatgcgggaggtgcggcttcggcttccacgcggcatcctaggtaagcgacggctaggcctccggacgtgggacaaccaccgaagagctaagcgacttctgaggagaccggaagatgggaggcggggctggcctcaacgcgcaaccaaccagcacacaggcagagaacttccgttctccgtcgtctccgcaggcctgaagttcattggaagagcaggacgtcacggggacgcctcgtccttcgcggtcaacgccctgaacttggcgccaggatctttaaaacccggaagttcctgtggttcatccgcgaaccttgtcctccggtcctcgcatcagagcacttagcattttgcttccctagggcagctggcctgtcgctccgtccttcaaacatttgtattaaatccaaccttaagagtgactcacatctctggctggattgccaggggaccttgggcagatttcttagcctttctgagcattcagttataagggcaaatatttttggaggcacagtgtggacgcgtagtatgaactgaatgaaagaaatcggtttcgtcaaaaataaacagagttgaattagttgtatttggtatttctctttcttgtctgtggatccagtcagcaaaagttaaattcaggcagcaataatgttttacatttatgtattactatatattttcagctccttttcatatgtattatagaatttgtgtccagaattgggacagtaaccatacactggtaaattcaacaaaaatttactgtctaactgggttatggagatactgcaccaaatcagataagattctaccttcacgaagttaagtttcaaggaggggagacacaaacgcctacgtaaatcaggtggtggtgacatgaaaagagaggaaggagactggaaattagaggttaggcggggcgggggggagtcatttgaacggagcccttgaagaggtggggaagcaagccatgtgtttatgaagataagaacactacaggaagagagaacagcaattgcaaaggccccaaggatctgtgctttagtgatacttggtgtgaaatgctttttttttttttttgagacggagtctggctctgtcgcccaggctggagtgcagtggcgcgttctcagctcactgcagcctccgcctcccggattcaagcgattctcctgcctcagccttccgagtagttgggattacaggcgcacgtcaacccgcctggctaattttttattttagtagaaacagggtttcgccatgttggtcaggctggtcttgagctcttgacctcaggtgatccatctacctcggcctgcaagggctgggattacaggcataagccaccaggcccagcctgaaatgctttcaacagttacattaaacatcgctaaaataaggggaaatttggctagtggcatttcataaggggctcatgggaaagtcccttgcggttggagtgaggtttattgaggagaggaagcacacatggaaccatttctgcttgatgtcaatcagaaatttctcccttccatcagaggaagtagagtttaaaacagccttcctgtgtcccagcaacagcagaatgtacttggaactaaagggtgaataatgtggcagctaagctatgaggatgcaaaggcaaaagaatgatataatgggctctggggatttggagggatgtgctaggtgggtaagggataaaagactacactgttgagtacggtgtacattgctcaggtgatgggtgcatcaaaacctcagaaatcaccactaaagaacttttccatgtaaccaaacaccacctgttcccccaaaagtattgaaataaaaagatttcaaacaataaaaagggtgaattatataaaaatcttttgtaaaaaacaaagctttatttttacataacttcttaaaagaatgaatgctttacaaataataagactttttacttgcttttagataattcaaaagcagagatgaagaaaagcagtcttataaaggatacattctggcacaagaagggtttagagcgaggagaactttggacagttcaagacagaaaggaatccagaccagaacaggcaccattttactcaaacgtggctaagtcattcattc

SEQ ID NO: 586281 - DNA, 4001 bp, Homo sapiens
atgtaaaaggaggatttgaagcaatggagaccagcgcaagggcattccaggtgaagggtatattctgaagaaaagcatagaggtaaaaatgatcatgcttgaactgttagcaatacaggtaaaatgtactatataagaaaggaaaaaaatgaggaatgctgtcaagttatatgaccaaaggacatttctttttaaaaaacaaaaatcttaaaaaggttttttagacaatttttccattttaatagaatacctatccctgctgtcacagttattccatccaaccttatctaatacttgatatgaatctctgtgctgtggccacattctctttcgattttgtttgctgttagcactgtgtctgtactaaagcacgagaatatggatttatacatttttttctaaccaatgtcttctcactcaaaacttattttgctttgtcttttaattatttttcactctgagttgcgtactgaaagcctaatggcaagagtcttaaaatctctgcataaaacttaaagtttacagtaattttttactccaaagagtactaactgaaacacaataactcaaagaatacagcctcagatattttattacaaaatgtagtactaccattaattagcatgatataaagaaatactggtcacagaccaaaaactgagttcgacagtctgagtttctatgaagaaaagtttaataaattattctcaaggtaacagtttcagaagaaaaagtttttaaacattttaaatatttaagaagttttatttcctggtaacaactgttaaaaataatttacaaatgtaatttatttacgctggttgataacagaaaaaaatatataaattattataaaactttctgaagtcaaaattgctttatttactaggttcaggcatcatacgtccaaaaatgtgaggctccaaattcaggcgcagcggagagtgtgttaatgaagttagtgctggtatactgacaccctagagaaaaaccaggttttcagtttatgtatcaggtgcatgcaaagggcattaaaaaaaaagtgctctacaacgttggtcagaaatgactacattacttctactggtatgaaaaactgcaaacccatctcagcccctatcagactggcagacactagtcctgaagcaactgggcctaatccaaaacttcggcgcagcaggtcacagaggaggcgcctgggaaagaggagatatcaagtgaaagtgaagcagggagaagccagaagccgccccaggcaggtcagaaaagactgtggggctgggagggaggatgacagggtgtggggagtgggtgggaggagggggtgttatcagagggagagcactaaatgacacaaagcaaaggcaatccttaaaatgccaattcaccctgggagacagggtgtgcacagtggaaaagcagggtttgggtcctgaacccaggaaaaccatttcacagacaagtacaccgaggtatgggtttcaaatacggtcctgcaacaagggagcagtacagttacgagtagactgtgagcccttgcagggtataattcaacctggcattccccgcccgccccagcagtgcctagcacttggcacaaccaggaactatctctgaatgaatgtcccacgtcttgaaactctaggcttcttcccagacacctgggcttctggccttaatacgctagggtccaggacgggagaaacccaggctgagcgggtccggagaagatggggccttggggtccgagtccaaccactggccctccgcccgtccacgggcactcacccggatgcccttcaccacggtgatgttctcattctcgtccgcctcgaaggtgacccggcgggtgctggtggtcccacccatgattccggttcctgccccagcggagacctagcggggaaccacgagcacttcggggcccccgcacccacacgcgcgtggaagggcctggattcttttcccgcacagcgggagcaaggccacgacccccagaagcaaggagaaggcgccggtcctgagctcccgcctcctccggtcacgcgccacaacaaaaacgcctcaggttggtcggcgatgcgaactgcccgcctctgttcggcgagggcgcccggattggttcacccgacccggatgctatggcaacaggtggtgtttgatagctttccgcggagtccctgggtgtagtgggaactgtggtctcgatctggcgcggtgggtgatgggacattctctccccgcgcctgagcgcgctaagggagcacggcattctgggagttgtggttttgactccccagagacgcctaactgggcaactttttgaagacataattctagaaatttaggccactaagttcagagacacaatctttctctcaaagggactcacagtttaatgaaaaagatgcatgatactaatgaagccattcctagtgttctatacacaaattcctggctcaaaacttagcgtttcattacagtcgtagggtagcttaatgaagactacttctgagaaatgcctcgttaggtgaccctgtgatatctgtggttgtgcaaacatcatagagtgtacttacacaaacccagatggtgtagcctactacacacctgggctacttggtgtaacctattgctcccaggctgcaaagatgtacagcatgtcactgtactaaatactgtaggcaattgtaacacagtggtatttgtgtgtacaaatatatgtaaacatagaaaagctacagcaaaaacagtgtaaaagtgattgctttggcaacacatctaggacaatttgaacaatacagagattagcacagcccctgagcaaggttgacacatgaatttctgaagcattccattaaaaaaaaaatcaaagataaaaaatggtatgcttctatagggcacttaccatgaatggagcttacaggactggaagttgccctgagtgagtcagtgagtgagtggggagttgaatgtgaaggcctgggacgcaactatgcagtactgtaccttttatcaacactgtgcacttaggcaacactaaatttattttcatatattttcattcttcaagaataaattgaccttagcttactgtaactttttaaacttataaacttctttttttgtgactttttgactctttaataacacttagcttaaaacacaaacacactatatagctgtacaaaaatatttctttctttatatacttagtctataagctttttctatttttgaaattatttactttttactttttaaacatttttgttaaaaattaagacaaacacacacacattagcctagacctacacggggtcaggatcatcaatatcactgtcttccaccttcacatcttgtcccactgaaaggtcttcagaggcaataacacgtatggagctatctcctatgataacagcaccttctgtaacacctcctgaaggacctgcctgaggctgttttacagttaacttttttatataggtagaaagaatgcactttaacctaaagataaaaagcatagtatagtaaatactaggagacaggaattttccagctccattataatcttatgattccactgccagaaatgaggttcttctttgactgaaacactgttatgcagtacatgaatggtggcattttagtagtagccataaaataaaaaaataaaaaacgtaaacgtgtgtttggtccatgtctcttgtctcatgaactagtatctgtatttttttctttttgtaaagtaaaattttaagtactatggttttcaaacctgtctatgagaaaatacatttcttcatagaataaattatttgcaccaagtatgtagagaatttactttccacttttgtgtctccttctactactagttcagttacataagttaggccataatagggttaggcagagaaaagttaagtgattgccaaagatggcataaattagtggaggaattaaaactacatcagaaaagttgagatgatctattgtggaaa

SEQ ID NO: 586282 - DNA, 4001 bp, Homo sapiens
aaaaaaaattaatgaggataaaaatggaaaacagagtaaaaaaaaaaaaaaaaacgggaggcatttaatgctccaaattagacctgtcaatattcagtgacgggagaaatatgaaaagctttggcatagaagaggacctatgcaatgcaattcttcaccctaatgctaagtatgtagggctgtataattccattcctcagttcaattatagcatgcaaatgcctgagctgctggctttctaaaaacagatgcagggaaacagaccaaactaacaccaatgtatatttaatagatgaatatttgtcctcagaaaggatcggaaagcaacagaataaaatcagtttccctcgtcacctctgacaaaagggttatctaattccaagagtcacttgggttactgaccctaaaggaaacaagaatttttttaaaagaaagcaattcacattttgcttctcctgcctattgttttcttcctggatcctccatctccactctccccaactttcaaactgccagctcactttttggggtgaagcctctaactctaacctgtctctcctcctctcaactgcaattcaagctagacaatttggcagcagcatccctttccagcccttcttggaaaacacttgggcaaaggaaacaggccataattttctgatggcaggccccttctacaagtaccagtctgaaacgaacatagcggtctttccagtttataaattcacttgggaaattccacttaacccctcaccaggtttccagatctttttgtttggtctggtgagcaggataaaggctgtgaccaagggtgccccccctgctagccgtacccggagcacaaataaaagcttctggatggcatctcctgtcattatttgatttcacaggtgtctacgcataaaggaaaggagttagcatcactgaaaacaaaagacaaaacacaaaacgagaaacaggcaactgttttcccttgctcggagacagcaatattctttactgagtggaaaagtactgctcagctctcagcagaacatctctgactgagagagactgggcatgctctgtgtttatttcactggacatgggaacgtgaagtggcaatgggcccaattctccaaaactaagtcaacatccagataaggtgtttccaggcataagcactgagcagactgctttctgaggtctccagtttgaactgacagaaagcgcaggtgttaagcttatagctaaatgtggaaagcaaaggaattcattgtctcttgactttacagtcagaaaccagacggaaactatacactgtacctttccacctgcccttttgtaacagaagaaggaatgcagaggcttgcttaccttaaagttgtgtgtcttctcataattgaagtggttgtcgttgtgtgtgagggcagcccttcgaaccagggaggagatctgtgaacaggcaaagagtttgagagggggccaaagaaagccgcctttgacacccaccttcaccccgaaggctacggccagcagttcttggcgtttcctgccctgcttagacttccgaaccacagcacactttttctcattttccagccacagttcttcagagaacatagtgcctggatcccagctctttccagtttgctctgcagagcccaggaagccctgtgctgtcaggattttcgaaccgcagcttatgttaggcggcagatttgaggcagctgggtcctgtctgcagcagcctccggcatgtgacctgaaaggcccagtttgagtgatggagggggcccggcttctgaataaggatgggcctgttttgtgctatttcttaaggccgacgtgcgcctggaacaatagcaaacattcatgtgcacagcaacccccagaagcggtatccagtcagccactgaggattcagggaggcaggggccggcagcctgctttctcctgccgcagcacattgcaaaggagaggtctctcctccttattagcacatttcacactcaaacacaccagcgcacacaccccccagccagctctgacgttcaaagtctgaggctgcatccaattaatctggggctctgaaccccatcctgggctgagctccaacagattaaacctttaaaccctgatgactgtttaatcttataggggtaaagcctatgtctctttattaaaaatctgccttagcacttgaaagcttaatttttattcttatgcatgcattacattggaacagtctgagcaccaaatgggatatcagaggagagcaaagcttttccactctgagttctgcaaagttgcagaataagaggcaggatgtcttgcctcaggacactccccggtctctcctgtccttcctgcacgaacaaactctgctcaaacccacacagacaagacaatattccttacctaaaatcaaaacatcataattgcttttcttttaaataaaacatcttcagtgttcattctgttagtgcccaagcctatgaaaatggcctccttcctcttaaaagcatcatctgtttgatggtctcccatgaccctaattctttgatcctaggtctccccatgaaaagaagcagggaaatcctgatgtcttgggagtactcctgactcattggtgaagattaatgcagctaatgccagacagtaaaattaatgctttaggaactagaaaacaagatctagataactgggcctttatgtagatgggcagtcctgtcctctactcaaacaagggccccatgctgcagtccctccaagcagccttgtgaagagtaaccaaagatcactccttcccatgtgtaattctttattcctggtaaacaccatgattttaacttggttcaaaagttcatcctcccatttcatcctctcatgaccttcaataataacacccaatttttacgttaagctattgagcacaataatttacgctgtgtcagaggacgttagaatgtgtcaaaggcacttaactcatttaatctgcagcatatgggtgtgaggagcaagatttttattcccgattcttttggatgaagagagcaaggcactgagaggtaaagcaatttgcccaaggacatgcagcctagtttaagtggcagaaccagggctagaacacaaagcatctgtgtccagcgcccatgctcctcaacactgtgtcctgctgcctcggtacacccatgtgctgcctcatcctgccatcagtcctgacaaatgctttatctcagatactggttgagtctggcctctccctacctttctttccccacataactcagacccttgttatctctccagtccaccttacacatcgctctacaacaatcttcctaatccacccatgcttctccatagcttaactgtgtcctggcattgctggtttttcatgagctgatcctaatgtacccagctcatcctatttccctacactcccctccacaaatcctacaacatctcttctgtgacatacttaactgctaaccttggtagcttgctctgttctttagaatattctagcatcctttcaacatatctacattttcaccaacatttacattctgattctaatgctaccctttccaaaaggacttccccagactccccactgaaggccaactgtgtcctctgaaatcccatagtgttttatccacatttttctgattgcacttgtcactttctgtcttgtattatagtgactataacagctcttatccctgccacactgagaactcactgtgacatgctctatgcttaatttgcttttgtttccccctacaaaagtgtctaataagagtccttgccacagtagacactgaataaatataagttgctagaaagcacatgtacatataggaagccagggttgtggaagaaggtgtgcaaagaggactgcatggtgcggggtctccagtccctcctgtgaccacccatccactgcctcagcttccaaagacaaggttccctccaggggtctactctcttaatgggcttcaccaggccccttggcc

SEQ ID NO: 586283 - DNA, 4001 bp, Homo sapiens
taattttctcttctggttaatgtatgccatatttcactcaggggaactgaaacaaaaattaaagttaaaacgtgttattcaacattcacagagataaatagtgttaaattaactttcaaatggtgttcttataagttgcagcatttatagccttgaggttactaaaactgcaggaagacttttgggacaccctgtttttgaataaatatgcttacagcatggctcctcctgtgtttactgtaaaattcagtttagtttttaagtggttccacgtgggcacaggtattctttggccagtagttgtccttatacttagacccaaggagcccttgtccagggcccacactttagaaggcaaattccaaattccctccccaaatggcactgagcctgcttcaagggtctgcacgccagcagcagtgttatctgctaatgtctgtactcccatgggcgaacattgctgactctggtgttcatactcttgtgcccaagaggtggctgggggacagctgcttctgggaagcttgaccgagcttccaccaatggactagagccctgtgggaagagaggaggtggctgcaaaccaggaactggaaatcgcctctccctgcaccatcatatttaagtgcagatcatccaaagtttcaatctggcctttcatgtcaattcccaaggtatatttgtctaggtaggaaggtagaacttattgtacttaatcatttgttaactttgtttataacttttaaatatttaggtatctggcctacagatctctgtttgtacttttgccctgggtcctgcatatattaaaggtgggctgattttggccttaaaagaattattttcccacaaacagatttttctccttaaagagctaggtgggtaggaagtacttccatatggaaggtatgatagcaaagaatgactgcagtcactgagcacatactttgtgctgggtgatttacacatagtttttcagtgagtcctcacaacaacccaataaagtaggtacttaggagaaaacagatattcagtgacattagtttgttccagctcgtaaaactagtgctttagttagccttagttgcataacaaactacgcgaaactgaaagtggcttaaaacaatttttccccctgactgtcgggttggctgggctgctctactgcgggtttccctgggctcactcctgcagctagctgtgaggagatggaggttggcccgggacagtgcagaagattccccgtggcctctcccacctgtctggcagttgacgctgctgttgctgataatgatgaccctcctttattttgtgttatctacttgccattgcaacctccttgccttttttagttcttgctcccgtactgtctggctcgatgcccagcacctggtggtggctaataatatacactcaggtcacttacaagcaatgtgaccctggatgggttacttaacctcacttagtttgtgtcccccaattgcaaaatgggtataatggtacagaacacatcaggtggctctgagactccagcgcagtgattcaggagagtgcttggcaggacagtggcacttggtgcgagcttactgctagtgcagctggaatgtagaccatcagcgaacgtgtgttgcctttttaaacagtgggaatcaaacaccactcgctttccaaatgtaaatcctgggcttgcaagtaagtcctagagtgcagaaataatttcaaaatacagggttgaaattttaagatagcagcttttaaaaactgggagacaaaatcaaaataaaacaaagggacaaaccaacctgaatggcaccccgccgatgctcttcattaatttttaagattccaccctggggctgcttgcttcttccagcatgggaagcgctgacttgatgcggccaggtttctgggaccaggaggttgggacacgacgacgcactttttgccctgtgggtctgggtcatgtgagcctagaggagcgcttaaaggctcgagttctgcagggtcctcgtgactgggtggggctgcctcacttctgcctgatttgggaagcgctgcaaggacaaccggctggggtccttgcgcgccgcggctcagggaggagcaccgactgcgccgcgtaagtgccgcctgccctgcgtgggtcgtgccagctcagcgggacaggtcctcgcctcggtccctcggacttagggagcgcggggcaggtagtctcaaaagccctcagcaccaacaggggagaaagcaccgtagagtgagactggagtggggtggtcgtggccgagtcaaagttcaaattggagcattggggatgtactgcgtgcgcccagccgagggaatactcttgaagtttcctggcacaactgtcgcacccggggttcttccaggctagaagccgtctcctactccaggagctcctccggggaagtacgaagctgtggggtcctctgccgctcttagcgcgggagggtggcgggtgcaggacactttcccttactccctcaacgcgtgttttggggatgtgttgatttcgtgggtgctcagaagcaagagaagcggaaaataccttctattttgaacgtgcccaaagcagggaaacttggcttctgcctaggaacgcataggaagacttttattcttggaatgtaggattagcagaaaccaagggcacaggagacaggtggaagcagctccctgtgaagtgatacagaaacaaaaggactttggaatatttgtggatttaaatcccagttctggccttggctagtgagtgacctcgggcaaattatttaagcctactaaacctcagtctttccatctgaaagatggagataataagtttttctttttaaagaattgttttattggaaatagaaataacatacagaaaatgcctccctagcacgggacttggcttttcagctaagtgtaattttccttatcagttatgattgatgatgaagtctatggtgaagacagaacaaaataatgtttaaaactctggccatataatgactgtggctatgcatgacccgtgtgcagtcacctctgagccccccaccttcactgcaaccccagtgggtcccaagcaaggtgcttgggttttggagctggacaattctgtgcaattcctggttccggtatccactacttggatgacatcagggacgtaacttatcttccacagcctcagttttggcatcagtaaatgaaaaaggagcccctcagtacttgcctttcccttccccggctaaatgtacaactcattttttttccattctttgctttgggatgagtaagaacaaagatgtaagcagagtaaaaagtccattgagaatacattttattagcttggtaaataacgtttaagaaagttgtccaaaaggagaattggagcacttttggaaaagtacactgcaccggctttgttggcatatgaaagtctgcatggtcgtcaagaccgtttggctaactgggcattctagatgtgtacctcatgctagtctaagtacaggggcaaccctttataatgtagtgtcagtgttcttaaccagatgttgttttattaatcttttataggagatgattgtttgggaggggcaattgatcccccaatttatataaatccagtttataaatcactttatagtgggattctactagcctgagaaataggtgggttttgactgacagtttgaatgacttagaagagtgttaagaaagtccactgggtttaccagttcactccccacaaaaaataaaaacaagaagcaaataatataacagaattctaaaaatgagtttgtttttgttttgggaagcatctagtttgtcagaggaaacactgagtgttgaatactaccctgggatgcacagaactaaggcaatgagaggggaggaactcagttcttgccccaggtatcatcagatatctgtttattagcacccaaatactcaaggtaaatagtaatgacccattctttctttttttgagacaagag

SEQ ID NO: 586284 - DNA, 4001 bp, Homo sapiens
ttgaaaaacagcagcagtggtttgagggtactaaaaataaactgtagcatttgctgagttctcagaattaaaaccacggcggtcaacttgttgctgctcttaataagatatgacttctgccccattggctgccactactagaaacttgaactatatcacacacctaacaacaacgtgttttcaattagttggcagtgatcgagaaaggaagtgccatttcccaggaagtaaatctgccaagaaagataacagatggctttcaagtgatcaccttgtgccacatcacaattgcaccttagtcaaattcaccttgcatttatgatttagtgagttacacatctaaagctgtggttgcctttttgccctgcttgctatccaatgcctccaaaaaggtgtttcttcctttgagtttaattcgcgaataataataaaaacagcccaatgggacttaatacaatattaatatattgaagcacttccattaggacttcatgaccttcttgacccttaaatactgtatactaccctaaatgtcttatcagctatccctttgggtttgtcattaaagttttcaatgaccagagaggtacaggaattctacctaatgcatcattctgattagaaacctgtcatactcagaaaccagtgggtctgcctctattgattcctactccttcagattcattagcaatttttttctcttcaattagacccgatgatcaaccatagaaaagctgaaagaagccttccctttgctcaaccattcttaaaaggaaaaaaaatgcatgccttgctagtgaaattacagccactattatcagaaaatctctaaggagtctctctctctctctctctcacacacacacacacacacactctctctctctctctctctctctctctctctctcgtaaatgtgccaagagtcagaggatgggctcgacctctcttcccctaacccacttcaatcaggatcagaaagatacatcccttcattgctgctgtctaaaacccatgcccaagcgagtgtctccatagagctaatttctgaaacaaacaaagaaaatcaagtctgcgaggagcgagggtttgctcccctctgctccggatttgggtgtccagggtagcgggcgcggcacggcaaacaggtcggggcgctctgcttcaccccaaccttctccgccccgccagcccccgctccagctgcgccagaaagtgcgagcctgcccgctcctttcgcttttcgctcgctgcactccaagccccggaacacccgcgtccgcacactaagggcaccaccgctctcccacctctgcgctgtcagatgtcaggcgcggaggtgctctgggcaccgaggtgctggcgaaccaaacaagtatcaccccggacgcctgcccccattccgagagagcgggcgggatggccacaggtaggctctgtccatcccaggctgcggggcgagggcagtggggcgagacccggcgcggcagcagcgcccgacgggctgaaactcaccggaggacaccgacgagccggacaggctggagttgctggacgctgccatctccgcgcgcccctcgcgtcgctgctcgctcagccccggtgcggacgccgccgccgctgccctcgcccggccgctcgcagcctccgcggcccccagcccatggcaaagtcctggggacgcgcagaaagcaccagcctccggactctgcctgcacttcctgctccaccagatgacgcgctgccgccgccgctatttatttgtggtttccgtcccgctccgcgcctttgcacgcttttctatgggtgtcagggggtaggtgggagcagagggaggccgaggggcagccgggacgggcggatctcggctcccgccgagcccctctgccgtccacgctcccctgtgcgcggctgggaccagggcgtcctggcagctccgagccgccccgccagctcccgcaccctctcctgggctcccgcctctcccgccgcacttcgagtagaccgggcagaggcggcgggagacggacagacagagcgacctcccccttctccctccgccccaactccgctcgcgcacacacaaaggaagaagaggagacgcggtcgctcggggggtggttcggctgctgcgggcttgacagctcccgccactggggctggagggggaggctgcggactgctggacagggggaggcgggacgggggaccgggtccccggggtgctggggaggccggggccgggcgcggggcgagcgcggctgctgcgcgcagcgctgctcctaggatttgaaggggatggggagggagggtgtgggggaaggtggtggggctcaccgcgccccgccgggctctcgagcagcgagacagtgggggtgggggatccagagggcgaaggcgggatcactagggccacggtgctaggcagaagggaacctgggatgacagagccactatggagcgctccttccactcctctccaaattgtcctttgttgctctggagctgacggtccctgccctgcaagaaggtgcgtttcctaaaacacccgggaagccaacccagctacacttaagtaacccagccacggacagtgcccgacgcgtccgtgggcctctgaggttggccttcaaagaaatagagccgtccaaacgtgtcatcaggcccacacaaagctggtgtcaaagagaaagaggttctccgtgccttgcaaaaaaagattctcacaaaagacttaagacttggcagcaggtccgactgtgccctttcaggataggaactgctcaggtgtgtgagagaaagagactcgagcacaaggtgtgtcccttccccctgtatttaaacctaaattaatttcactgggaggaaataccatgcagattttttttaagtctgtttcacgctcccagcgggctaatcggttctttcaatcctaaagcaacagaaaactgtgaaatttgaagagaaattgttagatcaaaggaaaaagcaaacattaaaggaatgaaagtactctcattatatagcaaaaatggaaagtgttcacattggggtagttcaactttttaaaacatggttaaaagaacatagtcaatttaaaaattatcaggagtgacacagaacagcagctaggccctggggatccacatcaaccaaggacctaacatacagtgaataatgaatgttaaataatcacagtacgcacccacgtcacattttctagttgattagaacttaaaaaaaaaaatccctccaggatactatcccagtgtgtcttctcattaaggtccattttttaaaaatacaccttgctaaactgttaaaggagtgtgagcactcttcagtcacgtgggactgcgtcttcctacccctcaactgtatggaccttgaaacagccctggctggtctaaggagacccaagcgcccgcattttcccagcccctaccactatccttcattttgtggactgcacgaaatgatgcagttcctaatctggagccttcagggacacgtgacccatcacacacttggcttgttgatcagatcagaaggaacttactgtttccccagagttcttctgatagaaaacagcacttacttgtttgactagtaatctatgtagccccccagatctttagatggtggactatctgacttggctatgtcgcccggtagaattttaccatctgggcttcgaagacaactgggttcaaactctggttctgtcacttagctgcgaacttgagcaaattacttagacctactgagcctcagtttctacacctgccacaaaaatctgataacacaggatgctgtgaagattaaataagatgctatgtggaaagctacagtgtacctggcatgaagtttgtgttccaaagtgattgtaagttgctcactttaaggaaggaatgtatagtttgaaaaatttttgctttcttcattgcatctggagataactaatcaactgtgacctgttctactagggggaaatgtcttat

SEQ ID NO: 586285 - DNA, 4001 bp, Homo sapiens
aaatctccttacctctcagactctgtatcactcagttcatctgagttgctacaatggacaataaaatctaataagttaaaatgaggtatggaatgctcaggagaaaaacaacaaggactagtactcctcatctgagtaaataatttctctcacagggttaattttagctttgcaagttttttatttgagattatattttaaatcacaatttgtgcacgtgtgatttaaaataaaaaaggcaatcaagtctttctgccagtctaggtgatgtgaaatttaattatcgagcagttatcattaaaataaacgcaaagcaattttttagacataattgaatattccagaagaaaatttctgaaaaatccaaaggtccaaaagaaaacttctcagtgagaatgtctgtttcagtaagataccctgttttgtagtattggatgcagagaatttctagttagacatacataagtcttgccagaattactatagttcagttttgccacctgcatctagaaatatggaagacttatctacgttactggttttgactccccaataatgagtaatgaaaattcctatttatcatttctacatcaacatcagtgtgatagcagaaaacagcatgatttacctggcccacaatactgttgtatagaatttaaagaaataaatacctcaatccattcaggaatgttcttttcccaattaaggttttgaagactgcacctaatactgacttgttatctttttctgtttgcattttaattttaaaagtctgtgtcaactttattttgataatacagtgggtttacgtttccaaatcttaacttcttatccccagggttcctttaatatttaatgttttacccttttcagttactgagaacatctcatatcttctttatttattgatttgcttgggttgatttttttcttgactgtgaaattatccatttggcaatcatattgctaatatgcaaaaagttcttattttaattatacaagcaaatgtaacccatgattattaagaagactattttgcaaattggccgttgtttatctcagaatataaccaagaaccacaggctaaattagaagcttaaggataagaacttttttttatttttgcaatttaaaataataaaggtaatcaaagcttcctgccaatctaggtgattgtgaaatttaattaccagtagttattaaaacaaaggtaaagcaatttcttttacacataattgaatattccagaagaaaattcatgaagagttctcagaaaatgtatttttaaattaattgtaacctgattatttcatttgttatgtctcagttggtaccatagaataaatgacacatttgggcgatgtagtttaacagcagctagtgagagcaaattctcaggaaaatcaggcaactttgaccttaatgctgagcaaattattagatctttactctgcaaacacaaacatacctaaatctcccgcagctattcctctatgagaggtataacccatgttgacttcacctctgtctatgctggatgctacagaattaactgttcctttttcactgctcaattgcccaaatgtcctacggcttccagagctgttccatcaaacccactgctacctgaacagaaagaaaacctcctacatcagcagcagcaatgagtgagctggcagctctgtgcatgatgctgcttatgggcctgtaagcataactttcccaagaaagaaagtcaaaataatgccatgaacttacccatctccaggcctttacctaagctcttctctcttcctgaaatgtctttttctccatttgttttccggaaaaattctactcagctttcaaggcccaactcatatgacatttccactgacccctctaatttgactaagtcaattcctctcctctgcacccttctccacagaatttgttttatcaaactggaatagaggttgctgtttgcatgtttgtctcggctgctggaggataagggaaaaggatcttgactcatctttccatgccaaacactcagggctatgcctgaaacctggaaaacactcgcgtgcttatttaatgaagcccaaaattcaagatcaaatttaacgtgtgatgaaagaagtggattgtgtgttggattcatgtctccacctaaattctgagcccgtgaatgccttctttttcattcctcaaagaagtaaaatttattcacattaagcatttattaaatgctaggccctgtgctaaatactccacacacattatttcattcaatccccaagacactctaccaagtaggtcttatcatcagtatcagcctcatttacaaaagaggaaattgaggcttggagaagttaagtaactcactccaagatacccagctggtcggtgatgaagccagaattaaaagacaatactcccagaacttcagagctagagggaatcctacaattatctttcccccttagccttcttgaagctgaggtttataacttactgcctggcacatagtaggcccttgaaaatagtgattaatacattgacggagtgccctaatttctcagattctggccttcccctgagagagcccagctgccaccacaaatagactctattctttctgcccaacacctctcacaggtgtgaattgcttgtgtcatctgaattattcatgatccacacaatggtaagtgtgctttaaaagagaactacaatgctgtatttttcaagacaaagtgcctgattaattggggaattaggcagtataaactcatgggctaggctgattcatgccaaacaatacatccatgcccactttttgaatttcagttttcacataatttcccattttcccttaggattaaaaataggggtaaataaagcaggaaaaagaactatcatgggcatctctaacctatctgaaagcaattaccatcatctaaatctcatactgtgttgtttcaaaccaacgtattcttccgaaggctgacttaggattttcaatcaggtttcttaagctacatcaagatctggaaattcagatgccacagcagctgtaattcatgccaccagtaaatcatgtgacaccaccagctccttgtcctttctcctttcgtcttttcttttgccccaccagttcattttctagtgggcagttttctgagagggataaccatatgctaatagaaagccaacaccactgtattttaaattcaatgttagtcaaccaaaatgaattgaaaaacagcagcagtggtttgagggtactaaaaataaactgtagcatttgctgagttctcagaattaaaaccacggcggtcaacttgttgctgctcttaataagatatgacttctgccccattggctgccactactagaaacttgaactatatcacacacctaacaacaacgtgttttcaattagttggcagtgatcgagaaaggaagtgccatttcccaggaagtaaatctgccaagaaagataacagatggctttcaagtgatcaccttgtgccacatcacaattgcaccttagtcaaattcaccttgcatttatgatttagtgagttacacatctaaagctgtggttgcctttttgccctgcttgctatccaatgcctccaaaaaggtgtttcttcctttgagtttaattcgcgaataataataaaaacagcccaatgggacttaatacaatattaatatattgaagcacttccattaggacttcatgaccttcttgacccttaaatactgtatactaccctaaatgtcttatcagctatccctttgggtttgtcattaaagttttcaatgaccagagaggtacaggaattctacctaatgcatcattctgattagaaacctgtcatactcagaaaccagtgggtctgcctctattgattcctactccttcagattcattagcaatttttttctcttcaattagacccgatgatcaaccatagaaaagctgaaagaagccttccctttgctcaaccatt

SEQ ID NO: 586286 - DNA, 4001 bp, Homo sapiens
aagggcctgctcaggagactctgatggctccagggcccaggaatcatcatctttccaccatctggcccaccccaactgatgatttaaatgtgatggactcctttctgtccccgaggtctctcccctgcaccttattcgctcctggcacatttctgactccaagttctcactcctgttgtttgcatagcccgggtgctctttctttcccctgtataaccatccttgatctatttatctacttgggcttcagccaactttccacctacccacgaggattcttggttaaggctgagagaacaaccacactgtctcttacacaggatctccagcactagggagccccctcctctttgaatgctcacagaagcttgtcttttactcctgtttttttatacatcaccacagggtcagcttcagggcgcatgtgacctgcgctgttgcacagagccctgtccttagcatggtttaatgtgctgctgtcatagttttgaaagtctcaatttttttttttaacaagaacctcatattttcattttatactaggtctcacacattacctgcccagtcctgcataatcaatcacacatattagtgtgaactaatagctacatcataaatttgattataaagtataacacatactctgaatatgaaccagctacagcaaatagacactttcaacttgctactaaaaatggaagctcaccagctattttaaagtttttttggtgcctcttttaatgaagaaatgcttggtaaagataagagacaaagaataactaagtttcaccactttctatcagagcaatgaagcactgataagaaaaatccatgaaaacttttctttacagatgttaaaatcaatagccatggaaatcagcagttatgcctggaccaaggggttgacacttaggagcaattagattacatctaaagaccttttttcatggacataaaaatctttaatgaaactgtaaactttaacattactgacaatgcatcctttagggtgaggctagagatccttcctattgagggttcctgaaaatgtcaattacagttcctataacgggttgcatcgtatatcccccgaaaggtgtgcttcactcctaaccctgggtcactgtgcatatgaccttatttggaaatagggtctttgaagatataattaagacgacatcatactggattagtatgggccctaaatcccatggctggcaaccttataagaagatgacagatatacagagacatacagagaaggctatatgaagatggaggcagagattggagtggtgtgtctacaagacaaagaacgccaaggactgccgcaaccacaagaagctaggagagagctgcagggcagtttctctttcagagcctccagaaggacccaaccctgcccataccttgatttcagacttcccagccttcaaaaccaccagcaaataaatctgtgttgttttaagccaccaagtttgtggtcatttgttatgacagctttaatagaaagtactttttaaaagctaggagaaaaatgtgtgaaatctaaatctaaatcatctaagtcatccatttactttttaaacaaacgaggggtataaaccagtattggctacaggatggaatacattcaaggaaataaccatcaggctttatttcattttctcttacatataattaatgagagaagaagaaagagatggtagaaaagagacaaaagaaaaaaagccatgaagaagagagggtagaaaataaaagactgaaaaagctagatacaaaaatacaagtgagaggcacaaaaagataataatagatgctaacatcaaatgaatacttactgggtgccagagaccacgataagtgactcgcatgtattctttaaacctcccaacactcccattttatagatgagggaactgaggcagagagagctgagctctttggaagaacatggtgtggccaggagtactatgcgggctaaagctacctcagcactgtgctaagtgtgggcaggaagccgagcaagccgactgccgggcctctggggttggctggcctgaagattttcagagctcagccataaggtattattagggtggaccattcaaaagagagctgttccagttacagcagagtgcctccttaaatcaactagataaacagagatgcagttataaaatgagctaaataaccgagtggtttttctcttgacaaacagttttcattttagagaggagtctgttaatttcaccattcctccaacaaatacgtctcagtgcctagtaggtacaagtaaccctaggaaatccaggctttaaataagcaaagattgcatcagcacacagtgttgaaaagtatacaattattgcatgcgatgaggtgccaactgtcctttggttcccaaagcttttgttctcagagccgaattttactttgcttagacaagctttgtttgagaagcaaaggcagtgactgtgagctttctgagagaatagagcgcaaggtcccaacttagggaatgttgggggtttctattcattcctcttgacaaagttcctgggcagagcaaaggaaagggctttttacctggggtaatagttctgactggggcaaacaatcttgttatggggtaagaagagaaactctactggcaaatttgaatgtcaggtaggaggcctctagaaaaaagtgcaggccgggcgcggtggctcacgcctgtaatcctagcactttgggaggccgagacgggcggatcacgaggtcaggagatcgagaccatcttggctaacacggtgaaaccccgtttctactaaaaatacaaaaaattagccgggtgtgttggcgggcgcctgtagtcccagctacttgggaggctgaggcaggagaatggcatgaacccgggaggcggagcttgcagtgagccgagatcgcgccactgcactccaacctgggagacacagcgagactccgtctcaaaaaaaaaaaaaaaaaaaaaaaaaaaaaaaaaaaaaaaaaagaaaaaagtgcagacagcacctagcaaagcctattatctgatgagcatgaaaatgtgattatttgttctttttattgactgcttactatatgctatgcacatagtagcctcaaatattaacccgaattacaaatcaagaaggcttctgaataaagcccattagaagttaatgtaaataaaaagctaatgtaaaattaaggtctgaaacacaaattccaagcagatggcagggacctaggataagaattttcttcctttagttcagttcagtggcttgtccctaaaaacctgccactgtatttatagcctgagcctgctttttgaatgttcttccaaaaaccatgtaaagtttccacctagagttagttgcgggtgaggagtggggagattgagggtggaaagggcaaggaaggacaaaggggatgcctcatctggcccctgccactcattcttaaggacagtggcaccaacagtaccatcgaatgccacaatcaactgtcacagctacttgaggtctgctaagtttcaaagatgtctgtttaaaacatggaagagaaacgctcctgtctggcttgtgtactcctcttgaacagcttctctattttgtgccttttcttctttcaagagctgttaacggtgaatagcttttgagtttttaaacaaatattagaagagctgctggtgttttccagtgataagtaatatattgtgttagcaacagtactacttaaaaaataagatttaattatcttttagttttaaaatgtcttaagattaattttccattcagggatctaacattaaaaggactgaaattagttttgaaaatatcaactatgtatatttgtgtgtttttaacacaagctcagacacagaatatacatggacaagctactccatgcaaacatattatagtatggcataattccaatttcttaacgccaaatgaattggaattttcaagaggaagaaaaagaattta

SEQ ID NO: 586287 - DNA, 4001 bp, Homo sapiens
caaaaaacatcgaaccctaatttaacaccaatgaatgtgagactttctaagacctgagaaggagggaaaaaacagaaagaaaccatgatggaaaataagccagaattgctccaagtcgcccgacgccgattgccaatggaaaggcagaggcaaggatttacaccagcccaaaacagggccagtgtctggggactatgcacacatgttgctctcacctgagcaccttcttgtagggcttgttggggtccctgtagtaggggacaatccggggtttgaagtcttcatcactttggtctagccgagctctggaatctggattctgtggccctcctcgctcccctacagcctcgacacagggatcttctccctccccctggatccaggaaacccgcaggaggctcaggctgcaccccagagacagccctaagatgaggggaagcgctggccgcagcagagccaacagggagctcagtcgcatggtggtaggccctgccaggtgggtgccccaggggcacagcctcaaggatcaatggattgatgggcaccaggccagtagtaggctttcagttttaaccagagaacctggggtcaatgaggccaaagacagagcgaggcccgctggcttccaggaccagcatccccaagaagattgtcctgtcttcacaactccttctgcctgctcttcaactgtgaaggtgtcggaactaacccccagccaaaacggtaataaatgaaacaatcaatttcactcacactgggattatggtctgtcttccactaaaaagaggaggaagtaaaactcaatactgccaaagctaacccaaaaaggaacactacacacatctgcagactgggcctaagtcaacagatgacagcaagtgataagaggtaagggaaaagcacacgatccatcaaaacaacagccccaaccagaggagccggagcctgcctcagtgggcctttccggaagaatgcctgcctctggcatcggtcctcaggcgggctactgaaggggctgctgagccactgcggcaggcccggtgggcacaagggaaggggccagagcctctttctactctgctccccgtgtttgagaagacgcaacggctacaggaacccctcctcccactcaggagcggtctggagccactcgcatggcacacataagttctgcccacccgaatgaggtagatcggtgactcagcactgacagcctctcaggagcgccatggccgatggagccatcttgcagggcattctcctcggaaccccagctgctgaggagacagcaggcggggactggaactctgtgtgcgagcgattcggtgcctggttttaccagggccccaggggccaaatgaagcaaaccaaaagcaaagagagagcacaagcagcaactagagacaatgccagggtcctgggaacgcaaacagaagcgcggccagcttccgacaggacccctgccgggggcccacagcccctgcgctacctctcggcgatcagagaccaagtctagccctagaacgaagacccgacgcgagtcttcgccgttcgtctcaaaacagaaataaactggccacgtcaccgggctgctgagaagggggctcgggagaccagctcgggtcgttctgcgaggcggggtcggaggtcgcggctgggagactggggcacagacctcgttctcaggccagtcggcgggagcggaggccgcgccagagacagcatcgaggccgcgagcgcaggaccaggagggacgcccaaggccctcggggaggaggcccgggtttcagggccgggggccggcggacaccggataaaggacggccggggtctcccggcgtcccgggagggggcggggcggaggcgtggggaccaagagcggcgtcccgcacgcgcctggcagggagcagggacggggaagggggaacagaccccagtgcccgctgaggcgccggctccgccgctgcagccgctgccacctcacagcccctgtccgcagcttcctcttccgctgcctgtcagtcacccgtctctatggtgaccgcatccggccgctcgctccgcccgcgcgttctctatggtcgctcccacggcctctcagcaccgcgcacctcctcggctgggatccgggctgcctggccccaaccggccgccccccgataagacgcgttcgcccccacatacgcgaatccaggcaaatccagagtggaccaaagctgccccgtaacttgggctgaacaccatctgccctggaaaaagcatacccccaccctcgagagcgcttttctcccaattggctgtggaatcccatcagcctttcagttgcctaagaaatgtttgttgtttgccaggcacgtacgttcatctaaggatgctaagttccgggcatcttcgtgagtgctgggtaaacaagcggtggacgagatgggcatggtccctgctctcagggaactgaaagttgagggagacaggtaataaacacgcttgacatagcaagaataaaacaggtagaaatcccagtctgataagtaccattgcagaaaagcacagagtcctgtggaaaaactaaacaaagtattaaattagactgggaatttggcaatgctgagatccaaaggttcaggaaaagttatccagacatgaagtggacagttttccaggcaaagaaaagagcaccagaatgtcctgagagaggaaagagattggcttggagaagaactgggaaggcccagggcatctttgagcctggtgaggggagaacagcccaaggtaaggctggggaacagggaacaggtaaagcattcagaccaccacagtggttccccaaccagaatggcaccctccctaaggagcaatttggaaatgttcggggcaattttgttgtcaaatgattgggggagaggagccaaggaggctccatgtcttgcacattgcaagatggtatcacacaagaaaactgtcctgatcccacacagctttcacatgtcctactgaatattcatataggttaaaaaaaaactggttataatcatctgatgtgcctgtgtcttatatacaaaaaacaaagtaatcttgtaggggtgtaaaatgtgctgaatttttaaggaatgtaaccaccatgttaacagaaggaagattatactttgttgtgttcaggaatttattaggaattactcaccattttggagaactgggtcactgatagcagtgttattcatagcgttcagtctgcatttgtactgtcacattcaaggtgctcctatgcataactactagcatctgactaattatgctttctagcatactgaaaagtattatcttattataaaggatttccttttattctttctgctttggttcagacactataattttttttgaaattatgtatgtagttaggctatactatctataaacttcatttcacaatagtaaatggggagttataaaaatgttattaaaatggaacattggggctggtaaagttaagaaccactcaagaatatcttgtatgtatatcttatagataccattctaggagtatataagatagaactcactgatattgcctaccagcacctgttatccctgttttagtctcatccttagactgcaactgaatctgttctcatcagctggcacatgataggttgtaaatgacttgttggaagagactgggaaacagcagatacacttagctcaaggtcagaagatttctagaccagcgctgtccagtagaaatctagtgcaagccacaaatgtgagccatatatgttgtttaaaattttttagtaaccacattttttagagttaaaaaaggtaaaattaattttaatattttattgtattattagatatatcccaatcatttcaacatggagtcaatatgaaaaattattgatgagatactttacattctttttttatatggaatatttgaagtctgatgtgtattttacacttaacagcaaatctcaattcagactagccacatttcaagt

SEQ ID NO: 586288 - DNA, 4001 bp, Homo sapiens
caggggctgcgcgccggaccgctggagggtgtgtggcacagcgtggggactggtcgctgtgtgcttgtgtcgctggctgcgtgtactaggggatgggcaaatcacacggctgccgcatacccactgccacccagcgctaagaaaagagcaggaaaagcaaaacaaacaaaaaagaaaagaagacagggaaatagaaagtcgatgtgggggattccggagcttgaggagtgggaggcgccgcgctcttcttggctcgcggcgcctgggctggcagacttggagccctgggtggccgcagtcacagacgtgctgtggcggtgaactgacttaaagacgcgggagggcggcctgggtgaaatgtccaccgacagttctgctggctttacgcgtttacctccaattctctgttctcctccagcctctctgcccctggcgaacctccctgctggtatttccgtacatgcaagagccttggcatcatcgccagggactggcgggtcggtggactcagcctgggacaattctgtatctcagggcagcctcgaggacggcaatgggcaggaagatagagaaagggatgcggatgctggaggcggacggaggcaaagggtgtgccgccgtgtgtgtcaataattctggggaattttcacctctcccagatgagtctctacttaccccgtgaggggccccaggggcgccgggcagcgcgcacaggtggaatttctgcgcgtctaccggcaccaggcatggaccgcacctgtccgtgtccgagagctacaagttagcggcgattgcctgggacctcaggtgcggactccaagggacattgcgggcggggaggggtgcagcggtccccagtctacgaccccggggactgcccgggcggttcaggacccattgtgagttaggtggcgaagcccaggcactgtctggtacctcatgagcttcgggctgagaccttgtcccccagccacggcggacagtccagctcctgcgcggggctcaaataggatgggattgcagaatgcttccctctcctttgtcttgggaccctttcccccattctaattgcttctcctccttggccatgacctggagaccgcaatgggaaacctctccagcgcccaagggctgctccgaaagcggagccgggggacagctcggagcccgagcgagccgggcctccatcccacacgcacagaagacgcggtcagaccccagcaggaaggaacccgaggggcgggagggacgaagctctccttgtcttgtccatggctgcatctggagtgggtggcgggaggggggtcagcaacagtagagggaatggggggctggaatagggagcgacgccgggacagcgcagctcccaggctgctttcgccacattcggctggactcagtgaccgtcggaatcgtaggggtacctcgcctcgcgctgtgcctcgtttgccccttcctttcagacccgccatcactgctcgcaaccctccaagccccaggatccaaagtttccgtttgagaatctgcacgtggggaggacctccctccaattcccccaagccccgacccctgagcctccggcttggggggatatgaagggagagaccccctggtgccagggcccttggagtgggtaagcggagagctgcacagcgcggggcccttacctgtcgctggtttcgctccagttgcctccccggctgcgaggtggtggaggcttgaaggagcgaggagtcctttgtgggttcagggccgatccgctcgggctggagctgcgcaccgcttagagtccgaggccagctgccggttctctttctcccttgatcttgcaaaagaaaaggaaaagattagttgatgccgagacactgtaggggtggggcgggagaggcgggagaggcgggagagaaccgaccccaaggctctggcgagagctgcggggctggcgcgcgcgcaggcagagtcacgcaccccacactcgtctcagccacttggctagtctgtgacctgttcgtggtttagactggagttaaattgacgctgcccccgccctccacgccaaaccactaaaggagaagcaaacaagactttcaaacctggctttcacgaagagcctggagaccaaaatagaatggagacctggatgcctcggcgagctgggctggattcatttcttcaccaaagtgcttggggaagtaggaattagttttgggaggcaacacctattcgggtacctcggcgatttcctggtgaaatctgcgatttccaggctctggccaacccgcagcctggagtgtgtgagtgtgtgtgtgtctgtgtgtgtgtgtgtgtgtgtgtgtgtgcccgcgcgcgctccctaggtctttgcgccctggcgcctttagtacagcaggagagcgtgtctgtattcgtgcgtgtgtgttcgattagctgcaatgggcggacaatttctggagagaacatttacaattttctttcagtatgacaggattagttgctgttgaaggcgctcctccaatgaaatcttctgtgctctctgatttggcggttcttctgagcaaatatgacagccgtttctccaggctctttttcgcttctctccatttccatccccagagcccagctctccatctgcaatttctacatcagaaccacccccaaccccgagtcccttccctgcaagtgtgtgagtgctacaaaggtgacatggcatattgggaagaacgcagtattgctttttgtttgtcggagatacttaagcccagtttttccaggtgggaaaatgttagactaaatccactatgctttgtaaatatataattgtgctgaactattcacagattgtttatttctttggagctttgacaaatgtatccgaaggagaagtaatttttttctcttactttaaatatgagccagtgaccatgttttcttcagctaatgggcagtagactacagaatatatctatatctatatctgtatctatatctatattcagaatatgtgtatatccagaatatatatatctagaatatatatatatatgtccaggatatatatatccagaatatatagatatatatatccagaatatatatatatatatccagaatatatatatatatatccagaatatatatatatatccagaatatatatatatccagaatatatatatatatatatgtccaggatatatatatccagaatatatatatatatatatatatatatatatatatgtccaggatatatatatccagaatatatatatatatatccagaatatatatatatatatatgtccaggatatatatatccagaatatatatatatatgtccaggatatatatatccagaatatatatatgtccagaatatatatatatccagaaaatatatatatatccagaaaatatatatatatatctcaaaaatatatatatatatatctctctcaaaaaaaaaaatatatatatatatatatatctccagaatatatatatgtttgatgcttcagggaatttgtgatctccatgaaaaaagatttaggatgcaaactttctgtgttcagacctgcctttgatgtttatttctttattttaatgagaaatttctgccaataattgtatctattatttttagatactaacctcatttgataaaagtacaatgataggattctaaagtgtagcttaggccaaaacttgcttttgtaaaagcatatgtgtatgtgaatataacatcaatatattatatattacataggctttattttctctcatccaacttcaatcaaataaagagcaagaagtggaaaccttaaattgaatagcccagaattggacacatcactttttgggtcacagggatagacaaagagcaagttaaagatacattgatataatataatatagtcaattaaattcagttcagttcttgacgtccagggttttgctaggtattaaaggccatccacaagagcaaaaaccactgtccctg

SEQ ID NO: 586289 - DNA, 4001 bp, Homo sapiens
accctggcggtggctgcaggcgtcccgggctgtggagcaggggctgcgcgccggaccgctggagggtgtgtggcacagcgtggggactggtcgctgtgtgcttgtgtcgctggctgcgtgtactaggggatgggcaaatcacacggctgccgcatacccactgccacccagcgctaagaaaagagcaggaaaagcaaaacaaacaaaaaagaaaagaagacagggaaatagaaagtcgatgtgggggattccggagcttgaggagtgggaggcgccgcgctcttcttggctcgcggcgcctgggctggcagacttggagccctgggtggccgcagtcacagacgtgctgtggcggtgaactgacttaaagacgcgggagggcggcctgggtgaaatgtccaccgacagttctgctggctttacgcgtttacctccaattctctgttctcctccagcctctctgcccctggcgaacctccctgctggtatttccgtacatgcaagagccttggcatcatcgccagggactggcgggtcggtggactcagcctgggacaattctgtatctcagggcagcctcgaggacggcaatgggcaggaagatagagaaagggatgcggatgctggaggcggacggaggcaaagggtgtgccgccgtgtgtgtcaataattctggggaattttcacctctcccagatgagtctctacttaccccgtgaggggccccaggggcgccgggcagcgcgcacaggtggaatttctgcgcgtctaccggcaccaggcatggaccgcacctgtccgtgtccgagagctacaagttagcggcgattgcctgggacctcaggtgcggactccaagggacattgcgggcggggaggggtgcagcggtccccagtctacgaccccggggactgcccgggcggttcaggacccattgtgagttaggtggcgaagcccaggcactgtctggtacctcatgagcttcgggctgagaccttgtcccccagccacggcggacagtccagctcctgcgcggggctcaaataggatgggattgcagaatgcttccctctcctttgtcttgggaccctttcccccattctaattgcttctcctccttggccatgacctggagaccgcaatgggaaacctctccagcgcccaagggctgctccgaaagcggagccgggggacagctcggagcccgagcgagccgggcctccatcccacacgcacagaagacgcggtcagaccccagcaggaaggaacccgaggggcgggagggacgaagctctccttgtcttgtccatggctgcatctggagtgggtggcgggaggggggtcagcaacagtagagggaatggggggctggaatagggagcgacgccgggacagcgcagctcccaggctgctttcgccacattcggctggactcagtgaccgtcggaatcgtaggggtacctcgcctcgcgctgtgcctcgtttgccccttcctttcagacccgccatcactgctcgcaaccctccaagccccaggatccaaagtttccgtttgagaatctgcacgtggggaggacctccctccaattcccccaagccccgacccctgagcctccggcttggggggatatgaagggagagaccccctggtgccagggcccttggagtgggtaagcggagagctgcacagcgcggggcccttacctgtcgctggtttcgctccagttgcctccccggctgcgaggtggtggaggcttgaaggagcgaggagtcctttgtgggttcagggccgatccgctcgggctggagctgcgcaccgcttagagtccgaggccagctgccggttctctttctcccttgatcttgcaaaagaaaaggaaaagattagttgatgccgagacactgtaggggtggggcgggagaggcgggagaggcgggagagaaccgaccccaaggctctggcgagagctgcggggctggcgcgcgcgcaggcagagtcacgcaccccacactcgtctcagccacttggctagtctgtgacctgttcgtggtttagactggagttaaattgacgctgcccccgccctccacgccaaaccactaaaggagaagcaaacaagactttcaaacctggctttcacgaagagcctggagaccaaaatagaatggagacctggatgcctcggcgagctgggctggattcatttcttcaccaaagtgcttggggaagtaggaattagttttgggaggcaacacctattcgggtacctcggcgatttcctggtgaaatctgcgatttccaggctctggccaacccgcagcctggagtgtgtgagtgtgtgtgtgtctgtgtgtgtgtgtgtgtgtgtgtgtgtgcccgcgcgcgctccctaggtctttgcgccctggcgcctttagtacagcaggagagcgtgtctgtattcgtgcgtgtgtgttcgattagctgcaatgggcggacaatttctggagagaacatttacaattttctttcagtatgacaggattagttgctgttgaaggcgctcctccaatgaaatcttctgtgctctctgatttggcggttcttctgagcaaatatgacagccgtttctccaggctctttttcgcttctctccatttccatccccagagcccagctctccatctgcaatttctacatcagaaccacccccaaccccgagtcccttccctgcaagtgtgtgagtgctacaaaggtgacatggcatattgggaagaacgcagtattgctttttgtttgtcggagatacttaagcccagtttttccaggtgggaaaatgttagactaaatccactatgctttgtaaatatataattgtgctgaactattcacagattgtttatttctttggagctttgacaaatgtatccgaaggagaagtaatttttttctcttactttaaatatgagccagtgaccatgttttcttcagctaatgggcagtagactacagaatatatctatatctatatctgtatctatatctatattcagaatatgtgtatatccagaatatatatatctagaatatatatatatatgtccaggatatatatatccagaatatatagatatatatatccagaatatatatatatatatccagaatatatatatatatatccagaatatatatatatatccagaatatatatatatccagaatatatatatatatatatgtccaggatatatatatccagaatatatatatatatatatatatatatatatatatgtccaggatatatatatccagaatatatatatatatatccagaatatatatatatatatatgtccaggatatatatatccagaatatatatatatatgtccaggatatatatatccagaatatatatatgtccagaatatatatatatccagaaaatatatatatatccagaaaatatatatatatatctcaaaaatatatatatatatatctctctcaaaaaaaaaaatatatatatatatatatatctccagaatatatatatgtttgatgcttcagggaatttgtgatctccatgaaaaaagatttaggatgcaaactttctgtgttcagacctgcctttgatgtttatttctttattttaatgagaaatttctgccaataattgtatctattatttttagatactaacctcatttgataaaagtacaatgataggattctaaagtgtagcttaggccaaaacttgcttttgtaaaagcatatgtgtatgtgaatataacatcaatatattatatattacataggctttattttctctcatccaacttcaatcaaataaagagcaagaagtggaaaccttaaattgaatagcccagaattggacacatcactttttgggtcacagggatagacaaagagcaagttaaagatacattgatataatataatatagtcaattaaattcagttcagttcttgacgtccagggttttgctaggtat

SEQ ID NO: 586290 - DNA, 4001 bp, Homo sapiens
cgaacctccctgctggtatttccgtacatgcaagagccttggcatcatcgccagggactggcgggtcggtggactcagcctgggacaattctgtatctcagggcagcctcgaggacggcaatgggcaggaagatagagaaagggatgcggatgctggaggcggacggaggcaaagggtgtgccgccgtgtgtgtcaataattctggggaattttcacctctcccagatgagtctctacttaccccgtgaggggccccaggggcgccgggcagcgcgcacaggtggaatttctgcgcgtctaccggcaccaggcatggaccgcacctgtccgtgtccgagagctacaagttagcggcgattgcctgggacctcaggtgcggactccaagggacattgcgggcggggaggggtgcagcggtccccagtctacgaccccggggactgcccgggcggttcaggacccattgtgagttaggtggcgaagcccaggcactgtctggtacctcatgagcttcgggctgagaccttgtcccccagccacggcggacagtccagctcctgcgcggggctcaaataggatgggattgcagaatgcttccctctcctttgtcttgggaccctttcccccattctaattgcttctcctccttggccatgacctggagaccgcaatgggaaacctctccagcgcccaagggctgctccgaaagcggagccgggggacagctcggagcccgagcgagccgggcctccatcccacacgcacagaagacgcggtcagaccccagcaggaaggaacccgaggggcgggagggacgaagctctccttgtcttgtccatggctgcatctggagtgggtggcgggaggggggtcagcaacagtagagggaatggggggctggaatagggagcgacgccgggacagcgcagctcccaggctgctttcgccacattcggctggactcagtgaccgtcggaatcgtaggggtacctcgcctcgcgctgtgcctcgtttgccccttcctttcagacccgccatcactgctcgcaaccctccaagccccaggatccaaagtttccgtttgagaatctgcacgtggggaggacctccctccaattcccccaagccccgacccctgagcctccggcttggggggatatgaagggagagaccccctggtgccagggcccttggagtgggtaagcggagagctgcacagcgcggggcccttacctgtcgctggtttcgctccagttgcctccccggctgcgaggtggtggaggcttgaaggagcgaggagtcctttgtgggttcagggccgatccgctcgggctggagctgcgcaccgcttagagtccgaggccagctgccggttctctttctcccttgatcttgcaaaagaaaaggaaaagattagttgatgccgagacactgtaggggtggggcgggagaggcgggagaggcgggagagaaccgaccccaaggctctggcgagagctgcggggctggcgcgcgcgcaggcagagtcacgcaccccacactcgtctcagccacttggctagtctgtgacctgttcgtggtttagactggagttaaattgacgctgcccccgccctccacgccaaaccactaaaggagaagcaaacaagactttcaaacctggctttcacgaagagcctggagaccaaaatagaatggagacctggatgcctcggcgagctgggctggattcatttcttcaccaaagtgcttggggaagtaggaattagttttgggaggcaacacctattcgggtacctcggcgatttcctggtgaaatctgcgatttccaggctctggccaacccgcagcctggagtgtgtgagtgtgtgtgtgtctgtgtgtgtgtgtgtgtgtgtgtgtgtgcccgcgcgcgctccctaggtctttgcgccctggcgcctttagtacagcaggagagcgtgtctgtattcgtgcgtgtgtgttcgattagctgcaatgggcggacaatttctggagagaacatttacaattttctttcagtatgacaggattagttgctgttgaaggcgctcctccaatgaaatcttctgtgctctctgatttggcggttcttctgagcaaatatgacagccgtttctccaggctctttttcgcttctctccatttccatccccagagcccagctctccatctgcaatttctacatcagaaccacccccaaccccgagtcccttccctgcaagtgtgtgagtgctacaaaggtgacatggcatattgggaagaacgcagtattgctttttgtttgtcggagatacttaagcccagtttttccaggtgggaaaatgttagactaaatccactatgctttgtaaatatataattgtgctgaactattcacagattgtttatttctttggagctttgacaaatgtatccgaaggagaagtaatttttttctcttactttaaatatgagccagtgaccatgttttcttcagctaatgggcagtagactacagaatatatctatatctatatctgtatctatatctatattcagaatatgtgtatatccagaatatatatatctagaatatatatatatatgtccaggatatatatatccagaatatatagatatatatatccagaatatatatatatatatccagaatatatatatatatatccagaatatatatatatatccagaatatatatatatccagaatatatatatatatatatgtccaggatatatatatccagaatatatatatatatatatatatatatatatatatgtccaggatatatatatccagaatatatatatatatatccagaatatatatatatatatatgtccaggatatatatatccagaatatatatatatatgtccaggatatatatatccagaatatatatatgtccagaatatatatatatccagaaaatatatatatatccagaaaatatatatatatatctcaaaaatatatatatatatatctctctcaaaaaaaaaaatatatatatatatatatatctccagaatatatatatgtttgatgcttcagggaatttgtgatctccatgaaaaaagatttaggatgcaaactttctgtgttcagacctgcctttgatgtttatttctttattttaatgagaaatttctgccaataattgtatctattatttttagatactaacctcatttgataaaagtacaatgataggattctaaagtgtagcttaggccaaaacttgcttttgtaaaagcatatgtgtatgtgaatataacatcaatatattatatattacataggctttattttctctcatccaacttcaatcaaataaagagcaagaagtggaaaccttaaattgaatagcccagaattggacacatcactttttgggtcacagggatagacaaagagcaagttaaagatacattgatataatataatatagtcaattaaattcagttcagttcttgacgtccagggttttgctaggtattaaaggccatccacaagagcaaaaaccactgtccctgtgtttttataagcttctattcctattgacaagaaaagacacttcatttgaaacatctatgtaacagttgacaatccaatgattaattttatagcaatgtaaatttattgataaatggaaatgctgtagctgaaagtttctgccctttttgttaactcatagctatcaccaagcaggacttgacacaaagttgattttgcttgattgaagtcatcctaaaatgcagcattacaatactgtgtctctgccttcaacctccatacttacatcccaccatcactgggtgattataagatacctgtgagaaaatcaaaacagccctgctaagtcttgttctcagcctctcccagcatttgttccactacattaaatatctgattttgtcatctctcctctcttagacactcttttcagaatgaattcacattttcctt

SEQ ID NO: 586291 - DNA, 4001 bp, Homo sapiens
cccctcatgcctaaccccaattccagttttcctcaggcctttcgggttgccccagggtttctctctggagtctaggctgacttcccctctccacccgcagagccctgcgtgggccatggccatgaccctggcggtggctgcaggcgtcccgggctgtggagcaggggctgcgcgccggaccgctggagggtgtgtggcacagcgtggggactggtcgctgtgtgcttgtgtcgctggctgcgtgtactaggggatgggcaaatcacacggctgccgcatacccactgccacccagcgctaagaaaagagcaggaaaagcaaaacaaacaaaaaagaaaagaagacagggaaatagaaagtcgatgtgggggattccggagcttgaggagtgggaggcgccgcgctcttcttggctcgcggcgcctgggctggcagacttggagccctgggtggccgcagtcacagacgtgctgtggcggtgaactgacttaaagacgcgggagggcggcctgggtgaaatgtccaccgacagttctgctggctttacgcgtttacctccaattctctgttctcctccagcctctctgcccctggcgaacctccctgctggtatttccgtacatgcaagagccttggcatcatcgccagggactggcgggtcggtggactcagcctgggacaattctgtatctcagggcagcctcgaggacggcaatgggcaggaagatagagaaagggatgcggatgctggaggcggacggaggcaaagggtgtgccgccgtgtgtgtcaataattctggggaattttcacctctcccagatgagtctctacttaccccgtgaggggccccaggggcgccgggcagcgcgcacaggtggaatttctgcgcgtctaccggcaccaggcatggaccgcacctgtccgtgtccgagagctacaagttagcggcgattgcctgggacctcaggtgcggactccaagggacattgcgggcggggaggggtgcagcggtccccagtctacgaccccggggactgcccgggcggttcaggacccattgtgagttaggtggcgaagcccaggcactgtctggtacctcatgagcttcgggctgagaccttgtcccccagccacggcggacagtccagctcctgcgcggggctcaaataggatgggattgcagaatgcttccctctcctttgtcttgggaccctttcccccattctaattgcttctcctccttggccatgacctggagaccgcaatgggaaacctctccagcgcccaagggctgctccgaaagcggagccgggggacagctcggagcccgagcgagccgggcctccatcccacacgcacagaagacgcggtcagaccccagcaggaaggaacccgaggggcgggagggacgaagctctccttgtcttgtccatggctgcatctggagtgggtggcgggaggggggtcagcaacagtagagggaatggggggctggaatagggagcgacgccgggacagcgcagctcccaggctgctttcgccacattcggctggactcagtgaccgtcggaatcgtaggggtacctcgcctcgcgctgtgcctcgtttgccccttcctttcagacccgccatcactgctcgcaaccctccaagccccaggatccaaagtttccgtttgagaatctgcacgtggggaggacctccctccaattcccccaagccccgacccctgagcctccggcttggggggatatgaagggagagaccccctggtgccagggcccttggagtgggtaagcggagagctgcacagcgcggggcccttacctgtcgctggtttcgctccagttgcctccccggctgcgaggtggtggaggcttgaaggagcgaggagtcctttgtgggttcagggccgatccgctcgggctggagctgcgcaccgcttagagtccgaggccagctgccggttctctttctcccttgatcttgcaaaagaaaaggaaaagattagttgatgccgagacactgtaggggtggggcgggagaggcgggagaggcgggagagaaccgaccccaaggctctggcgagagctgcggggctggcgcgcgcgcaggcagagtcacgcaccccacactcgtctcagccacttggctagtctgtgacctgttcgtggtttagactggagttaaattgacgctgcccccgccctccacgccaaaccactaaaggagaagcaaacaagactttcaaacctggctttcacgaagagcctggagaccaaaatagaatggagacctggatgcctcggcgagctgggctggattcatttcttcaccaaagtgcttggggaagtaggaattagttttgggaggcaacacctattcgggtacctcggcgatttcctggtgaaatctgcgatttccaggctctggccaacccgcagcctggagtgtgtgagtgtgtgtgtgtctgtgtgtgtgtgtgtgtgtgtgtgtgtgcccgcgcgcgctccctaggtctttgcgccctggcgcctttagtacagcaggagagcgtgtctgtattcgtgcgtgtgtgttcgattagctgcaatgggcggacaatttctggagagaacatttacaattttctttcagtatgacaggattagttgctgttgaaggcgctcctccaatgaaatcttctgtgctctctgatttggcggttcttctgagcaaatatgacagccgtttctccaggctctttttcgcttctctccatttccatccccagagcccagctctccatctgcaatttctacatcagaaccacccccaaccccgagtcccttccctgcaagtgtgtgagtgctacaaaggtgacatggcatattgggaagaacgcagtattgctttttgtttgtcggagatacttaagcccagtttttccaggtgggaaaatgttagactaaatccactatgctttgtaaatatataattgtgctgaactattcacagattgtttatttctttggagctttgacaaatgtatccgaaggagaagtaatttttttctcttactttaaatatgagccagtgaccatgttttcttcagctaatgggcagtagactacagaatatatctatatctatatctgtatctatatctatattcagaatatgtgtatatccagaatatatatatctagaatatatatatatatgtccaggatatatatatccagaatatatagatatatatatccagaatatatatatatatatccagaatatatatatatatatccagaatatatatatatatccagaatatatatatatccagaatatatatatatatatatgtccaggatatatatatccagaatatatatatatatatatatatatatatatatatgtccaggatatatatatccagaatatatatatatatatccagaatatatatatatatatatgtccaggatatatatatccagaatatatatatatatgtccaggatatatatatccagaatatatatatgtccagaatatatatatatccagaaaatatatatatatccagaaaatatatatatatatctcaaaaatatatatatatatatctctctcaaaaaaaaaaatatatatatatatatatatctccagaatatatatatgtttgatgcttcagggaatttgtgatctccatgaaaaaagatttaggatgcaaactttctgtgttcagacctgcctttgatgtttatttctttattttaatgagaaatttctgccaataattgtatctattatttttagatactaacctcatttgataaaagtacaatgataggattctaaagtgtagcttaggccaaaacttgcttttgtaaaagcatatgtgtatgtgaatataacatcaatatattatatattacataggctttattttctctcatccaacttcaatcaaataaagagcaagaagtggaaaccttaaattgaatagcccaga

SEQ ID NO: 586292 - DNA, 4001 bp, Homo sapiens
cctaaccccaattccagttttcctcaggcctttcgggttgccccagggtttctctctggagtctaggctgacttcccctctccacccgcagagccctgcgtgggccatggccatgaccctggcggtggctgcaggcgtcccgggctgtggagcaggggctgcgcgccggaccgctggagggtgtgtggcacagcgtggggactggtcgctgtgtgcttgtgtcgctggctgcgtgtactaggggatgggcaaatcacacggctgccgcatacccactgccacccagcgctaagaaaagagcaggaaaagcaaaacaaacaaaaaagaaaagaagacagggaaatagaaagtcgatgtgggggattccggagcttgaggagtgggaggcgccgcgctcttcttggctcgcggcgcctgggctggcagacttggagccctgggtggccgcagtcacagacgtgctgtggcggtgaactgacttaaagacgcgggagggcggcctgggtgaaatgtccaccgacagttctgctggctttacgcgtttacctccaattctctgttctcctccagcctctctgcccctggcgaacctccctgctggtatttccgtacatgcaagagccttggcatcatcgccagggactggcgggtcggtggactcagcctgggacaattctgtatctcagggcagcctcgaggacggcaatgggcaggaagatagagaaagggatgcggatgctggaggcggacggaggcaaagggtgtgccgccgtgtgtgtcaataattctggggaattttcacctctcccagatgagtctctacttaccccgtgaggggccccaggggcgccgggcagcgcgcacaggtggaatttctgcgcgtctaccggcaccaggcatggaccgcacctgtccgtgtccgagagctacaagttagcggcgattgcctgggacctcaggtgcggactccaagggacattgcgggcggggaggggtgcagcggtccccagtctacgaccccggggactgcccgggcggttcaggacccattgtgagttaggtggcgaagcccaggcactgtctggtacctcatgagcttcgggctgagaccttgtcccccagccacggcggacagtccagctcctgcgcggggctcaaataggatgggattgcagaatgcttccctctcctttgtcttgggaccctttcccccattctaattgcttctcctccttggccatgacctggagaccgcaatgggaaacctctccagcgcccaagggctgctccgaaagcggagccgggggacagctcggagcccgagcgagccgggcctccatcccacacgcacagaagacgcggtcagaccccagcaggaaggaacccgaggggcgggagggacgaagctctccttgtcttgtccatggctgcatctggagtgggtggcgggaggggggtcagcaacagtagagggaatggggggctggaatagggagcgacgccgggacagcgcagctcccaggctgctttcgccacattcggctggactcagtgaccgtcggaatcgtaggggtacctcgcctcgcgctgtgcctcgtttgccccttcctttcagacccgccatcactgctcgcaaccctccaagccccaggatccaaagtttccgtttgagaatctgcacgtggggaggacctccctccaattcccccaagccccgacccctgagcctccggcttggggggatatgaagggagagaccccctggtgccagggcccttggagtgggtaagcggagagctgcacagcgcggggcccttacctgtcgctggtttcgctccagttgcctccccggctgcgaggtggtggaggcttgaaggagcgaggagtcctttgtgggttcagggccgatccgctcgggctggagctgcgcaccgcttagagtccgaggccagctgccggttctctttctcccttgatcttgcaaaagaaaaggaaaagattagttgatgccgagacactgtaggggtggggcgggagaggcgggagaggcgggagagaaccgaccccaaggctctggcgagagctgcggggctggcgcgcgcgcaggcagagtcacgcaccccacactcgtctcagccacttggctagtctgtgacctgttcgtggtttagactggagttaaattgacgctgcccccgccctccacgccaaaccactaaaggagaagcaaacaagactttcaaacctggctttcacgaagagcctggagaccaaaatagaatggagacctggatgcctcggcgagctgggctggattcatttcttcaccaaagtgcttggggaagtaggaattagttttgggaggcaacacctattcgggtacctcggcgatttcctggtgaaatctgcgatttccaggctctggccaacccgcagcctggagtgtgtgagtgtgtgtgtgtctgtgtgtgtgtgtgtgtgtgtgtgtgtgcccgcgcgcgctccctaggtctttgcgccctggcgcctttagtacagcaggagagcgtgtctgtattcgtgcgtgtgtgttcgattagctgcaatgggcggacaatttctggagagaacatttacaattttctttcagtatgacaggattagttgctgttgaaggcgctcctccaatgaaatcttctgtgctctctgatttggcggttcttctgagcaaatatgacagccgtttctccaggctctttttcgcttctctccatttccatccccagagcccagctctccatctgcaatttctacatcagaaccacccccaaccccgagtcccttccctgcaagtgtgtgagtgctacaaaggtgacatggcatattgggaagaacgcagtattgctttttgtttgtcggagatacttaagcccagtttttccaggtgggaaaatgttagactaaatccactatgctttgtaaatatataattgtgctgaactattcacagattgtttatttctttggagctttgacaaatgtatccgaaggagaagtaatttttttctcttactttaaatatgagccagtgaccatgttttcttcagctaatgggcagtagactacagaatatatctatatctatatctgtatctatatctatattcagaatatgtgtatatccagaatatatatatctagaatatatatatatatgtccaggatatatatatccagaatatatagatatatatatccagaatatatatatatatatccagaatatatatatatatatccagaatatatatatatatccagaatatatatatatccagaatatatatatatatatatgtccaggatatatatatccagaatatatatatatatatatatatatatatatatatgtccaggatatatatatccagaatatatatatatatatccagaatatatatatatatatatgtccaggatatatatatccagaatatatatatatatgtccaggatatatatatccagaatatatatatgtccagaatatatatatatccagaaaatatatatatatccagaaaatatatatatatatctcaaaaatatatatatatatatctctctcaaaaaaaaaaatatatatatatatatatatctccagaatatatatatgtttgatgcttcagggaatttgtgatctccatgaaaaaagatttaggatgcaaactttctgtgttcagacctgcctttgatgtttatttctttattttaatgagaaatttctgccaataattgtatctattatttttagatactaacctcatttgataaaagtacaatgataggattctaaagtgtagcttaggccaaaacttgcttttgtaaaagcatatgtgtatgtgaatataacatcaatatattatatattacataggctttattttctctcatccaacttcaatcaaataaagagcaagaagtggaaaccttaaattgaatagcccagaattggacac

SEQ ID NO: 586293 - DNA, 4001 bp, Homo sapiens
gaccacttttctgaaacacatctaatcgcgtcgcacccaaaccaccaccaaagggataaaagtttaaactccctcacacagcattcaggcccctgcacaatcagaaacccatctttccagtcttttttttactctgttgcccaggctggagtgcagaggcccagtgtcggctcactgcaacttccgcctccaggttcaagctattctcttgactcatcctcctaagtagctgggacttcaggtgtgcaccaccacgcccagctaaattttgtatttttagtagagatggggtttcaccatgttggccaggctggtctcggactcctgacctcaggtgatccgcccgcctctgcctcccaaagtgctgggattacagtcacgagccacctcgcccggccttccagtcttagcttccaacccaatcctcaaaccccacttcatcaagaacacggcgacccaccatctcccccaaacatcactttcacttccacatctctgcatgccctttgcctccaaacgccccaattcataggtcctctccactgtggaaaatgtcggaaaatgtcgccacattctgttaacgcctgcaccacagtctcaactccacacagttgtagccaggctggccgtgagctcccagggcaaggcccacgctattaccggcatctaccccagcttagcatcttgcactcgattggaggtttgataataaagctggagtcagctgagtgacagcagacagttactgctggccccaaagcgtcagcccaaagtcccataaactcctttgcagggaaatcaaacatctatgccattccaggcaggtgctctttcagatctcaagcgttgcaccttcgtgtagcaatctcctcattacccctgttttctctccatcctcactcagacaccagccctgactcccaacaccagatgctcacggtgaggggctaacccgggtccccgcgtgggggtaagtgggggacccgctgagctgtccccaaccacccacagccgggaacagcaccgtagggcctggtgtcctggaagatgtactgcgtccagcaccgcgcctgcaactcacattcctattcaccccggggcttccgagtccccacagccccgcttatgaactaaataatttaataatgctggaaacactatggcttgttgtgctgcctgccagacggagcctctgcccgagccaaggctttgccggcggtgtctcggtggccgggagcccgcagaggaggtctaagtcccactgttcccggactaaatgcacggtttcctctcccagaggggcagggctgcggcttctggagtgagaggtcatttaagggataccctgagcgacctgccggtgctgctggcgtctgcaggctccagggctgcggtcggcggggccggggagccccgttcaggtgacagcaggcacacgggggccctcgggagctggggatcctggaactccaagcccgggaattggtcctacccctgccgggcggcagaggctgatgccgggcagggggactcctgggggccggcggggccgctgcagcctctgctgtcgctgaatcagaaccacagatttctcgtccagaccccgaggagccgcagaacgcgctgatcagggccccagggctgggtccccctggccgaggacgacgagcggggctcagagagggcgcgcgcagggccaaggtcacactgcgcgccggcgcgggaactcgaacccaggcccaagccgcgcccgccaggccaggttaaggagagccgacccgcgcccctcagcgcggcccgggacccccgcccgggccctgggagcccagcactggccgagagagagggagaccgcgccccgagcccgccgcccgccgcgcccctcacctcgcgaccctcacctcgcgcccctcacctcgcgcccgcagccgccgccgccgccccgcgactagcggaccccccagaggcagccctcgccggccccgcccccggcgcaggagcccctcctaccggtcgtcttctcgcgagacgtcgcggccgccggaggggccacggaggccgaggggcgcccgccctcagcgcgcctgcgcccggccagcccgcccgcccccgccctcgcgagccagtgccatgtggcgccgtatttacggccagagatcgactccgcccaccggccgccacgagccacgcccctttctcagcagccaatccgcggcgttgactccgccccggcggaccgggcgcgcggcggctcggggacgcgcagctgtctcgccgttcgacccgggagctccacgttgcagccaaacacgatcccgttaaccaacctttatgcagtgcctgttgtctatccgaccctttctcgagcatcggctcattggcaaaggatcgtgatgctcaccggctggggcttgagactcgctgtgtgaccttgggcaagtgacttaacctctctgaggttgtcgccaatccgtaaaatataataggttagtgaccctacctttcagggagtatgtgagacaaacgagatgacacgggtaaagagcttagcaagatgcctaatgcatagtgagcatgcagtaattgttcttggcatcaatgtagttttgtgtgtttgtttgtttatttttttagagacaggatctcaccgtgtcgtccaggatggggtgcagcggtgcagtcacagctcactgcagcctcgacctcctgggttcaagccatcctcccacctcagcctcccaagtagatggaactacagacaggtgccaccacacccggctaatttttaatttttaatagaaacgggggtctcactatgttgcccagggtggtcttgaacccctagactcaagcaatcctcctgcctcagcctcccagagctctgggattacaggcgtgagccaccgcgccaggcccagtcattttttttttaaattatggtaaaatatatagaacataaaatttaccatcttaacctttgttgttgttgttgttgttgttgttgtcgttgttgttgttgttgagacagagtctcgctctgtcgcccaggctggaatacagtggcccgatctcggctcactgcaagctccgcctcccgggttcacgccattctcctgcctcagcctcccgggtagctgggacttacaggcgcccgccaccacgcccggctaattttttgtatttttagtagagacggggtttcaccgtgttagccaggatggtctcgaactcctgacctcgtgatccgcccgcctcggcctcccaaagtgctgggattacaggcgtgagccgccgcgcccggcccatcttaaccatttttaagcactccctgcagtggcattaagcactttcacatccccaccatccaccccaagaactttttcaatccgtgatatttttagttggccccctccgatggactcccgaggcagccttccaaccaaggtcatctcttcactcttccactccctgcagccagtcccaaaggagttccgaacccaccgggccctggaaatgtggaagtgagggagacgggcaaggcccctgccctcctgtattctagtgggggggaaaagcaacaaacaaccaccacaaaatatatgtgtatattatatacacactcacagtagataatatgtttatacgtatgtgtaatgcatacatgttacctatgtgtatgtatgtagtatatatgtttatatattgtacacatacatatagacctgtattatgcatgtataatatgtctatgttgtatacatacatatatgcaattgcacgtatgtaaataaggtgacagcctctggcaatgtcaccctgtgatgcctgtctcagcttagaaatttctcactatcagccgtgtgcagtggctcacacctgtaatcccagcactgtgggaggccgaagtgggtggatcacttgaggtcaggagttcaagaccagcctggccaacgtggtgaaacctgtctctactaaaaataaaaatacaaaaattagccagg

SEQ ID NO: 586294 - DNA, 4001 bp, Homo sapiens
tggtgggtacttggggcttcactataccattccatttttgtgtaagtcttccataataaaaattaaacaaagaaaaactaatccaaactcttgtttacttttgagacctgtagaaaacaggccaattctactccccaaactaaccatagcttcccaacacgagaactgtcatcaggaagtgccataatggcactgttactcaagttgccatcccacccagatacaaccatgtacacgagtgagaacacagggccagggggaggggtcttccctcctgctgatcccacacagtgttcaaaggcctagtcagaccccgctgtctccaagaaaccttcccaatgctcgattccagcctacactgacctgtatgtccctcttccctactgggtccctagcgctgcctttgcaaatactcctgggggttggtcagggactgagagcagatccttttgacccccagtgctgagatcccctgcatagctcatgcctcagcttcccagccttaaacctaaaggaactgaaggctccctgttaaaaaaaaaaaaaagaaagaaaaaaaagccttttaagttctgaccagactgggcacagtggttaacacctgtaattccagcactttgggaggccaaggcgggtgaattacctgaggtcaggagttcgagacagcctggccaacatggcaaaaccccgtctctactgaaagtacaaaaatttgccaggtatggtggcaggtgcttgtaatcccagctactcaggaggctgaggaaagagaattgcttgaacccgggaggcggaggtcgcagtgagccaagatagcaccactgcactccagcctgggagacagagcgagactccatctcaaaaaaaaaaaaaaaaaaaaaagttctggccaactgccctctagacaaattctatcctctgttattctctgcattctttggagggagaggcacacttacttattaaccatgacctatctttttccatgacaatttcacaacctttcctttagttgtgcccatccccattccccctttcctaggtgttcatatcccaccaatcccacagcgggaggctgctcatccatagacactcctaattagcctgcatgcttctgttgctgggatcacatctctgcccttttccaggtgcctaacacttaataggttcttacttgatcatcttgcgacctaaaagcttgtacatctctgctcattttgacgttggtagatctttgatcactgataagcaattcagtctgttttctacacttgcccaattcctttcttctgccttctgcagaaagattcatgtttgtgtgtattctgcagagggtcccagaggcagaaatctggcagtgtctacctgtgggtgagggtgtgggagacagctcccagcacactgcagtgtgggctcctacgcaatccactccacgtaggttatgtaagcacgagctattcatgcatgtgaggctctgctgtttccccatatgatttgggtactctgttggtaaaggttgtatgaaagtgcatgcatatctctctaagtgcatacttaagtgagcccagactttcaaagattttcatattttgaacacatcaccacgtacttgttttttaagttaaaaaaatgtaacactgctccctcttttcacccaattcctcattttcaccagtctctggcaccactgtctcccctcatccatggctcccctctccccttagagcactttacctgtgtggggtggacgttgtggcgggggcctgcatccttccggagcctgtgctggaggcccccattctcagagggcagtccgtagctggtgcagtgttcaaagggcatatactggtactgggggtcactaccccaccagctttgttcacccccacgctgctgtgaccgggattgctccatattccctccccccgagccccggccaggccttggcctgcttgcccctgtccttcccccagtgtagctccttaagcctctgctcttgctgtccccaaggcgtctggggcagcatgcccacctccagctatttatagacccctctccgtcacatgaccccccactgccacatctgatctgcttggggtcgaagcaggtgtgagtgcagtgtgggggtgggggttgggatgagaacctgagggacagccccacagggaattccctctgctgagccagtggcattgtcccccttcttagtcaccagtagtaggcttccagctccatgtcactggtccctctataaatatcgcctggaccaggatgagaaactgctgagtatgctctcaaacctatgtgtagagccggatctgcatggaagccctccagttgcccatctctcttcttcaggatgcggaaggtgaggggtgggtgctggataaagatgaagcgactcgaagttctggaaacactggcacattaactcacctgggaaagtaactggtgcctctctgccacatctcctggccagcttgttcccaactctgtgtccacccagggttctgtctggccagctctgccagcccatcccatgtccagcgttcttctctagctctttgcccttctgtctgccagaggctgctaataacagcttgggggcatcccctgatcccatccttatcactcactgggtgtggaacacttatgggaagtgggaagtcgagggtcggtaatagccttgggttctagaatttctcccacttcccagactgttaggtgtcagccacactgccaacccggagggactgagcttccatttggactgtggagtgcccacactggctccatcagatagataacaagggagataacaggggagaatcgaaagtagaaagaggcacagggaagggagaggtgggaaaggggtgagggcttctcatgacaagcccgacaaacatgaaagatgatggggaagtgctctctgctattcttcccttttcaggtcaataaatacttttttggccaaggacaaacttttcttcctggcatcacgttataaaaccaattttcctatgacatgtcttccctatgaactcttcactgtaggagaaaagatatgaactgagccaaagtaaagtttaggatgcattaccaagtggggtctgtcccaggacagtccaagttcagggactgcagggtagggacaccaaacatctggtctacaatgtgattttgacctaggctaaatggaaccacccaaagcaggagggaagccaatatcattaaaagtactttttctagggcctcaacatcattaatcatcaggaaaccaaaatcataatgcaatatcgcctcatacctgttaggatggctattatcaaaaaagcaagagatagccattattatggctatggatattatggttcatgcttataatcccagcaatgtgggtgaccaaggcgggtggaatgcttaagcccagcagttcgagaccaacctggcaacatggggagaccctgtctctataaaaattataaaaatcagccatgtgtggtggtgcacgcctgtagtcccagctacttgggaggctgagacaggaggatcactgaagcccgggaggtggaggctgcagtgagctgggaaggcaccactgcaatccatcctggtctacagagtgagattatgtctcaaaaaaaaattaaataaaaagatgagataaatgttagtgagaatgcagagaaaagggaacccttgtgcactgttggtgggaatgtaaactggtatagtcattatgaaaaacagtataaaagttcctcaaaaggtaaaaacagaactgccatatgactcagcaactcccatacatccaagggaaaggaaatcagtatctcaaagaggtatctgcactcccatgttcattacagcattattcacaatagcctagaaatggaaacaacctaagtgtccactaacagatgaataatgtcatgtgtatataaatatatataatggaatactattcaaccctgacaaagaagaaaatcctgccacttgtg

SEQ ID NO: 586295 - DNA, 4001 bp, Homo sapiens
aatcccaacactttgggaagctgaggcgggatgatcacttgagcccgagttcaagaccagcctggccaacatggcaaaaccccatctctcctaaaaatacaaaaattagctgggcatggtggctcatgcctatagtcccagccatgtgggaggttaaggcacaagaaccgcttgaacctgggaggtggaggttaccgtgagctgagattgcaccactgcactccagtgttggtgacagagagagattctggctcaaaaaataataataataataattagccaggtgtgatggtgcacacgtgttgtcccagtttcttgggaggctgacatggaaggatcacttgagcccaggagtttgaggacacagtgagtcatgatcatgccactgcactccagcctggatgacatagcaatgatctgtctcaaataataaaaaaaaaaaaataaaaaggctgtttattccttaattcatgcattatatatgagaaatatatagaatatagaaaaatacgtagaaatagaagaaaaaaattaactcatcttgtgacttgagaatataggagaaatgaggatgaaaaacactttgctgtcttgggaatatatgattgatatttaatgaatgttttagatcattttcatgactacggtgaaaggataaggaaggtggtgaaagactgtgcagttgtcttggaagtaaaagaaattttcttttacatttttaaaaaaggacactgacaacaagaccagacaaagttgatctgaattctgcatcctgaaatttgcaaccagaatgcttaaaaaaaaaatagttccaccaatggctcaacctgatacttaaagatgcttctatatatctactttaaacattagccacttcctcttcaaataccatttatctcaaacaggtaggatgagaatggaaactcattattatgtgcgcctgagagtttcctggattgaggcgttcatcactagccctattacgatcattatgtagaatgctctctgcaactggctgctcggagatttcagtcaagtcccccccaacccctcccccgccccaaatgtgtttcttgggttggtatcaatcataattgcacactccaaagtcagaggaaatcgttttacaattaataacgcacaatagaatccttgagcaatcattttaagtgaggtcaccaagtctgacctttccctaacgtggctatgggccccttacaaggccgggtgcacagaacttacaggaaagcaaaccaagcttccagagcaatccgcatccccctccgcccccctcctcccccctccgcctcctctcctcctccctcttttcgaagagccctgtgtgtggtagacccagacctggcagaaggaagaaaacgccctactagttagagccaatggagagagaccgcaacagtgactgttaacgctctcagagctagcccatccctgcaacactgagtgggtttgaaccgcaagcaggtcatcattacgcaaccagcatcagctggttattcaaaaatagcagcttgggctcccccacaaacccgcgccagcaaagctcccagtccttggcggctccggcaacacacctcgacatttccatactcctgtgtacaaaataattttttaaagccttaccaaatacctactcaattttcacatccacagatgtggtcagcgttttccaacgctcctgattctcctggatttagccattttacataaaatcctcagttacttatgcaaaagacccagaaatcggaacatcttgaccacacctacctgcttctcacacgcagggcattttactcgcccacactgaggagcctcttggagcgtctccctctcagcgtcccaggaagtgcgttcccagcgaggtacaccggaggcttctgggagcgcagtcaggttttcccgtggccctgaacggcaatgccctggatggctgggactacaattcccagaatccactgggccgccagccgcaggcaacatcctgcgaccacctcctgcccttccctttctctgcctccacctccccggatttctcttgcaccttatgttccgtctagaattgggttatcggttaaagaaaaaaaaaaggcaaaacgaaacaaaactaaaagtagttttgagttggatacctaagtacccaggtgacttgaaggtgacttgcccgtaggaaggttagcaaaaattcttaaatctggattttttttcccctcaaagtgtttatctaggcaaaaagtagaaaaagagctcaaagtctagaaccaaacagcccagatttgtatggggctttgctgtgtattgattgggtggccctgggaaagttatctctacatctggaggttatctggaaaaatggggataagatcacccacatcatactgttgtcttgaaaactgagggacctaatatagctaaagtacagtatagctagctattagatatttgaactaattttactctcccacacaatttctactgtcctgtccctttctctgttggcttctctccaatgtgaagtcctgcattagtgaatgaatatctgaattaaactaaaagattccaaagtcctaaatagcaatgatctgattttttaaaaaataaaggatgctgaagtgttgtgatgcctactacttcgaaatgatcacacatacacacacacatacacacacacaaatggatataaagtgtggcaaagtgtataattgttggattcatgaagaatatgtttgtgggtgtctcttgtactattctttcaaattctctgtatcttagaaatttttcaaaataaaaagaagaaaaagtatcatagtttatacaaaaggatggcacccatcccaagtaagtataaccttggcaagtaaggtaacccctttgtgcctcaaggtctcatctgtaacagtatatctacatcagaaaattgtgatgaggattaaatgaattactacagagacagttacaacagtatctgacgcataataaggactatatgtttgctattagcattttccattttgcgttgctctagtaacaatgagactatttgtcagagactttttaaaaagggagggtagagaggctactatcagtccactgctacctccttcttatgtgtgatactgctttagaggatggataaggttatctaaggccagaagcaatccgatcccaaagccagactgggaaatgtaataatgaggaagaaagatagcattgggtggtgaaaagatttctgggctccaggccagctctggcaatagcagatggataatagcaatgtgacaaacgataatcacttatttcctctgaacttcagttctctcatctataaagctgaattgaatcaaataactatgtacaaaatcatcttataacttatttcccaatcactgatgaatactgcctgattagaggactttagctgggaggtacttgcaattgattacaataattttaaaaaatcacagcacaaaaaggaaggaaagacaaccctattcctagacttactgttcaagctggggtctaaaatgcctgcctctggcatagcaaagatggaacagaatacttaaataccctgttggagttcaatagttagataattggaatataattctcaaaaatactttagataagaatttagatctgcaattaacaatcctgtctttcctctttttctcattagagattcttcaaggagaaagtcaaatcttaaattcactgcagtgtaccattcaccaccaaaattctacagagattcccatttggtcactgtgttagatttctattgctgctgtgacaaattaccacaaattcaaaggcttaaaacacaataaatttattatcttacaattctggaggtcaaaaatctgacacaggtctcactgtgctaaaatcaggatgtcagcaggggtttttccccttttttactaatgtgtgatagatgttcatagtgtttagaagtagatatgatcatataatacattcatata

SEQ ID NO: 586296 - DNA, 4001 bp, Homo sapiens
ttatagacatcagccggacaaggagaccagtgccccccgacagtgaggctggggagtctgtggagcctggaagttgatcaacctctaagaatccaagatggggcctcctccccctgcccaccccagcaatcccacccccaaaacatgctcaaccgtactgagtgcctatgtgtgttaacatcacgctaacattctgcactttctcagtcacctgtgaactgggactctcaccctaaccctacaggtgggagatgaagctggtttcatcatttgcccacagcacagggctgggaaagggggtctgattctggtgcctgcacctgtaacagctaaaagcgccacactagcgcagggggccacgtgtggcaaggtcttcactccagttctaggcatgggccgcccccagcactcctggctgcgggaactcagacccgcagagcttaattcagggctccctgcatcctcacggaagtacccgccctcccctggggtctctgcagcttccccgccgccctctctccctggagcgctccccaccccataccagagagggccagcatggacgggaactcccagcagttgtagacgcccagggagtcggtggcacagctaaaccagaggttctcgaagatggtgttggtggtgatgacgttcccgtgcacagtggacactcgccagtagctgtttggcagagtcacccccagcatcagcagccccacagttgccatgaagaagccaaaggtttccacagccatcgacatggtgggatgcaggaccctggggggctggtgccccagagagggggaggggcagaacccctagggaactggaaggggctgcggctaaggagggttgtccaggcaggctggggtggaatcagcctcagcctctgcctgcctcttcctcgggctcaggtccgtctccactttctgcctccctcctgctctgtgggtctctctgcttcctggcaggtcagaggaatgagctaagcctgcgcgcggcagctgttgacgagatggagggaataaccgaaacgggccaaaagtccaccccctccccccagcctctgggctgccccgggctccccgccccacgagggtggggggggcagacttaccctggagccactgacggatacagccaaggaggggcccccaagggaggcactgggaactgaggggaagcgtctgtctctgactcagctttcattgggggccaaagaacggagtaagagggacaaggagtgaaaagatgacagagacagacgtgagagcaataagggacagagacggagagagaatgaacagcagccttcagtggtgaaggacggaggaaccacgagaacaatctaagatactcagaccaaggggttggggcgtatgagtctcttaaggaagatcaagctggaatgaggggatgggagggtaggagacccacagctctgggctccatccagcctggaatggaactcggccccaccatccattcaccagggaactcaggcggggagttttagtcccctgagcttctgctctgtcagtgacatacccgactgcttactgcaggggctgtggtgagaactgggaccaggggccgggcgcagtggctctcgcctgtaatcctaccactttgggaggctgggctgagacgattgcttgaactcaggagttcaagaccagcctgggcaacacactgagacctcgttgggaccagggagtcaagccccccacacataaccagcgcttggcaccgggaactgtcctggatgtgagtgtcacagggctgaggccaccagggagtcgctctcacccaaaactcaaatttcctcctaagttgatctttgactcagcatcgagcctggtcctgctggccaacagcctggagcgtgatcctgtggctaagctctgcaacctgttcccagttatcagggactgtcacccactctattcgttaatgatgatggattagcagcctctggtccccatcccgagccagtgcagagcacctgtcccagagcagacactctcatctcctgctccggttccctagggctctgtccctgggggccatcagcgctggctgcgcacctccctggccccacggccctgctgggcttctccggcctcccctcaggtgtctcctccctactcctgtgctggcctgggctgtggaacgagaggtatgcggtgaagcaaaacaggcccatgccgagcctggcacgagggggcgaagctggctaggtggggctgagtcctgaccttccagcccacaggcgagagctggggctccctgggctctgacctctcccgggacccccgcctactccatgccagatgcaggattccttcccctactgggctccccctcccccagaggaggaggtaggaggaaggggaggccacaggaagacaaagggaggggagggtggggaggaggaagccaagggggcctgctgtggaaaactccacagaagtagctgagtgggtcagaggagaatgcaggcctgaagcccggcctggccccgaagttctgcccgcccatgctcaggtcactgccttctcccaggactctgggaccatggaaaagccccatgtctccgagctgcccggcactctcaaggacatggcttcaggaaagggaggaaggaagggtgtgggctctgggctgcggggtggacaaagaaccccgtgccaacctggagggcaggggcaggagaggaccaggagtgacgtctccgccccctgtgcccagcgttcagaacccacccctcccctcaacgcagacacgggggttcccaagccacagccccgttttatttacactcatcccaaagcacatgatggggctgaaggacgaatctcaggggagcagaaattagctgaaggccacagaggatagagacggggggcagggggagaacagggaaaggacagcgaggatggacaggccctcctggagcgttctccgtgggctcccgcgtctccttcaggatttggacttggacacagcaagtccgatgagtccggccagtcccgccacacccagggccatgcctcccacgatggccatgcccacgagtccatctggggaaggaaagggacagtgtcaggagcccggcccctgcggaaaccctgaccgtccccttccgccagccctgcccctcaacagaggcacacccctacctggagtcgcagggcaaggggctctaagaactggaaggggtggggctgaggggctgcctggaggggttcatttacagagagaccaaagtgcccaggcgtggggaagagcggggctgaacaaaggggccgaggctgtcacctttcttcatggccttgtcaatgagccgctccagttccttggcctggttgttctggggctctgtctgcagcaacccgcggacgtactttaaggccttctcgtattcctgcgctcggggaaacgcgcacgcgtcatacacaccgcagtgtttttttgtttgtttgttttttaataagagacggggtcttgctctgttgcccacgctggacggcagcgtcgcaatcacagcccactgcaacctcaaactcccaggctcaagcagtcctcccgcctcagcctcctgagtagccgggattacaggcgtgagccactgggccggctacacctcagtatccaccactccccctgcccacgtgaagggccttcccttcttcagccctgggggctcctccctcgacctccacccactccctccctccagccccaccccacggagtagagtccacaaacaaccccaactctgcgggagataacagcgcaaggcttgggcctgcacccagtctcttgacgtcaccttcctccccaccccctcgccactctgatcttccctcggagtcctcatctgacaccgctctgcacctctgcaccccttcagccttcccgctgtccagggctccaccctggaggacacagtaagaaggtcctgcagccccagaggagggtgaagggaacggggtccc

SEQ ID NO: 586297 - DNA, 4001 bp, Homo sapiens
tggggtgctgcaccttgcttctgtaaaagtttccccctacttccccactgtggaaaaatgtaggcagaagcacctagcccaaggcccggaacctggtcaccctctacccctgtgccctggggactctggcaccatctttcatgcagttgccaggggtgcccctctcaggtgtgcaggctcacagcagagccccctcctcacagcatgatgtgtctgggaagtgggtgtaggggctgcctccagtgtcccttctggacactcagaactctggggttctggcccaagttgtactcagcttttatagggttttttttggggggggggcccgccggccctgcatacagtcagtcctagagagatggatgaaaacaggaagcctctgccgctgcctcaggaggggctgggagtagtgggggcacaggagacccacccaggccccctaactgctcagagcagctccaacatccccgggggtgagctctcaagccccgcttcacagccagtgtcgccctcggctccttccctgccacacggtgcctggtgagtggactggccctgaaggacccaggagggcgtgcagcggcaccacacacagttcacggtcgccagcgctcagtctctggcatagggcagacggaagggagactgccccggagaaacaatggggcggcctcatcttagcggggagcagggagcgggaaggtgccgcagccacagaaagaactgccctgggcccaaagagctgttggctccagccctctaagaccccagaaagacactgtcctggaagccccacacacctgcacacacaccgcctccttacagcggacgctcaacctgcaacttgcaagacgcctcccttcacaggggccctttatagacatcagccggacaaggagaccagtgccccccgacagtgaggctggggagtctgtggagcctggaagttgatcaacctctaagaatccaagatggggcctcctccccctgcccaccccagcaatcccacccccaaaacatgctcaaccgtactgagtgcctatgtgtgttaacatcacgctaacattctgcactttctcagtcacctgtgaactgggactctcaccctaaccctacaggtgggagatgaagctggtttcatcatttgcccacagcacagggctgggaaagggggtctgattctggtgcctgcacctgtaacagctaaaagcgccacactagcgcagggggccacgtgtggcaaggtcttcactccagttctaggcatgggccgcccccagcactcctggctgcgggaactcagacccgcagagcttaattcagggctccctgcatcctcacggaagtacccgccctcccctggggtctctgcagcttccccgccgccctctctccctggagcgctccccaccccataccagagagggccagcatggacgggaactcccagcagttgtagacgcccagggagtcggtggcacagctaaaccagaggttctcgaagatggtgttggtggtgatgacgttcccgtgcacagtggacactcgccagtagctgtttggcagagtcacccccagcatcagcagccccacagttgccatgaagaagccaaaggtttccacagccatcgacatggtgggatgcaggaccctggggggctggtgccccagagagggggaggggcagaacccctagggaactggaaggggctgcggctaaggagggttgtccaggcaggctggggtggaatcagcctcagcctctgcctgcctcttcctcgggctcaggtccgtctccactttctgcctccctcctgctctgtgggtctctctgcttcctggcaggtcagaggaatgagctaagcctgcgcgcggcagctgttgacgagatggagggaataaccgaaacgggccaaaagtccaccccctccccccagcctctgggctgccccgggctccccgccccacgagggtggggggggcagacttaccctggagccactgacggatacagccaaggaggggcccccaagggaggcactgggaactgaggggaagcgtctgtctctgactcagctttcattgggggccaaagaacggagtaagagggacaaggagtgaaaagatgacagagacagacgtgagagcaataagggacagagacggagagagaatgaacagcagccttcagtggtgaaggacggaggaaccacgagaacaatctaagatactcagaccaaggggttggggcgtatgagtctcttaaggaagatcaagctggaatgaggggatgggagggtaggagacccacagctctgggctccatccagcctggaatggaactcggccccaccatccattcaccagggaactcaggcggggagttttagtcccctgagcttctgctctgtcagtgacatacccgactgcttactgcaggggctgtggtgagaactgggaccaggggccgggcgcagtggctctcgcctgtaatcctaccactttgggaggctgggctgagacgattgcttgaactcaggagttcaagaccagcctgggcaacacactgagacctcgttgggaccagggagtcaagccccccacacataaccagcgcttggcaccgggaactgtcctggatgtgagtgtcacagggctgaggccaccagggagtcgctctcacccaaaactcaaatttcctcctaagttgatctttgactcagcatcgagcctggtcctgctggccaacagcctggagcgtgatcctgtggctaagctctgcaacctgttcccagttatcagggactgtcacccactctattcgttaatgatgatggattagcagcctctggtccccatcccgagccagtgcagagcacctgtcccagagcagacactctcatctcctgctccggttccctagggctctgtccctgggggccatcagcgctggctgcgcacctccctggccccacggccctgctgggcttctccggcctcccctcaggtgtctcctccctactcctgtgctggcctgggctgtggaacgagaggtatgcggtgaagcaaaacaggcccatgccgagcctggcacgagggggcgaagctggctaggtggggctgagtcctgaccttccagcccacaggcgagagctggggctccctgggctctgacctctcccgggacccccgcctactccatgccagatgcaggattccttcccctactgggctccccctcccccagaggaggaggtaggaggaaggggaggccacaggaagacaaagggaggggagggtggggaggaggaagccaagggggcctgctgtggaaaactccacagaagtagctgagtgggtcagaggagaatgcaggcctgaagcccggcctggccccgaagttctgcccgcccatgctcaggtcactgccttctcccaggactctgggaccatggaaaagccccatgtctccgagctgcccggcactctcaaggacatggcttcaggaaagggaggaaggaagggtgtgggctctgggctgcggggtggacaaagaaccccgtgccaacctggagggcaggggcaggagaggaccaggagtgacgtctccgccccctgtgcccagcgttcagaacccacccctcccctcaacgcagacacgggggttcccaagccacagccccgttttatttacactcatcccaaagcacatgatggggctgaaggacgaatctcaggggagcagaaattagctgaaggccacagaggatagagacggggggcagggggagaacagggaaaggacagcgaggatggacaggccctcctggagcgttctccgtgggctcccgcgtctccttcaggatttggacttggacacagcaagtccgatgagtccggccagtcccgccacacccagggccatgcctcccacgatggccatgcccacgagtccatctggggaaggaaagggacagtgtcaggagcccggcccctgcgga

SEQ ID NO: 586298 - DNA, 4001 bp, Homo sapiens
tgcttcagcctcctgagtagctgggaccacaggtgtatgccatcatacccagttaattttttttttttttggtagagatagggtcttgctatgtagcccaggttggtctcgaactcctgggctcaagcgagcctcccacctcgtcctctaggagtgagccagtgagacccggcctcaagcccctctgagataccccttctaagtcctccctctttccctcccttgagggtcccaggaaggagatggggaccctttctcatctctcccccaggtgagaagatttggcccggttttacttttggtggcgtgttttatccaaacaataggtctttttgttttcgtttttccaataggaaatggcagtacggaatgcgctctttcacaaggcgcacgggagattccgaatgtgtcgggtattgtgcggggtccgggctcccagcacagacccaggggcacatctctgccaccttcccctcccatccccagccatggcgtgcggaaagtgctcatgcctgcttcctagattgggcgctggctttggcctcacaggctgtcttccgaatccccagggagtgggcaagtgaccaccccgccatcaccaagctcagcttacaaccccatcttccctctaagctccatccgggagagcgagatccagccaaggccgccccgagggggagctctgcagggaggtggaggcgctgggaacaaggaggctccagcgagtgcaaaacgaaaggcttttattgaaaaatatcaagtgccccttccagggctgccggtccctgcccagcgcgagcatgggggcagcggcccgatggggctcgacggggtggtcaagtattggcggtcacccaggccccgtgctccagaagggtgaggtttcacagtccatgcaggttggtccctgggccccgaagtcgactgcccggcccgcaaagccgtggctgctggggaagctgccccagtccagcgcgggggcttcctggcttctgggggtgggctggcctccgaggcaaggctgcacgctggatggcctggtgcgcgctccagctcgcggtggtggtggtggtgttggtggtggtggtggtggtggggtctccctgcgtctgtcccttagacgtagtccttgcggtcgtagcctgtgcccaggctggctcccgggccggtggagcgcggcgcggagtagacgaccttggtggccgtgtacttcttctcgcgtgggggacacgagcagcagagcagcgcgccccccagcagctgcagcgccgcggccgcccagcccacgtacaggcccgcgcccatctcgcgcttctgcgcctcgggcaccacggggttgtagaagtcccggataatggtgttggccgaccaggacaccggcacgagggtgagcagggcggcgagaaggaacagcacgcctgccacgatggtgatcttggccttggccgtgtcgtcctgcacgcagttggtgcactgggcgcccaccagcgccactagcagcccgaaggcggccagcaggatggccaccacgatgagggcgcgggccgcctgaaggtcctgtggcagtgccagcagcgagtcgtacaccttgcactgcatctggccggtgctctgcaccacgcagttcatccacaggccctcccagatgttctgcgacgtgatgatgttgctgccgatgaaggccgacacgcgccacatgggcaacgcgcagcacacgatggtgcccagccagcccagcacggccagcgcggtgcccgtgatctccaggcccatggacatggctgccgcggcaaggcccgctccaccgggtggctccgggtgcggggagacgaggggccggggccgctgggcctggcgggagctgcggcgccccgacggacggacggacggacggactgactcaccgacggcgcgcgctaacggctcggctccatacgctctcgccgcggctgcgcctgcacctgcctgtggctttgtgggcgggcggcggcgactgggctggccctgggctggggccggtgcgtcttagctaagtgcccagcgctccggtgggggcggtaggggcggagccgcgctctccagggcctaaggacagtgacgtggcccctgcctcccaccttcaccgagcgtcctgggaggaaggacttggccctgcgcggcccacaacgccggggtaggggggttgccaaggaagggcgggacctgacccagcccccgcccctcggtccttgtccctctctgctcgggaatgaattctccggggcaaaaccgaggacgggatgcgtcaggggcttggggtgcaaatcccaaagaatttgacacggcttctctctcctcaccactttgggcgcttttggcacgtgccgcgtggggatgggggcgctgccaattaccccggaacggcggggcggggaggaccagggtgggcgtggccgcggctgtttgcaggagccgcgcacctgctgctctgcccctcccgtacacacgtcgcacaggctcagcctgagtccgggcggtggggttgtccagcccaggaattgctgggcccagaagccagggactgcctgcgcaaaggtacccaaaagatgcccttaagcctaactaagctcaaattcctctccagctctccctccagttcccatcgctggccgtgagcctgcatgcctttagctaagctgctctcccctcccagaagtccccctcctcccattgagtcccctcccctctccgagccctgtcctccctccctttgagcctgagtcagggctgaggcccaccttaatgaaatggtggtgaaagaggttcgatctccgcaaaagtgggaaatcgggcaggaccgagcaccgtggtggctgactcctgtaatcctcgcactttgggaggctgagaagggaggattgcttgagaccaggagttcgacaccagcctgggcaaaatagtgagaccccgtctctacaaaaaattaaaaaactagccaggtgtggtggcgtgtgcctatagtcccaactactccggaggctcaggcaggaaattacttgagcccaggagttcgaggctgcagtgagctatgatcgcaccactgcactccagcctgggcatcagagcagaccctgtttaaaaaaaaaaaaaaaaaaaaaaaaaaaggttgggaagtcagaaatgctacactcaaagccctggctgtcacacctggacgatcgttcccccttcttcaccaagctcagagcccttcagatttggccttggaggttcagcctgggctgttcctaaccccatcccctctcttcccctcagagcagcccttgcataccacatgcccctgcctcagagtccctgcacttactgtcccctgtacatggaacatgcctgcagacatccacatagcttactcctaactgccttcagctttttgctctcagtgagtctttccctgaccaccctatttaaaactgcagcttctggctgggtacggtggctcacgcctgtaatcccagcactttgggaggctgaggcgggtggatcacttgaggtaaggagttccagaccagcctggccaacgtggcgaaatcccgtctctactaaaaatgcaaaaattagccaggcgtggtggtacacgcctgtaataccagctactcgggaggctgaggcaagagaattgcttgaacccaggaggtggaggttgcagtgagctgagatcacacccctgcactccaacctgggtgacaaagcgagactctttgtctcaaaataaaataaataaaataaaataaaataaaattgcagtttcttaccccacaatgcctgcccccctttaatactttatattctgcttagcatgtaacaccatcggacaatattctatatttttcttatttatgtttcattgtacttaaaaaaattttaaattggcaatgatcgtacctacgcgtggcacacccagtgatgttttaatacatagaatgtatagtaatcatatcagggtaattggcatattcatcatc

SEQ ID NO: 586299 - DNA, 4001 bp, Homo sapiens
ccagctccaatttttcacaattccctggatctcgttttttttttttttttttaagtgtttatgtcccggccaaaacacagtggtcctgcccctgactgaccccccccacccccgcacccaggcctccagcccttccccacccacctccacagttgaaatcagagacaataaaatttcctcctgtgcacaggtcccatttattgtagaaaataataataattacagtgatgaatagctcttcttaaattacaaaacagaaaccacaaagaaggaagaggaaaaaccccaggacttccaagggtgaagctgtcccctcctccctgccaccctcccaggctcattagtgtccttggaaggggcagaggactcagaggggatcagtctccaggggccctgggctgaagcgggtgaggcagagagtcctgaggccacagagctgggcaacctgagccgcctctctggccccctcccccaccactgcccaaacctgtttacagcaccttcgcccctcccctctaaacccgtccatccactctgcacttcccaggcaggtgggtgggcaaggcctcagccatactcctgggcgcgggtttcggtgagcaaggcacagtcccagaggtgatatcaaggcctacccggaacagaggagatgcaggcagacagagtggggaaaatgtaaatggggacagtggccaacgccgatgcaggcagatcccaaagtcagggttaagctatcctggccagcagaagccagctccccactccaccaccacaccctgtcacttccgtccctccccaatatccagaggagggtggactctgttcttgctagcaggaggcggccttgggaagttgtccgagtgggccagagaggctgaaggctgctgccttcctgcctggctcagtctctgcccagtccccagtccccagcagccagtggcccgtggcagggccctcctggggtcacagcctgcgctgagctcagtccagggaagaacaaagcagagaggaacagagtggagccgtggcaccttacacgtagttgctggcagcagcagagcgggcagcagaatacttggcggagtaaggcttgtctgtgcggggtggacagttgcagcaaagcagccccccgccaaggagcagcaggccggaggcggcccagccgacgtagagcgaggcacccatctcccgcttctgcccggaggccaccagcggattgtagaagtcttggatgatgttgtgggccgtccaggacaccggcactatcaccataaggccggccaacaggaacaccacgcccgccacgatcatggtcttggccttggcgctttcatcctccaggcagttggtacacttgccccccaccacggacagcagcacgcccagagcagccacgatgatgctgatgatgacgagggcgcgggccgcctgcaggtcctgcggcagtgccagcagcgagtcgtacaccttgcactgcatctggccggtgctctgcaccacgcagttcatccataggccctcccagatggtctgcgaggtgacaatgttgctgccgatgaaggccgtcacgcgccacatgggcagcgcgcagcacagcatgacggccagccagcccaggacggccagcgcgatgcccattacctgtagccccatggaggccattgttcagcgtccacgggagttgaggacctggaaggctgaggggatccggctgtgggggccgtaggattccaagcgctggggacggacttaacgttcgcagagtgcacctttgcaccgtgagtcaggagataaagccagtcctgatgcgcaagccagcaagtgtgagcagaccagttccttccagccgacagctgccagggcactctctctcggggacaggttgagcagttatatggctctggcagaggggcgggggcagagggaggggtttttgtcactggggcctcctcctgaccagtttctctggattcctgagcccaggccaacaaaggcacttttgaggccccagccccgggtccctgagtcactatccagtctcagaagaaactactctctccccttcctcaaagcccatgctgaggtcacccgggagacagacactgaatcacagcccagggacagctggatgttcacaggttaaggccagggggcaaccagacccagccaggtttgggagcctgaagaccagggtccccacaggccagtgccccctcattccaggcttaggtgggaggacagggtggggaccctgagggagagaatttgagaatgaagtcttggaaacgtccacgagaaaccccaccttgattattgtcatttcttgtccttaccagtttcatcactggcagtttcacgactgttgtgagtatgatcactcatgcatctggcctcaccagcagtctttgcggcattggccggataaagttacgtgtaggggagtgaggagccgggaggccaggactccggggtacatcacccactctcacccatccttatcacccagcttctctgcttggctagaagaggggccttggacatgatgcaccttcagccaaaaagagacagaagcctgtcccctctccacctccatggaagtttaggctggtgggctctgttcctgccgggatccagcctgcttgcccagaactgggtggggccagtcaccaacgacaaacatgaactagatcctggagacatcatcaccccagtaaatgggtgtttaccctgtggagacatacaaagccttccaataaagccagagtgggtgcaaagtcccatgagatttcaaagggaaggggaactcttccagggtggaggtggtggtgctgagggagcttgactgcaaaggggtgctgtgtggcacaactccagggggcgccggattcttggagtatgctacagaaggcatcgtgaacaggtcccccagaaaagttttgcaaggcagtgggacaggctgaaggaggacgttctggtagacggtgggccaggctggacaaatgcagctcattctgggatgacagccctcaggagagatgtgcaaggcagcgaggctagtgaaggaggacattcaggcagagagaacaagggcagaggtggcaaggtggggaaaggcagctcgttctgggaacagccaggaatccagtttgaccagagactgggctggggagggagggaccaaagtaaaagggtcagaaatttctgcctggaatgtcaccaagccctggaagatagagggagggtggagggtctaggatcaggaagagcttggttcagggcagatgactgaggggacctctgggaaggggtcatcgtgggggtgattgagagtgtctagggctcatcccagccgcaccgagggagctcctcctcacccgccgtgtggtcattttgcatctctcttcccaaccatgctgggagctctgcaggggccagggctccagtgtgtccctgagccgccgccattgtccagcactggtggctgtgtgtccagttctgacccagaaggatgcatagtccttgagcttcctgagggaaagtcttcaagagtgccatggtttgggttaaagcaatcagtgagtacccatgggaggtatttgagatggatctgttgaccggctaatgaagcacagggcaggctgggacaatctagcatggtccacctgtgttacagacgggaagttgaggcctggtattgtggttaactctatacacatccgtcttccctgctagcctggggctcctagaagacaggaacaatgccttctgcaacctcagtgcccagcatctggcttgatacatcacagatgctcaagaaatgtgaggagtggttgctgcggctcatgcctataatcccagcactttgggaggccaggatgggaggatcgcttaaggccaggagtttgaggctgcagtgaactataatcgcaccatttcactccagccacgggcaacagagcaagactctgtctcaaaagaaaagaaaaagaaatgtttgggcc

SEQ ID NO: 586300 - DNA, 4001 bp, Homo sapiens
gggagtgggcttgactcagggccccaggcagcctctgggtgaccttccagcttggtgtgtggtctgttctgcagcctgactggcaggtgggcagcccagccacagtggggaggaggaagcacaagggggtggaagtcagggcaggaggtggacaggaacagcaagcaggaggcattaaagggccacagcagcccagaagcagccctaccatgggggctggggttaaggttagggcagacccttcagaaatgctgacgaataaatgaatgaagaaatacaggcaagaggagggaacaacttcaagaaatagctttggcaggagtgaagcgtgggaacacagggccactccaacagtaaagccggagacagcgtcacgggggggtgtctgaccacctccatccattccacacaactcttcacaacccacagctctgctacagctcttctccttggtgacgcaacatcttcgcctcctctgtccctgccactgtctggtggtccagcttcagagtctgcacagcccttcctcggacagtgcacgtcccctggcccatagcctttgtgcagaaggctggcattaccatccccacctcgccatcctcagcagccccatgacctgccttggcccagctgctggttatgtccctcctggtccactgccccaccccctccctgacctcgagcctgggtcccacccctctgggccaccaccagtcttccaagggcaagcccaccatctccacccctcagtagccccttcagaacaaagtccaagctcctgggcaaggcctggctggcccttcaccgtctgggtccttcaggcccgtctctctccaccctgccccatctcagtactccagggctcagttcccacgtggcacagagtagctctgaccacctggcctgggatacgtcatgctctgggtctggaacaccttcccctctgtctccacgcctgctaagaggtcacctactcctgggaagccctccttttctgacactgcctccctaaggatgggtgatccaggctccaggcttccctagttaatgctgcccaggtcctccttgtccttggattcagggtgccaggagcaccctgagaagcacccaaagggccagccaccctctcaccaactcctgcatctcccacaccacacgccgccggcggtagctaatacaagtttccttaaagagctcatgaacttgaaatcaattctctacttgggttactgccccggaggcaggccaggggtccctccctgaggcagtctgatggaggagtaggtgtgacccctgaccttgcaaggaagagcctctcctggattctccacccctgccctgccctgccctccccacatgccccaccaccacggggtccccgcggctctcacaggggcgggcaccacctctggggtctccagctttcttactttactcgaagcgtgttcacgaccacagattccgccaccctctcaacacgcctgtctggtgggtgtcaggcagtgtttgtccccttcatgcgtgaggagacgaaggctcagagcgtgaagcccgctccaaggtcagagagggagtcgcagcagaggcggggtcgaggctgtgactcgcggtggcccccggttccctcccaccccaccccacgaaccggcgtctggccgccctgaaatgaatgactccgccgcgtcccggcgccgcgctcccagcgctcccctccgggacagcggccaaggtgactctgaccgcctccgggtcgcgggtcgggcctgggcaggggtccctgggccaggagagggaggccgctccgcgcttaccctccaaggccgccttccagctggtgctgccctcgtagcccgacccggatcgccgcagcagcccctcggggccgcgggcctcagcctctgcgggcgaacgcggcctgggggcggcgggggcgggcgcggggcgcgcggcgaggggcggcggcggccgggcccgcgaggggggctcccgggccggctccatgcggggcgctccgccgcgccgcgcccgcgctcctgcaccggggtgcggggcccagcccgacgcgcactcggcgctccgcgcgccctgcgggccccccaggccggcctcgggtgggctaggaccgcggcgctggcaggccggggctgagcccggctccccgcgctggagcctctgcgccgggtgccgccgcggtgcgctcagcgcctgccccgccgagccgcagcctccacgcacagccgggctggggaggagcgcgaggcggcgcgcgggagccgggagccgtggacccgggcggggcggggcaggggcggagagggaggaggcgcggaggagcggggacagccggctccccgaccccgccacctgggctggaggctggatgctgtcgagctgggagcgcagtcttggagccgggagacctggttctaactcagctccatctccccagccgcctgctcaccatctgtgaaaatgggaataaagttcgcggggacagtgcagggaggctcagggaagatgagcgcctttcttcccggctgccctggagccacagcagagggtggtaggggctgtgacttgacccccaaactcttgataaaggagagaaacgtccgaacgatgagcacagagacagtagagtctaaaggagcaagcgaagtgacgttgcagattcaattaacatttattgagcacctactaagcgccagggactttcacatattattagctgacaatgcccccaggtgaggctgagaagtggaattttgaggtcaaggacatttccgaaggcggcgccaggcaggtgcgtgcttggcgggtgtctgactcccaggccagggctccctccggagccttcactggccccttgcctcagctgacctcgcgtcgcctgaagccccacgcctccagccctgatcctcttccccctccaccattctcagccccaacctctggttcctgtctccatcttcagttcctcatccccagctcctcctgctccctcccccaaatccaataggccactgactcttgtgaattctcccttttaaaatatttttatttttattttttgagacagggtctcgttctgtagcccaggctggagtgcagtgtcactacagcctcggcctcccaggctcaagcgatcctcccacctgggtctcccaaagttctaggattgcaggcgtgagctgccgtgcccggcccctttttttttttttttttttttttgagacggagtctcgctctgtcgcccaggctggagtgcagtggcgggatctcggctcactgcaagctccgcctcccgggttcacgccattctcctgcctcagcctcccaagtagctgggactacaggcgcccgccactacgcccggctaatttttttgtatttttagtagagacggggtttcaccgttttagccgggatggtctcgatctcctgacctcgtgatccgcccgcctcggcctcccaaagtgctgggattacaggcgtgagccaccgcgcccggccgcccggccccttttaaactcttagtctgcgcattgcactccatccctctagccactggccaagtacaagccaatgccttctcttgcccgaccacagcagcagccttctaaggggtctcccatcctccactcttgctccctcctatccagcccctccccctccacacccgcagcatctacctaaagtgcaaactcaccactccttcaggggtccctttacctgtggattaaggccatctttttacaaggcctcaaggtccctcatggtcaaagtcctgctcctacctaaggcatcctctcctcccaccccttctctgccagccctagacacacctaactattctgactctttcctctgggcctttgaacactgtcttccttctgcctggaacacatctcctccttggtccttctaacccctccttgtagcccccatgcaccctagtttgcctaccaaatttctgctaatgcttctgattgcacagtctc

SEQ ID NO: 586301 - DNA, 4001 bp, Homo sapiens
cagaaggaagctggtttaatcgggagaggagaaccatgccccactcatctctctatctcccatagctactggctattaagcactttcacattctattacaatgattagatataaatcatccccatatccaggagaaaaactaaggatcagaaatttccctcagtctgctcttggttttctcatatgtaaaagaaagggaattaattagaagatctttatggaccctttgtacaaaagaatttcttgggaaaggaggctgtgtggaaggtctctaggaattcagcatagaagtagcaggaggatggggagaagatttaccaccatgcagattacctgttccatagctcctggtggtggtgaaaccatcgttacttttgttaaaaatctgtgggactgaaaagaaaatcagctgttggctcagccccaaatgtgactgcatgatgaatatgacaaacaagtatcagcacaggggctgctagggtactgtgactattagtgggaaatactgaactctctgactcagtgaagatgcataaatgtggttttgtgaatacgttcccttattcatatttctgtcctgctgtctgacatgataggaattgcaccttcagattgcatcatgaggaagacacctcttagctaactactgcctcccactcacgtttccttcctcatttattttccctactggcttctggggctagagaagattctagtttctgattgcagtaaaatcctttcataggaggcttctttaactaggcatttggatgaattaatttatatgtatacaaagagaaatttctttctcagttaaatcctgttacattatacttcagctcttaccatggccttgtcattgggttgaactggagctgtattttagattttgccaacaataacaagcgctgccaagtacttcagctgagatcacccaaataatactctactagcaaaagctttgcgtggcgttctaaccatcagaaactggtaagttctatatctccaaggtagaccaaggagcctgggccactgtgtgtgctggggagtgagaaaggcattgccaattgacctcaggttgggtcagttagtctcaggtggaaagacttggatatgtaacctttacacacaaccatgcattctgagagaagagtcaatgagcaagacaacatgaagtctggggcaagaggttgctcaaatactcacaataaagtagaaataaggtcattccaacaactttaagcactaccacaataagcccagagatgatcatgtgccagttcatgatgaaggagctgcaggggcctgtgaagattagagcacagcagcatcagaattcgggtacaaggctgcttttcactaggacatatcccagcctctcgctcagagtacccaaagcaaggcaggcttggaagacaggcatgacattgacaggtaccaggaggtgacccagcgtgggccgcgaacacagaaagaatcatgtattgattggagccttggaacttggcatactgcctctccttcactcattccctactccaggcctcagccttgccctatttgtggcctcctaaattctgtctaataattaaaccctctcctgtattttgagaacccttatccttgaaatgacccttgttcccaaggaccttagtctgtagccttcaccatactgacttaagttgtcagaagcctcagtcttccaaataccaggggtaggtgacagacaggacaggcatccctgaaggtcttggcattggtcaacagtccatgcagccaagacagacagacagactcacctctttctccctggaaggctaggcttgcttgcagatgggggtcttcctggtggcctaatgcttggtgtggcaggcaggggccccgtctcctgagaatatgctccttttgcccaagcaacgttcttccttcttcacagtctctgccttggtagcatccccaagaaatacctcttcctgttcagtggggttcttggcaaagggagcaggcggggcaaagaagggaagagactctctagccctagtggtggcaagagcagacttcctgccaggagagttctaatgcagaggaacattttaaggacaatttggaaaacaaaatacctcaacacagattcacccttcctctgtgtctaaatctccttgaaatacagtgggaagagaaatgtagtaaaattttaacaaacattgaatctggataaaaggtagctggaagttatttgtactttccttacaacatttctgcaagtctgaaattatgtcaagttaaaaatgttaagaaatccagttgaagacactaatatgaatgagcaggttcttgctgttccatttgctccatttgctggagctctgctcattcccctttatcatggactcctctctggcaccacctgctcaccttccagacctcatggtggctcttcagtgtttcttgaacatggcactctgctggatacagcagtgggctggggtgaacaatactcaagtcctattgtcaaggagtttttaatttcgtgttaaatttgaaaatttgcttttattttccctactatgaaaactactgtgctcatgacaaaaaaatggctggaaaatattaacaaggaaaattgagaaaacaaaaccatttataaccttgtacatttagttatagtcattgctagcacctcagggtgtatcctttcgagatgagtaggtagatagaaagatagatggatagatagatagatagacagaaaaacactggttcacaaagaacaatgggaacatattgtacatattgttttgcaatctatctgctcaagattaagctaacactatgttatatatatcttttcatgtcaaaatatagattttgataatgtattatttaatatgtgcatagcattcaggtgtaaaactatatgatttatttattcaggtgtaaaagtatattatttctttaacaattgcataaccacaaatcttctagtaaagtgtggtggacaagaacaaagttttaaaaatcagtcctgcttttgattcctggagctgaccttcactagctgaacatccttgattaagttactgagtctctttaccttccatttctttatctataaataggagtaattatagtaaataccacataggattgttccgagaaatgagcaagataatgcttgtaatttcaatagcgtgatactcagcatcttaaacataaatccttagtattctaactattttctaaaactcttctaactatcttcccaatgcacagtgaacagctaagtgcatgcatccttttacatgtccttaataactttcttgggctaagttatcagaaatataaatgctggatcaaaagacatgtacatttggagggctttggaacattaaagttgtgttttgttctacttggatagtcctctgtgtttttgaaaaatctcattgaacctgatttatctggtcacaaggtaattacttctagaccctagattgctgtccagaaggatccatatatttattggacaataaatatggccaattatgccagctatgttaggaagtatgggaatcaggagacttggttattattatttagaaagtttttaacagagactttctgaataacttaataaaatctatacacttggatagcaagtgaatcttttataacaaagaggtataagagatctttcaaatatcatcaaaagagaagaaaatgtcatagtataaaaggatgtccacagaagttttgggggtagtactctgactgatgcattgtgggacacctctgctctgctagaaaatctaaagaaaaatctaaattcttgttcaaggcttcgcactgcaatgcttctcttaaactcgacattatcagaaaccttgctaaaaaaaagccaatatctgcaatggcaaatgcaactgaggggttactagagatgaagtcaatagcattgggggcccatgcccattgctttgggaaaataataagaaaggggcttc

SEQ ID NO: 586302 - DNA, 4001 bp, Homo sapiens
agaggatgttgttgggaaaggcttcagaaggaagctggtttaatcgggagaggagaaccatgccccactcatctctctatctcccatagctactggctattaagcactttcacattctattacaatgattagatataaatcatccccatatccaggagaaaaactaaggatcagaaatttccctcagtctgctcttggttttctcatatgtaaaagaaagggaattaattagaagatctttatggaccctttgtacaaaagaatttcttgggaaaggaggctgtgtggaaggtctctaggaattcagcatagaagtagcaggaggatggggagaagatttaccaccatgcagattacctgttccatagctcctggtggtggtgaaaccatcgttacttttgttaaaaatctgtgggactgaaaagaaaatcagctgttggctcagccccaaatgtgactgcatgatgaatatgacaaacaagtatcagcacaggggctgctagggtactgtgactattagtgggaaatactgaactctctgactcagtgaagatgcataaatgtggttttgtgaatacgttcccttattcatatttctgtcctgctgtctgacatgataggaattgcaccttcagattgcatcatgaggaagacacctcttagctaactactgcctcccactcacgtttccttcctcatttattttccctactggcttctggggctagagaagattctagtttctgattgcagtaaaatcctttcataggaggcttctttaactaggcatttggatgaattaatttatatgtatacaaagagaaatttctttctcagttaaatcctgttacattatacttcagctcttaccatggccttgtcattgggttgaactggagctgtattttagattttgccaacaataacaagcgctgccaagtacttcagctgagatcacccaaataatactctactagcaaaagctttgcgtggcgttctaaccatcagaaactggtaagttctatatctccaaggtagaccaaggagcctgggccactgtgtgtgctggggagtgagaaaggcattgccaattgacctcaggttgggtcagttagtctcaggtggaaagacttggatatgtaacctttacacacaaccatgcattctgagagaagagtcaatgagcaagacaacatgaagtctggggcaagaggttgctcaaatactcacaataaagtagaaataaggtcattccaacaactttaagcactaccacaataagcccagagatgatcatgtgccagttcatgatgaaggagctgcaggggcctgtgaagattagagcacagcagcatcagaattcgggtacaaggctgcttttcactaggacatatcccagcctctcgctcagagtacccaaagcaaggcaggcttggaagacaggcatgacattgacaggtaccaggaggtgacccagcgtgggccgcgaacacagaaagaatcatgtattgattggagccttggaacttggcatactgcctctccttcactcattccctactccaggcctcagccttgccctatttgtggcctcctaaattctgtctaataattaaaccctctcctgtattttgagaacccttatccttgaaatgacccttgttcccaaggaccttagtctgtagccttcaccatactgacttaagttgtcagaagcctcagtcttccaaataccaggggtaggtgacagacaggacaggcatccctgaaggtcttggcattggtcaacagtccatgcagccaagacagacagacagactcacctctttctccctggaaggctaggcttgcttgcagatgggggtcttcctggtggcctaatgcttggtgtggcaggcaggggccccgtctcctgagaatatgctccttttgcccaagcaacgttcttccttcttcacagtctctgccttggtagcatccccaagaaatacctcttcctgttcagtggggttcttggcaaagggagcaggcggggcaaagaagggaagagactctctagccctagtggtggcaagagcagacttcctgccaggagagttctaatgcagaggaacattttaaggacaatttggaaaacaaaatacctcaacacagattcacccttcctctgtgtctaaatctccttgaaatacagtgggaagagaaatgtagtaaaattttaacaaacattgaatctggataaaaggtagctggaagttatttgtactttccttacaacatttctgcaagtctgaaattatgtcaagttaaaaatgttaagaaatccagttgaagacactaatatgaatgagcaggttcttgctgttccatttgctccatttgctggagctctgctcattcccctttatcatggactcctctctggcaccacctgctcaccttccagacctcatggtggctcttcagtgtttcttgaacatggcactctgctggatacagcagtgggctggggtgaacaatactcaagtcctattgtcaaggagtttttaatttcgtgttaaatttgaaaatttgcttttattttccctactatgaaaactactgtgctcatgacaaaaaaatggctggaaaatattaacaaggaaaattgagaaaacaaaaccatttataaccttgtacatttagttatagtcattgctagcacctcagggtgtatcctttcgagatgagtaggtagatagaaagatagatggatagatagatagatagacagaaaaacactggttcacaaagaacaatgggaacatattgtacatattgttttgcaatctatctgctcaagattaagctaacactatgttatatatatcttttcatgtcaaaatatagattttgataatgtattatttaatatgtgcatagcattcaggtgtaaaactatatgatttatttattcaggtgtaaaagtatattatttctttaacaattgcataaccacaaatcttctagtaaagtgtggtggacaagaacaaagttttaaaaatcagtcctgcttttgattcctggagctgaccttcactagctgaacatccttgattaagttactgagtctctttaccttccatttctttatctataaataggagtaattatagtaaataccacataggattgttccgagaaatgagcaagataatgcttgtaatttcaatagcgtgatactcagcatcttaaacataaatccttagtattctaactattttctaaaactcttctaactatcttcccaatgcacagtgaacagctaagtgcatgcatccttttacatgtccttaataactttcttgggctaagttatcagaaatataaatgctggatcaaaagacatgtacatttggagggctttggaacattaaagttgtgttttgttctacttggatagtcctctgtgtttttgaaaaatctcattgaacctgatttatctggtcacaaggtaattacttctagaccctagattgctgtccagaaggatccatatatttattggacaataaatatggccaattatgccagctatgttaggaagtatgggaatcaggagacttggttattattatttagaaagtttttaacagagactttctgaataacttaataaaatctatacacttggatagcaagtgaatcttttataacaaagaggtataagagatctttcaaatatcatcaaaagagaagaaaatgtcatagtataaaaggatgtccacagaagttttgggggtagtactctgactgatgcattgtgggacacctctgctctgctagaaaatctaaagaaaaatctaaattcttgttcaaggcttcgcactgcaatgcttctcttaaactcgacattatcagaaaccttgctaaaaaaaagccaatatctgcaatggcaaatgcaactgaggggttactagagatgaagtcaatagcattgggggcccatgcccattgctttg

SEQ ID NO: 586303 - DNA, 4001 bp, Homo sapiens
agggagtggcagagctgggatttgaacccgggctgttaagctccagcatctgaactcttcaccgccaaggtagacagcagatgccggaaagcgattactgctccttggagtaaattccccctgctgggactttgggctctgagtgcagaattccaggcaccaccttcccagcctgcacggtgctgagggctggagtttgcaggtgcacacaggtgtgtgtggaggaggctcctcccaggcgcctccacctgcctcttctgcctttggagcccctctccatctccaccgcctccacctgtcctgaagccagaatcccatcattcccccgcaaggcactgcagacaagaatgcatcctgtgctcaacgcaggtctaagttccttaaatcctaagctgtttctctaacccaatagcctccttttctgactccaagcccttattcacgctatttctcctgcacgaaacccccttcaggcaacctggcagcaaacttctgcaagatgctctatgaagcttcctggtctgccccatcctccaggggaccccctctatgcccccagcttccccactaatgcactcatcaacccccggggctgcactttttggggacaccgaggctgctgtcctgtggaccagccagcccctagaagtgccaggccaggtaacagcagctgaatgaagggcttattgtttacatttacaaccgaaagggaagaggcttctgaagcacacacgtggtgctccccgcaccctcctcctcctctgcccacagccctaggccaccccacccacctccctcaggcatcgcgcaagagtgacggcagaccccctcatcccagacccccacttctcacccagaagtgagaggaggggtctcagacgttgggggacacactgctgggtgggtgatttccccccaaggtgctccctctgcccgtccttcccagggtggggctggggcctgcgtggcagtgcccagtgggcacccgctcggcccaagctctgcctgaaaggtccaaacgggcgggccctgaaggttcagccaagcatcctccgcggccgccgcccctccccgggaggagggcagaaaatctgctgcctcaccagccaccagcgccagcttggggggacaccccctgagagaagccgcccgcctcaatctcctcctaccccacctcagccaagcacttcaaccaagttttgcaaaggccatcggccaggcgaccccagagggtgtagcagggaggagaggggggcagtccctgttctcccagaccccaggtttggagatgggggctgcatggccgcgcccaccaggctgtgctccccaggctctgtgagcccagagagccctgcggcgcgtccagccgtcttgctctgcccttggaagggggtacgggcgaccctccaacagaagggccaaacccccgtccgagggtagggaccccgatgaggctggtgatgccttcaacagggggacccgcagcccgggaatagcccccaaccctggcaccccaagcagtgccccctcctctcctacaagcaacggggaagttggggcacaccccagccagctcccgcccacgcccaccggccggcctcgaaccctcccgcccccgcccacgccccgacaatgcctccgggcccgcagccccgctttcggccaggccgccgccccccgcatctctccgtcctttgttgcccgcgcgaccccctccctcggcccctccagcagcccctaccttcgtccttccagcatcaggctaagcggcgggaggcccggagagccccggcctcctcctctcgggcccgggcgcgctggggggcgaggatgctgcggcccctccctgcgcggcgctgcccaccggctgcaccccctcctggcgccggggatccccgcgataggtgctcagggcccgggcctcgcgccacgtctctgggaaggcgggaggcgcgcaccgaggccgcccagcagccgcctgcgcgccccgcggccgagccgagctgagcgcccgcggagccagcggagccagcggagccagcggcccggctccgggagggaacaaaaggggccggcgcaggggcgggcgcgggagggcggggcctggggcgggcgggaggggggggcgggtcaggcgcgcgtgggcggcctcgcggttttcaggcctcagtgcctcgcggaaagcaggcgggcgggcggaaaacgcggagcaacctcttccccctctccccgctccatctccttcccttcccaggccgcagctgtcctttgtggggcgtccagggttcgcccacatccacctccgcgctgggcacctggtggtgcttacatcgcgtttggtgaaacgcatcctccagccatgctatgcttgcaaagatgtctctggtcattgggaaggacggcagcttgggaaggtgagatgctgttggcgctggacagaaaggatgaggagggggacagtgcagctggggcgaaaacttcaggtctgtgttggggccagcgtgggtggggaactgtggcacagggtctcatggttatcaaggatctcatagcctgggcagtgtctcacgcctgtaatcccagcacttcaggaagccaaggcgtgcagatcgcctgaggccaagagtccgagaacaacctgggcaacgtaaccttcgtctctacaaaaaatacaaaaattagctgggcgcgcgcctgcggtcccagctactggggaggctggggtgggaggatcgctggagcccaggaggtcgaggctgcagtgagtcatgatcaagccacggcccttcagcctgggtgacagagcgagactccgtcccaaaagaaaaaaaaaaaaggatctcatggtgatcagcttccaagatacaaatgaaccctccccaggacaggatgcatgtactgctatttcagaggagttgaggcagctgccaggtcccctcctgcgtggagaggcagatgccaagtgacagctcaggaactaaacagtgaccaagccccagcccctgtccatgcccaggctgcggttggcttctgtggcttggtttccctctgtccccccttgataagctcgcctggatgcctttgacctagctggccgttctaccagtcctgccctgccccctttctctgtttgacaaatcatattcccccttcaaagcacagcttaaatgtccctgcttttcccttgagtgcaggaatgtgggtgttgggggaggttgtggtctgtatggtgagaccactgttctgcgggagagaagtgccacatacgatcttgttcctatcccctaagggacccagtgcaatgcttggcagagggtagacatccagtaatatttgttgaatgaatgaatgaacttactaagttaacattaccacccctcaactgtcttggtatccataatctttgagaagtgagtgaacctttttttagagaaggggtctcactctgtcacccaggctggagtgcagtggtgtgattacagctcactgcagcctcaaactcccaggctcaaatgatcctcctgcctcagcctccagagtagctgggactacgggcatgcaccatgcccggctaattttttgtgttttttatagagatggggtctcattatgttggggtccaggctggtcttaaactcttggcttcagatgatcttcccacctcagcctcccaaagtgctgggattacagctgtgagccaccgtgcctggcctaaacattttgacctcagtttccccatctgtaaattggggagagtgtttcaattcagttcagcgaacatgcaatgctgtaatgatggaggctgggcatggggtcagccctgagggggtgcccagttggtgtggagagccagacttggagactaataagggaggaggttcagagtgaactccagaaagactgggcttctgtaggaggtgtgaacccatagggagggaggggactcagggtggagagggcagtgttcaggaaacagggagctaattgttccttgtggctgg

SEQ ID NO: 586304 - DNA, 4001 bp, Homo sapiens
tgtcactgattttaaacatttttacatatatcttaagaatacaatgtcatgtaagtcatgtttaaacttgggatgtatgtatttgaactatgtaatcttggttgcttttctggtaattctttatctcacagtggtctgattatagccagggctgcttcttcccattttaccattagtcagtacatcttaattttgctttcaccaaaacatggacatcataagccacctcttgcttccagttttctgctttttactgtagataacaatgacagtgagttccaccaaatgcatgtatgtgcacagctttgtcattcttttcccagcccccttcttttctatgagaaaaatacgaggaacttaggtttatataaaaatgtcgatttttcttttgcatacataactaatggattttcaagacaagacaatttattctgataactatcatcctagaaatgtcaagagaacttcccaaatccaaaaataagaagaaaatctgatattaactggagaggaaatttccactcaaatcataaataaaatgtcatcaattaagctgaacatcaataaaactcagtcaaaaatcaagcctcaatacagaacccacacataacccacatgtaatcaaaatatcacttatatttgctagcggagttcacagatgaattctgtatgtgcgccagatttatcttattttgtaatgctggggttaatatttattggtataaatcagggcccacactaagtgtcctggggagaggcaatccaaagaacgcttagtagcatgataaaaccggtccaaaacgaaaaaaaagaaaaaaagccaagtcctaacacaacagagcgaataagcgacaaatagatcacagaaagcaaaacgaaaacggtcctctccggagtagcctgaataaaagatcttcactcataacgtttaatagtatcctacctcacttcattcacttcccaacttccttttacttttcaagggccaccacggggcttccctttttctggaagtgtatattgaaaggatctgtacaggaaagagggaaggaacggacaattctcaagaaggctgagaaacaggtgggttagcaggaggagcataatctagatacttaaggggcagctttaagatgacagatgtggtggaaggaaagactgcaaatcggaagcagctctagtgtggcagatacactgtgggctgattgcaagcaccagaggggggcaaaggctaactccagagtggtagcagtggagcaaaaaaacaagcagcaggacgagtgggcaatgagcagtgggattaatgagcagcagcagccaacacggatcagagtggaagtgatggctttggtcttgggagacgggggccagagggaaaggacgtcagacagggaacaggggattggggaaacaaggagggctgagacctaagaatcctgccccggtgaaaatgcagggggaaaagctggagaccaaaagccgcctcggctccccaattaaagaaattctcgaaggagagtcgctgcttgccgccgcgctgccttctgacccgctcccttttccttatggtaactgctgtggcgtaaaggggagagggaggaagaggaggaggaggaagaagaccaaggaggaggagggtgaagatgaggcggggggtggggagaaaggggggtgcggcctgtacagtcccagcgaagcctccgctctctcgtagccggtcagccccgggtttcccctaagcccagccccgcatagactcacccgcctgccttgcctcgcttttccctcagccgactccacgggctgccgcgtcctcacaagaaaccaccgaacgagcgtcggggaaaaaactcttcagaaccgggcctgattgcttcagcgagtccgacctttacggctgagagagagactctcagctttcggtgggttccacagccagacgggccaccatcttacattagggtaagactcctccggcctcccgtgcgcaggcgcacgctgatccggccaggaggggcgggggaggggcgggaggagcggcgggcggctgagtgggaggttgcggtggccgctcccgcagcaccctgggagttgaagtcctcggagggtaacctcccaggggcacgccgggagttgaagtcctctctcagagggcggaggggatcgcccacctcacgtggctgctggactgatgcctttcttcgtgttttgcttccttctctgcacgcgtgtgctgcttcaatgtcatttggtcggcggttttcactagtgattccgtgtcctcggtgtttgcggaaatgtgctaccccaagactggggcgaggctaaacagtttttcggggagcccggaatgtttattctctgccccgcccaccagggatatctaaagggggcggggtggaggtggaggcaggttgtgggtacgaagagcgcgggatttgatccagggtgagaatttgatacagacttggcgtctgtttgcgaacaaggaggaaacaggcgcctgtttaattcatttccctgtccttgcgcatttggggccaccacccttgatcccttcttcactgtaaaatcaccagtgaagacatacactaaattgttctgtgcagattacccaagagaacggaacacccgtgcacttacaataacgtgcttctgttggtgtgaatttgagaatttgcggacctcggtgcaaattagtgttagttcggtgtccagccagcacagctgtgtgcaagtttacaaactacacacatcggcacatccccaagaacaataaatgcagccacaatccctacgagcactgaggaatcatcagtcacaaaagtcagtcaatgtactggtcgccccgtttgcatcccagaactctggtggaagtggcgctcgaagcagtaacttttgcttattgcatgtattcttcacccactcatacagcaaatactcaatgagctcctcctagctgccgggtactcttctatatattgagaatacaatggtgagcaaaatagaaaaaattccctgtccctattctagtgatgtgttgggatgaggaagaggagagaagaggcattattttaaaaatacgtgattaaaatgcatagtatgtcataaccgattttaaaaacttaaagcagggaaggggagtagggaaagaggttgcagttttaaatttacgaacttaatttcataataagccctcaattcattgttttttctttttttttttttttgagacggagtctagctctgtcacccaggctggagtgcagtggcgcgatctcggctcactgcgacctccgcctgccggattcaagtgattctcctgcctcagcctcccgagtagctgggattacaggcacgtgccaccacgccaggctaatttttatatttttagtagagacagggtttcaccatgttggtcagcctggtctcgaactcctgacctcaggtaatctgcctgcctcggcctcccaaagtactgggattacagacgtgagccagggcacccggcctcattcttttggtacattggttttctgtgtttcagtttcctcactataaacctagagacaacagttacttgggtaaaaattaaaatatgtagtgaagtcacattttacccaaagtttgaaattatagaatcatgaaatgattacctagcaaggaaacttgggaaattatttggatttccctttaggtaattaaatgcctaaacattcaatatggttgacatttttatttaaaaatgtgtttattgttcttgtatatattactgattctatagtagtatataaacaaagtaatgaaaagaacaaaataaaaagaagccttcccattatgaaagattagaatcatcacagtaaaaactggaagggatcttaagcatcacctaatccagtggcaaccttatcttacccaacattcctttttttaataaatgtttttataatatgctctttgttagcctaaaatgaaattcataggtatataaactacctata

SEQ ID NO: 586305 - DNA, 4001 bp, Homo sapiens
ttgcttcaccagttccccagagccacctaagccctgagcctctggccactgtcagcccggaagcaacagcaagaagccccgagcaagatgagtggccctcactgtgcgcactgtcactccccctgcgtggatcaggttaaagtgtgagaaccggatcaacctggattccagactgacagcttgagcaaataaagcaagatatgcgtcagcatctgctcaaactaatacataagattttgcagagatcaatgtctaggaggatacttcataagttaaaatgatactaacatttagagaggaaatattggttctgaaaattcagcgtgattggttttatagctgattgatgacaaagctagcttcgtgggttctgctcacagaagagagctgtgtctctgtgtgtccctgcaggctctgtgtcttcctgtaggtcactgcctttcccaactgttcttaaacagccttctccagctctttagaaggaggaccccagatgggcccggggccgtggctcacgcttgtactcccagcactttgggaggccgaggcgggcggatcacaaggtcaggagatcaagaccatctcggctaacatggtgaaacccgtctctactaaaaatacaaaaaattagccgggcacggtggtgggcgcctgtagtcccagctactcgggaggctgaggcaggagaatggcgtgaacccgggaggcggagcttgcagtgagccgagatcgcgccactgcactccagcctgggcgagagtgcgagactccgtctcaaaaatagagggaggaccccagatgatccactgctatattttatggttcctaccacctcctcctaaaataggttgctgagaattttttttttcaatcaaatccaactgaaaagaatttgaattttaaaatcccataatacctctacaatatcttcccatattattacaatggaaaaactgcctcgctcatggagttcggtctgcaacacacagaccgaacttgtgtgcttgtgcctcgccgtctcctggctatgcgtgttgggagtccctgggaaccatgacggataaagttcatctcatcagtcaggaaaattcatgccctcacacaccacccgtctgagtctacagtcagaaaacaaaacgtgctcatttctcctttaccgctattaacaaccaaaagaatcccaaatcgatacccactcaacgtccttctaacaggtgcaagctctgcacatcgctagaggatcttctattgcagttagagtaaccaagcatacgccgtacagtgacaacatctgcgtggctcacaccacacaggcagccgcagaaacagcgcctcccaaacggcgcggcctcgctcaccctcaaaacccactccgcgcccgacgggaacggctggagggaggaaagagccaggcacctctcgttcggggtctgacattgtcacctggcagataagtgagtctgctcggatgtgccggctcggaacatgcccgttcgtcaaagagggaggggaaacaaaacgagcttgtgcctcattcccggtggctctccacgcaaagttaacgtttgtttactctaagcatatgcccaggtgaggcctgcacagccacctcgccgcgggtgcagggcgcgcctcagaatgacagcgaggtgcacgctccggcccgcgcagagcggggccagctccgccacccagcgcgcgggaagccccgcagcaccagcagggcccgtcgcttcgctccgtcccggtccggcgtgaaacccccgaggggaaaagcgggtatcaaatgtgaattccactcgtccacagcgccgggcgttatgaaaatctgagcacctttgaccggagaagcaatagctatgggattaaggcgaatttcttacggagaggagaaagatgtgcagtttgtaattacctgctccctgtagtacagtccgtccttcacgcctggatctaacgggacaaactctcagcggctttgctctcccggcattgtttcagcacccaccaagaggattaaaaataatctctttcccttttaattttgtgtcccccacatcccctcctcctccccacatcccctggggacagcataaatttttaatccctgaggtttgggagggggagggggtgttaaccccttgttgaggtggcggccggaggactggaagcccggggggaaaggtccccctgctggccccgccgggaagagcactgcgtccccctaggacactgacatgcctgccctgtatgtgcactgcagcgggttaggggccccaaaacaggtaagcaggaaaagccgcctttcctttcccctgacccaggcacagtctcctgatggcctcagatgcctcctctggtgcccagataggctgccagcccacgcagctgctccacgccttccctgtctctgctctgagataggtgactttgagctcacacacacacactcacacgtgcatgcacacacacacatgcacacacacgtgcacagaggcacacatgcacacacgtgcacacaggcacacacacgcatgcatagacacacatgcacgtgtacacacgtgcacagacaaatgcacatgtgcacttgcatgtgcacacacagacacacacacactcgatgcgaacacttgctcctcttcccccaggtgtgagtttccaccctggcctgatgacgtcaggccttagcatgtgggactgaccgggaaggcggatcagctgcaggggctgaggtctcagcctgctccactcacagcgtcgcgggatggcccactgcactgagcgaggcagccctggtggcaggtccgggcaattcatagaattgggtcctgaacctcccctactgcccccacagcagcaaggggctggcgtggagactggaacgtaatgggactccggcctccggtgaaggccacagtcaggccacaactaacatgcaaagcacagggctttctgggcactgagggagcgggcgctgggcggctcctgagcaggaaagaccaggctggggagtcagagctcagcctctgctcggtgtctgtggacaagagatgctggagggcatcacctatcttcctgggaggatgtgactgaggaggtcggcggttctctggctctggtgggcacaggaccccagcttggggaaagggaggttgagacagcccagcggtgacctggctgatgtgagagcagggctgtgttcagcagaaaaggcagctggatgcacagcacattgcaaagggcacggagaaggctccgctcaaaaacaaacaagtggcaaaacactcctgcatccccaattccctaatgccaaatccaacatttgtggggctcctgcctttgcctggtcagtatgcaagcacttgtgggatggacccagcattggtgccagggcttcaatcatcatggagtattaatgccagctgttcctatgtgccctgcctccaggaaggtgagctgtgccggaccaacagcagaagcttcaggggagagccttctcagtttgaacacttgggagaggaggaagggagcatttcaactgcagatgaatcatgatccagagatgggagaagccaagagcttacaggtgcacacactcaggcacaatggcagccgaacacacacaaggcataaggatacactcaagaaatgtacagaatccacaggagtaagacagaaaagctttaccaaaggacatgaaggaagccgggaatgaacagagcacatatcatgagacaggtccaaccaactgcctccccaaaaccccttctcccttccttgcctacacacgaggcctgatttaatcctagaaggcttcaaatagggaggtgacactcagggcccatcctaccttccacggggctgcagaggctggaaagcaaagccctacacttccaagactcatttgcagctggagggttctatgggatcagggtcgtgtcattggatgcattcatctgtgatttggaaggcggtggacggagagccagacttctcac

SEQ ID NO: 586306 - DNA, 4001 bp, Homo sapiens
tgaaaccccatctctattaaaaatacaaaaactagccaggtgtggtggtgcgcacctgtaatagctactcgggaagctgaggcaggagaatcactcgaacccaggaggtggaggttgcagtgagctgagatcccaccactgcaccccagcccaggcaacaaagggagactccatcttaaaaaaagtaaaatacattaaaaataaataggccagcacagtgactcatgcctgtaatcccaacactttgggaggctgaggtgggtggatcacgaggtcaagagattgagaccatcctggccaacatagtgaaaccttgtctctactaaaaatacaaaaattagctgggcatggtggcgggcgcctgtaatcccagctacttgggaggctgaggcaggagaatcgcttgaacccgggaggcggaggttgcagtgagcgagattgcaccactgcactccagcctgggcaacggcatgagacgctgtctgaaaagagaaaaaaaaaaaaaaaaaaaaaaaaaaaaaaaaaatatatatatatatatatatatatataaaattaatacaattggataataatagtatgtccctcataggagtgtgatgaagattaaataaatcaacatatataaaggctggcacatagtgagcactgtataagtattcactgttatcctgcagttatttattgagctccttctgtatgcatactaacaatatagacagcaataagacctattatctctatctacaggtctctgtcagtgtagttgggacagataaaccaaggatgacaagctgtggtgaagctgggcctgaactcatgggctcaagtgatcctcccaccttggccttccaaagtgctgggattacagatgtgagccactgtgcccaggcccgttggctgtattctgatagaaggcctgcagaggtgttaaagcaaggactgatacaattaggtgattaagtctgtttaaaaagattgacaggtcaggggagaagagcggcacacggaggtgaaaggagacagagatgaggaccaagtcatgagactgtcatgactgcctttcatgatactggaatacagttgagggggtgaagcgaagagaaaaggaatccagggaagaaacgtaaagtcaggagggcagcaaactagggcatcagggccagccccctttctcaactgggccccacgctagtgcagctatggaaggcgctgcttgctgaaaaatccatatagtacgcaccgtctgcaaagtctcaccggatggggacactctcctagttgtgtggcttccttttgtttatgagcttcaaaggctgaattactcaccctcaaaccccctcagcggggtgtggggcctgtaatttgggagcgtctatgctagggtagggcagcggatgtccacaaggcctgagcctcacacccggctcctgcagcctctgcagattaaggtctggtgacatgaggtaaacactcactgaagatgctctaaaagttggcagtcccgggccgatggtccctgaactacaattcccacaatccattggcgggcggggggttccaagccagccaaaaaaatgcaggctctctctggatgcagtttgaggtggcactacacgttcgcttccttgaccccatccaaattcagccaagctccaccagaacctccctcaagccttcaaggaggtcgggtgacccacccaatacaggctaggatgtccggcctagaagaaggaggtgtggccgggcgatgcctataggggctacccccttcaaataccttcgcatttgctgggcaagcgttctgtgtcatcgtcctcctccttcaacatcccagcccaagcctcgtgcacggccaaaaaaaggaaaagcaatattcccaaccgcacaggtcccatgacaaagcgccgtctacaaacaatcaccgcttgccttcaacttcgggaaggtagtgtgggtcccttaaattcccaggcggctagcggcaaccttaaatccagccgaggaaggtcggcgcatgcgcaggatcagcccaacaagggtggggcctcgttgctacgggtttccctgcctccgttttgtggcgcctcttgaaggtcctggcagccgggtagtgaaggaataaattgcagtaattacaccaagagggagtgctccttatatatagatgtagaaacaaacttttaaaatataatttcattctgcgagcctagaggacttattctggtacggggaaggggcagtgacttgctcttaggctctgccaggacctgctcccacgagggggcggggccaagatggcgccgagcgccgggtgagcagcgtctcggctgccgctagagttttcctgctccccgcgctcgggtggcgggggcgggtctgagtggtaccccggaggagaccctttgaaggtcccttgtggggactggaaagaggacggttggttgtgtgtctgtgctcgtggggaccccgtgtgtgtgcctgcattggagagatgttgcaggagatggggtgggctctctgaacctcctttcgcgctgcccggggatcttcgacctgcttctctgctgggatctcgcttaagttaacccttccctgggacgccttcctgccgcctccactgatctgaggagatcctgtgactgtagcgtgttttatgagcctttactggcagagggtaccgccgggtattgaaggattcgtaggagttcgccagggaagtgggacacgaccccctcttgtaaacccggcgccaggcacagagtatgtctcgaatagttgtgttccctatagataagacttataaaagtcggggaggagatcagggatggtttgaaaagaaccaatttgtttttcggcctccctcttcccatccttccagcacggccccaccctacctgtactactcctaagcagtattgatatgttaatcttcctaatgtccaactgcaagtgtgccactttaatttttttttgttttttttttgagacagggtttccgtctgttacccaggctgttgtgcagtggcaccatcttggctcactgcagcctccaactcctcagttcaagcgatcctcctgcctcagcctcctaagtagctgggatgacaggttcacaccaccaggtccgtctaattttttaatttttgcagaaatgggggtctcactatgttgaccaggctgtctcaaactcctggcctcaaacaatccccccacctctgccttccaaagtgctgggattactggggtgagttacctctcttggctccaatttgctttttttttttttttgagatggagtctctctctatcgcccaggctggagtgcagtggcacgatctcggttcactgcaacctccgcttcctggttcaagcggttctcccacctcagcctcccagatagctgggactacaggcgcccgccaccatgtctggttaatttttgtgtttttacaaaaagacagggtttcaccatgttggccagggtggtctcgaactcctaacctcaggtgatcttcccgccttggcctcccaaattacaggcgtgagccactgcacctggctccactttgctttttttgttttttttttttttttgagacagagtctggctctgttgcccaggctggagtgcagtggtgcgatctcggctcactgcaagctccgcctcccgggctcacgccattctcctgcctcagcagcctcccgagtagcagggactataggtgcctgccaccatgcctggctaattttttctattttttagtagagacgaggtttcaccttgttagccaggatggtctcaatctcctgacctagtgatccgcccgcctcggcctcccaaagtgctgggattacaggcgtgagccaccacggccggcccagtttgcttttaactacagtgtaggctcaaagcttgggcctatgacctattaataatagtgataccaagtatttactgagcaccaatatctctaagccttacaactaattcatttact

SEQ ID NO: 586307 - DNA, 4001 bp, Homo sapiens
tattaacaatatttaactctttgtgatttaacttgtgttataaaaaatgctatacaatgttttcaagttcattacaaacttagattgccagttagtttatctccttatctttacacattgtgggaaaagaaaagctaatactgtacttaggaagatatgtcaaaacagtaatactggctcataaccggatattatatagtagattccttattacaacttataatgtcctttttcaatgctattcctgttgatatttaccactacaataagatcattattaacaaagatgcattaatacatcccaaaatcttagaaacaaagactacttcgcatatgacgaattctggaaaatattaaacttttcttttcctaaatggacaaaaaaatcttccttttaaactctgaaatctccacgataattctttatcaacttactcattctcagaaactagtatgcgcttatgaatattatcctaagattcctataggcagtctttctagtgtttaactctttctgaaccaaaggaacaatcatgcatttcctctctacatgcacagtatgcacttctaaaggaatgcagaaaatgggccagaatcttccatttctttctaaacctcatgaaaacaggggcagtcttaaacacacacacacacaaacacacacacacagttgattaaaatgcagagatatacatattgaatataattattttcctgaaaaccctattaagaatctgtttattactacattaacgacgctttgcactgagtgtcccaagtaccgtactgcatcagtcatatccatgatatcaaagtatcaaagaattaaagcaatttcagttacaatttcgctgccttccattttaataagcaagtactaaatgggcattaactttttaagggaacgggagaggttaaagagaccctataggtgcccaaactgtttaaaacatgctcctcttgttaacctcaaccccgtgctcattaagttataaccataaataaaaataagaaacttggttttgccatggtcttcacttttcattcactgacctacctaagccaaatgcagttaactctccctgcacaaacaactcctaagaagctgccatctacatcagtctctctagccaagctcttgccaaccgatcaccaagaccaggaacaactttccagaaacatcaccagcgtcacaaccctgtctcttccaaaacagaaacgctgggtttcgagtttgtctactgcagtggctgcaagtgtgtgacagcggagacacaaacacatcagggtgccagcactgcgatgcacttcggagttgataccctggtgccaaacatcaatgccgcactgaaactgctccagagcagagcgaggagacggctacttacgggacgtggagggagccgtccaggctctgcagaggcagctgctgacaatccacagcaggagcgctgccccgcagccggcgcgcggagccgcctgcatccttcgcctcccggccggcggcgctccaagagctcgctgcggagatgcagtccgactctccgtagggttcttgaagggagatgggctgtcctcaaatacgcgaggaagccaagcccctcccgcttcctcttctcccctcacccccctccaggctccagttcttccgggcttggagcggcaggggagtctcagccttcgttctccctccgtgcgggtattgcctcttgcactgtgtgccagtgcaacgccgggggaggaaattcaaaccaagaaggcaaaggagggggaagaggggagggaacggacacctaccccgccctctccttcttgaaaaaaaaaaatcaccaaaggacgggggagggaggtaatcagaagagcagaggctgcagaagaggaaggcagagcgacggggacggtggtgcagctgttgccactgcgggcgagcgctccctccgccgccgggcagcgtgactcgaggggtttccactcgcctgtcagctcacatggagagcttgtgtatgtggggagcgcgcagcgcagccggggcgcacgcacggcctcagcgctgcgccgcgcgaggaagcatctcccgggcggcggagcgcgagcagcagcaacagccgcggagagcaggagacgccgccgccgccgccgccgccgccagctcctgtgagcccgggcggcgagcgaggcggagggaagccctcccttctcttcccttctcggttccctcctcggctcctcctcctcctccgcctcctcctcctcttcctcctccttaccgtacccctctggctgtcaaaacccttctgccctgccctggcctcgtttgaaagcaaaagggagactgagccgaccggccggggtccatcagctggggcgggggcggagcaaggaggcgcgcgcctctccctgggcgggaggtgatgctgtccgcggtgctgaagttggggatttgccgtgtaatcctagaaccctgctccaaacctggctgccccctacccggctgcaggaaggagaacaccctcgctcggatgccttctcctttccttctctcctccccttcagataaagatggtacaggctcctggagctccggccccccgggaaccacagtcaggcgtccgacaggcaggtcttccgagtggtcctaacaccaagtgacggtgctaaacatcccgactgactggagcagggagggaggactgcagatgccgttaatgcacatgttttcgatatgtaattaattcgtactcatacatatgcacacgtacaccaaacacacgctgctgccaggagaaactacacttaggcaaacacgcatacaaacacaaacacaaaacggaaatacataagcaggcatatgggtaactatttcaaggtacctgaggcattgcaagcactaagaattaagaatgtttagagagacctagattttttcacatttagataattttaataataattatcaagctcttctccccagctcacagctcttcacactctaccctccatatgtttttcttccatctagtctacttaaagtatttgaattcttatgtctctgcagagccaagcattccactgactttattgacacaattaaaaattattggtcatctaaatatctaatgatgtttgtggaggactaagtaggagtaaccatgtctttcgatgttatgcaatgaataagcatttgcatttaaagataaatagaaaatttatggaggcttgcctaatcctggaataaactgagtttttaacatcattgtttggtcttagaaaggtccactgtaaatagtactgtgtattcactgcataattaatatggtgttaatgggtctgattcagcgctttttatttgatctttgtttcttgttaatttaaaaggatgctttgtcctagtaagaactgcagattgggtacaatatggaaaatgaagaaacacacagatgactaatgggaggtgaactgcctcctcattctataaaatactcctcctgtaaaataatacagcaaatgcattcttatggattataaaatgtccctttgctgtttgaattatcacagactgtcaaaagtcaatgaccacttgccaaaacactccagtaaagaactgccatcagccatttctaagagctcaaagaaacaagtcataggaaaaaaaaaaactgtcagaaagcgtaacttttcagaacaatctattatttaactatgcctctccattttaactatcatactgaactccaataacatagcattaaagtattttcaatagaagaaaaaaggcagcgattgaaagtattaccatttcagtaactcaatgaatgctattccatgggtatctcaagcagaactgaaacaattccatttcccagattaccaaactaaaagacatgcaatagacatctatttaattattttgtaacagaaaatgatatacctgagggtgtattcttctccaaagagcattctgatcagtttgtagtaatttctcctaatgagaaacaacaaaa

SEQ ID NO: 586308 - DNA, 4001 bp, Homo sapiens
ctgacacatgctattaaatacaacacagatgaacatgaatgttaagtaaaagaagccagttgaaaaagaccacatgctgtatgatttcactcacatgaataatccagaatagtcaaatatacagtcagtcaattcatagttgcttagggcttagaatggggagtggggatggggaagtcaggtgagcctgctgaataagtacagggtttccttttggagtgatgaaaatgttcaattgttccaatatggctctcacaaactgaatgcagcatattaaacatgaacaaaagaatacaagaataacttattggagtctgtctgaaatagaaaattaaaccaactaatgaaggtgaagaagattacagcatattttatgatgatggttgtacaactttgtgaatgtactaatgtactaattacttttaggttttctttctttttttttttttttgagatggagtctagctctctcgcccaggctggagtgcagtggcgcaatctcggctcactgcaagctccacctcccgggttcacaccatcctcctgcctcagcctcccaagtagctgggactacaggctcccgccaccacgcccggctaattttttgtatttttagtggagacggggtttcaccgtgttagccaggacggtcttgatctcctgacctcgtgatccacccgcctcggcctcccaaagtgctgggattacaggcgtgaggcaccgctacgttttaaatggtgaactctacggtaggtgaactatgtgtcaggaagctgttttatttttttaaaggactgaagacttttgttttgtgttttgttttgttttcattttatcccgtttttaaaacagtgcctagcaatattatgaattcaatcgattttggctaaatgctagaacaaaaattaaaacttgagtaaaccatataaaactttgccatatctaaagttattaaattaccgtagactggcatggtgggagcataatatgagtgtacctgcaggtgtgttttccatgaaagtagcaaagactgaaaaactcagcagaatcaagaccctgtaggcccttgaagttaggctaagaaatgtgtattatcctgaaagcaacgggaaggccaggaagattctgaggacagaaataacacaatctgatatgcgttttaaacgtgcaggtgtaagcggagagttgctacttctatccaaacgtgagccacctcagaaataaagcaatagccctccggggagaatggggaggaatcaggggaagaccggagaaacaggttatcaaattatcagaatctccatagatttttttaaattacacagcatccacccccaaacacacatacagactgataggcactgatatatacataaatacatccaatgtcccctacacagaaaatcacttttgcagtcagcccctgttgggagggtttttctgttattcaagtgtggtggggacaaaaagtattataaccactaaaccaggtaattctttcctacaataatttgggcagcgtactcctcagggtgttgaaatttagcactaccaacaaaagtgcccagtcccaactcttcgagaggaccctaactctttacagtgtgctgttggggatggtcagcaaaaactgcaggacaaggtcaaggttagctcgacacagcctcctaactccgagcggacggagccactgaaggttaccaggtgccaaagaagctgcgcagggaggccgcgacccggcgccggcgcgaacctccgcgatgtgacccgtgagggaactctccaagaagcagcgcaccccgcgcgcaaaggcggccccccgaattgcaggaacaaacgcttcttgctggggggaagacggagactcttataccgcgggagactaacctgtgagcaacagaagcaccacgctacaaagagcatgacgagttcttccaggcttgggaaagcacgggtaaatgcccgcggtcctgcgcgccagcggggagcagtagagacttccggcgtcggctgctcgcagggctagagcgtcgaaccgggacaaccggaggcttcagctcacctcggattgtaaatgctaacacgggtcctccggccggctgatccagaacttaggtcgccgggacgtgtggcttctgcttctcagacgctcggactcgcgccgggaagggtttcgcctcccctggtccccgctttttttttttttttctgcgtccggttattgcaaatgcattcagtccagtagcactagcccaggaaatataagccaccggctcacgttgctcctcacaggtatgcggcgcttccgctggcctccaaggacacgaagccccgggccgtctggccccccactctagcactgaaattcctgccgccccgttcagctgacaaatttggcagcactaaattttattttattcgacaaattaagtacccagttaacaccagggagtaacggggtaagaaaatttcagaaggctggtggataataatagcatttacctcataaatttgttatgaggatgtgaagcacttagagtagtgtctggcagtttgtaggcgctcagtaactgttagctgttattatttttatattgattattccatagtcaccactattatcaccttaatgtcaagcttgaaatccagtatctttcctctgcgaagccatcactccaagactaattaactttagactggggcattcttctttaaactcttgctcacacatccctatcagaaaaaatatatatatatttacatgtgtcatgtatggcattaatatattatgcatgctataaaactcacaagacatcaaacttttgatgaggtaaaaacaatttttaaacttttttaaaaacttctaacagaagttcttttcttcctccacaacaattaggttgccaaacatacattctatcactctggaatccactagctaaatgagcacattatcaaagcaacctaccgctgaattctgacttcccagaatgtttcttttccaaagaattaatagaaactaatcagattgtgaagtgctcggccataaggactatttaaatggttcttagagaaaaagaagaaataaaataggcatccactgagtaatattcattgatgcaacattgattattgacttattacattttcaaagagattgaggttataataccttacaccaagcttaatatttcaaagaataaatcaactaataaaaagcttatgaggtttggtatatgtgcatttcatacaacgttcatgaaaatgaacccgagatcaattagctcccgttctgtaccagaaagagaaatatgtttactttgtaagtaataaaacattaaataggcttttctgaccatttgcttgaaaactcagaacttaacatttctatcactggacttaaatctgctaaagttttcgtctaaattttacattaaaaacaaaactctatagtgaataatgttacctatccaatattcattttcctctaactcctttgtaccaaaatccttattttattcagatagctgccctgttcccagaatcaaaatgatactgattaaaccagtcatcacacagaatttttttgtcgtctaaattttacattaaaaacaaaactctatagtgaataatgttacctatccaatattcattttcctctaactcctttgtaccaaaatccttattttattcagatagctgccctgttcccagaatcaaaatgatactgattaaaccagtcttcacacagaatttttttggaaatagttgctaatcaaggaacgagtatatgacccaggttggcgcaatctgactgaaggaaaggacctctatttcatgctcaggagaaagtttctgatatactgtcctcttgacgtcgaaacatctatcccacactgtcattagtagccatcttgcccatcacaaggaataaaactgatggaccaatgctgaggacaactgaacaagttataaaacaatgtccttggtgacatcattcc

SEQ ID NO: 586309 - DNA, 4001 bp, Homo sapiens
tagttttactttgcaattcaaatatgaaagccaatcagagctctgggaagccctgagaaggccagccctcgactacctcttgccacacagtaccaggctgaaaagagtgccacgctcttagggtaagtcctttcacttctatcattagactcccttcaaggatcttacagatactctttggatacagttttgccggccttttaaatgttctctctgtcttcatatttatttataaggtgatagtgacaaaataattcagtgtccttaaataggctcatttaataggctatgaaagccacagatttaaagatacctctgtttcacatttccctgttattttgggatgcctattaccatgaaaaaggatttcccacatttactttctttctggggaatttgtttgttcaaagagaattatataaccaccagtaagtgcactgcaaaaaaaaaaaaagagagagagaaagaaaacttctttttaacattcctcagcttcaggattatttgatttgctaacctggctcaccttttcctggcattaaaggaaaactttaaaattttaaaaagagcccgactgaaagtcttttacacacttgggcaacacgcccgcctatgggcacatgggcagggtgagtcagtgggacacaactgtaacagaaaaaaagatttgttgtccccaaagctgcctccttcaagtccagttgccatagcagaaagtgggcccattcagtaagcaggtgcagggctcaccccaaccctcattccatttgcaagactcatacacatttgctccaggcgagcgagcgagttcgaaggtccccggcgcgccgcgctgaaaactacaaagtccaccgggactgcgcgctaccccgcggcccagcctgcaccgctggccgggatgagcacggcgcacctggctcggggtctgaataatgagcagggctgctcgtcctgtttgagggaaattactctttctgagagtcaaatcctgaatgtgacgtgtaatccctgcacgcaaggtgtggggatagcaaacagaaaccgggagaggtttgggcaaaagcggaatcgcgaagacagggatgggccgccagactcgcgggtccgctacggatgtctgcgcctcaggcctggccccactaggacgccccttccactgccaggggagaccctggaataaaggcagggagggagagctgctgccatgaaaccctccgggcaatccgaacaccttccgagaacgcggggcccgggcggctgcgaagccggggagccctcccctccacgctgccgggagagccgatcctggggctgccgccgaggccgggagagggaagacttgatgggaaccggccaggggcaagcccgcagggaagaggccggagtcaaaggccgggcgtcccctcgctccccgctccacccctacggcaaacacttggggggcctgaggaaagctcggagctgagtgggggctgtgctggcggggacccccataaggacgcctgcatacaaaccaccccgcgcgaaaagtgcgctccggccccggcccgacacggttacctgggcaacgacccgggtgcccaaagtacacagcacgcaccaccacccaacaccagcacccaacaccagcaccgcaccacctgctccaccactaccaccagcacccgctggggcggcagagagggcgccctgcccgggagcgcgcggtgcggacgcgggcgtccgagcccagggaagccccctctccaccccgcccgaccgcggggccgcttacccggtcgggggcttggccgccgaggcgcgcggcgcgtccatggtgccgggggccgggacgcgggcggtgctccgggcccgccgagtcaggcgctggctaccgccgccaccgctgccgccctcattcactttttccgcgctgacccatcgtcctcccacgcgggccggcggaggacagcggcggagcgcggcggacggaaggggctggaatcgtctctagcgggcgggggcgccgggagcgcagggaggggctggcggcggcgcggggcgggggcgccgggagcaaggtgcgccgcgcccccgccccggctgctctgccgcgcccaccggagcgccgcccccgccccgccccgccccgcctgctcagagtcccgacccggcccgcggcgagcgtccggggaaggaatcctccggcacctgggccctgcaccgacacccgcgggtgcggcagagggcttctccccgtgctcctccacccctggggggagcgcgaccctctctgggcggagtgggggatcccggggccggcgcctcctggcggagttgggggaggggaaccacctggagcctggaggccgtgcgagggcgaggtgggcggaccagcccgggaggactgacgttggagggtgagaagtgagtgtccggcaccgctctctgacctttatccgtgcagcaaatgtctagtgcgtagggtcgcaaagtgggagtcccgaccgggagcgtcaggaacacctgggaacttgttagaaatgcagatttctggggcccaccaggtcccacggaatcagaaacagtgcgggctggagcgcggcctcgctttgctaacaactcactcgctctaggtgaatgctcgcttaagtttgccaacctgattcactgggcgctactgtggcacaaccctgccactccagtgcgggctggcgggcagatatgcaggtcctgccggccacgccggggcccagagcaagtcagccagaggtcccttatctgcccaacttcacctccactctctaagatcttggttggtatgatgggctgacctataaaagtggcagtttcatatggtttcaatgactcgaataaaagaccaacaagaggccagatcgggcgagcctgatagcgttgggggtgacgctccccttgcgatcttgtcattggatgaggtatccagaggcctgcgcagccttcctccctctgatcccctgctttctcattaactgaagggggggcagaccagtctatatgcaaaatgtgagtccttactcgtggctggcagatcttgggtgctccctgctcccacctagaaggtttcctaagtccccaggtggccctggggctcacttccctgcagcccagcctcccatgagtggagcgctttcccggctcagggcctctggctgggatgctgctccacagtgctcttcctcctccttttcatcccgtggtctccccaaggagcctttcctggcctctctgtctaaaagcaccctgcggagcacagtggcttacacctgtaacctcagcactcagggaagccaaggccggaggagcagttgagctcaggagtcggagaccagcctgtgcaacctgggagaactttctacaaaataaaaaaattagcggagcatggtggcacacacctgtaatcccagctacggggcggggcggcgagtggggagcaggctggacaatggagtgagatcctgtcttaaaacacaaaataaaagcagctctcactcaagctcctgactgctgccttgtcctaattttcttctgagcatttgtcactgtatgtgtgtgtgtatgtgtgtatgtgtatatatatatgtgtgtgtgtatatgtgtatgtgtgtatatatgtgtgtgtttatatttaaatgtaagtttataaagaaatgtttacatgtaatgtgttatatttatagacatgtttatatgaatgcataaaatttgtatttatgtaaacttataaatatgtatatacattatatataaatggaataaaaaacataaataacatatcctattccgcatatattttgctcatgtgtttgccattggtctcctccctagcatgtgatcttagcaagcgctgggcctttgtctgatttatcacccccagcatctagggcagtgcctagcagggtggagtcagtgctcagtaaacaaagggtgcactgaatgaatgaatctcttcttgcaccttgggtgtgggtattagagagtct

SEQ ID NO: 586310 - DNA, 4001 bp, Homo sapiens
ctttatagtctacaagattatttcctctactagatggtgaactacttgagggcaaaaattgcacgtgtatcaggagcaactgcaaatatatcagggtctctgccttgtatctaaagtttaaattcagtttagccaagttttagacagagacccggtcctagagtttccaacatgaaatagttcagaaaacatcattgcttttgacaaaagtacataaattatcatgaaaaggcacgtaattcaggatgacaataaaatatttaacagtcagagaaaataaacaataatttggaactttatttcatttattacccacttcggtcttcaaatgtgtgcatgtgcttctaactgcgatgatgaatttaaaaaacattctgcacctactgtatgcaagatactgctattcacactgtgggatattaaaaaaagtttgcaatacagaagagattaaaacaagtatacaaatgattttagtacaaggtagaatgcgatggccactagagaaaaaattaagaacaggtgagaagggctttatttttatgcttataaatgtgaactttattctgaaggataagagattcgggacatggtaactggattgacacaactgaatatgcttttcaagtatattatatctaacttttcttattttgggcaacttctctccaaactgactagcaataaaatctgactgctagattctgtacaaatggttaatcccaacctgaacaaatgtctcaaaccctcccccacgtgtcactgtagataactgcctcataaaggaggaaaaaaaaaaccagcctgtaagaggggtcacctgtacagtccatttgttaaaggagtaagcgtttccagctctactttaaaacaaggccctatttcattatgcgtctgccgtctgttctagagcttacacttttgaagagctcgaacgctacaccccttcgtcaagaactgcggcagcagccggtggctgccaacgcggtccacagggtttgggctcccgaaacttcagggaagctggaggcatggggggggggggggtcgagttgaaatgaggaacacacagaaaccaagtgtccccaagactccagaaaagagggagccagtcccagagtaaataggttggctagaacagtacccaagccagggggccgggcggaggggagtggtcacgtccagactggaaaactttctgcaaagcaacgggttgggtccacctcgctgtccaggtgcggagcagcgcagacccccaaccccacgacctggtcagaccccgtctccttaccgtcctgcagaagttcccggactgtagctgcagccgctccagagcctcgagctccgaggccagctacagcgacgctgccgccgccaccttccatgttggcaggtgccgggttgatgtcgtcagcagcagaacggctccgcccaggtggtgacgcagaatcccggcgccgcccgcccacccagcccatggctccaggcccacctggcgaactgactctcagcccgcgcctgggctaagcctggctaggagccgcgcaggtactcgagcagtgggcgcccagggtccgagtgctctgcgcccagcgcaccgagggagccaaggccgtcgggccggcgctttcagctgtctctcgcagcagctcagggccgcgccccctgggctggcgtcgtgccctagccaaggagaaggtgggcaccggaacgtggccgcagcgcttatctgtgaagcaagtattaaacctcagaacaggggccgcgcggcgtaaggcaggagagcagagcggaggtttcagggagcttcgtttgccctccacactcacaagagtcacgcgttagttgctacacagctttatctgttccacgccttgattggcactcctggggtaataaaagcccgcaggaaatgcttgggaagaaaagttgctggggatgaacagtgaagagaattagggagagtcgatgaagaaggaagtctgaaccataaaaggaccaataaaactcactgtctctaccctccttccttcccatgagacctttgaccttttgccttttctacttcttcctcagtttcagtcacgtgccagactttttcttaattacaaactgatagatggtccacatctcaactaacagtattgacgctgtaagagcatcaggttggttcccattgtatcttctttactaatacgttcgcgtttttgacctagatttctttcttctaagataaatactgataaattaacagggtcaggcaaccacaagtatgcaagacagtcttaagcttcttcgcaaaaagaagctggaagatgactttttcattttgtacagtaggtatgtatccaggaaaccaattttatccagttccagagctacgtggttttctacattctgtttcaaaaaggtgctattacttatcctgtgcttatcgctgttctaagtattttataactcaatgcatttcatactcataacacctcaggtaagcaagtcttatgctacactgcattatgctctctttgtctcagaggattttccctagtatgtaagatcttagtcatgatgggaataggggtgattcattcattacttgtgaattaggaattgtttttccttccttggctttattccccccagtggaagattttagaagagtgagtaatattcattcatacagcgaaagttttgacccctctactctgcatgctctcatgagtttacaaacataagactcaatccatattctaaaaggagttaataggtaaggtaggaacccatttaaacaaacaattgtaccaggtgctttggaatctttggatttacttattccagtaattccaagcttagctgcacattgaaatcacctgaagagctttaataaaaacactgatgcctgcatcctgagcccagacgtttggatttaattggtctagggtatggcttgggcatgctaattcttaaaagctcctcgggtcattgtagtgtacaactaaggtagaaagctactgattgttttgttttgttgagttggggtctagctctgttacccaggctggagtgcagtggcaggatcgtggctcactgcagcctcaacctcctgggctcaagggatcctcctgcccaagcttctggagtagttgggatcacagtcgcttgctaccacgcccagctgatttttataatttttttagagatgggggtctcactatattgcccaagctggtctcaaactcctggccttaagcaagcctcccaccttggcctcccaaaatgctgagtttacaggtgtgagcccagtcccctgaaacctactgatttattctttcagcaaataaatattgaggccttctgtatgccatttactatgactgcaggagtggataaaaatgaagtaattcttgctaaaatcactaatgaccttgttgccattgcgctttatttttgccttactttgatgtttaagatacctatcccctccttccttcataatggtctctctcgttttctgagtatcactctttaggtttattcctcccagctccaaagttcatcttcagtctcttttgctctccccttttcctctgttacttaaatattggtgcttccagcggtttcttgcaagatcctgacatccttaagtaccttggctatttttaatttcaactccttgcctaaaggttaaagactctaaagtttgagcaattagaccattctaaagttggcccatatctgattcttttttttgttgttgttattttctgcttcatttttccttcatacatacctgtttctaagttactgaggccaaggactggaatatgaaaagtagccaacactgtgaaatagtaggattttaagtatagcaaatgtaaaacatttacaaactccataatttcatcactcgtacctgtacctcttggggtataaaagtgatttacaatgcaattgtagaattataattgaaattttcactagataatatcacattaaaattttta

SEQ ID NO: 586311 - DNA, 4001 bp, Homo sapiens
tggctgttgatcagaaggtaagttgcctttgtaccttcaaatttccctaagtctgccttcattttattctctaggagccgactctttcctcccactctcaagatctcattaaaaatatgaactcggtaatgtgaatttgttcactgcaattactccttagtatccacagtatgtatactaaaagtgaatgaagggggaagagacacacagacacacagacacacacacacacacacacacacacacaagcacacaaatgcattagaaattatgcagtggtagacaccgtgctgtgtgggtggaacaactttttggagtactgggtgtggtcagacaataccatcccccatctagtcaatatctttgtctagcactttggcagccattttcaagatgaaaacggactgatcttcttcattctctgttgacatgaaagtctggccatggaacctagagctggaaagtggccttggggtccctttaatctctgtctcacattttagaaaaggccgtttgacttgcccaaagtcacgcagcaaattggtgtcagactcatgggaaaaaccccggtctcttgagtctcatctcaatgttgatatttctcaacttgctgcgttcataatgtttgcttatcactgggaacatgtcaaaggggtaattctcaggctcaaacaaaatttagagcagatttgagttaaaaaatgttaccatttccatgactagaaagtgaattgagacacttatattacttttcagaatgtacccactccaagtagcatccattcttctttccagggttcactgactagccactgggaaaggctccaaccagaaatgctgatcattaatctgtataaatccgtagaagctttaattgggattccatctgcttaaggccctgtcccctgtactttcattttccttcctccagagggcgccttataaccatcatcatatcagcatcgtcatcctcctcctccggacaagccttacaatgcccagaagataaaagctcttaggaggtgagttttacattactcagttgaagggctttctaacgcaggcctcaagttttacaaggtggacatcagtgcggttatggggcctgtggggtgcaggcccttgacttcctccaccacattggtcgttaatatctcatccttagggaaaaagaccttccgctccctttgggggttactaagctgaggagccagaccgagttaactgtctcactctgaacttagaggaaaagttccctaacttttggcaaggcttttatgttttcattttttaaagtaatttccatgtttcttatcaattccggcgttttcccacatgcctgagagtctgccctccaagtgtacctggaattcaggttacaggttttccttttcagggcagggtgccctcccatctaacctctctacccagtctcccccaaacaagctgaaggcacttacattggcatgttgctaggcataaggttactgcaagcagcaacaaagtccgcgtatccacaaagctgagcatgtctagcacttagacatgcagactccttgtgtcgcagagcccctgggtcaccggcggaggtatcacctggcgggcgcgggcatgcagtcgtggccagtacctccaacttagccgaaacctcctgctgccgtggtgctaaaataataaagcccggatctgccctatttatacggcaaaagtttccctggccctagggtgcctccaaaagggcctccaccaatgggagggctggggctgggggcccgggcagccacagctgggaggagcctgcgggggcgcagaggagggagcgaatgggggaagggacgtggccacggggctggcttcttaaattggttccattctttttgaggacgtggacacttttgaggctttcaaggggaaactctgactcgttgtctgcatacctccgccctccgcatcctcccgccctcccccgccctttccaagtttggaaacactatgggacacgtcggagtgctctgcagccccgacatgggcagaatttgcagatctccggcgatcaaagcaggagctgtccagtcccgcctcacctgtgccctgtaggccacttgtagggtggagggctccagcgggagcggagggggcagagaaggagggagggaagactcgatagcgtggcgcagccggagcccgcctccccgcccctccacccctgcaccccgcccccagccccgtccagcttttctctagctttggggctcgtgtgcgcccactgtttcagcagtgatgcactctctttgtcttatgacttcgggaaagggcgggtcctgtctgtggagggctgggttgcagtcggagggcgccttttgttggcaggtgggctggggagcaggctcgaggctgcttggcacccggctacagggaggataggctttgcgaactctagactagaccgagtcacctggggaagtccttcgacctcctagcttgcctttgctgaggctcattccaaagagggtcttttgggggatggtctggcactccgacacgactccaaccgacctggagaccgagaacttatttctcagtctctcctttctgaggctgcggtgggggatctttcatggtttccagtctcccctccccttctccatgggctccttgtctggatttaccagttctaccctgagcctggacccttcaaccctcccgtgagccccccggtccctcttgaccttgctgcttactctctgtcccatctcttacagccacacccaagcacctcccctagcacatccagaggcccttctgattcgagcttggggtcttcgtagtcttcgctggtaacaccccaagcagtgcgcccaccaacgtggatgttaactctctccccagcacccaacttccctcttctctggccgcctccatccaaccctccactccctactagggagaggaggaactggtactttgaccctgaggtgggaggccaaaggtcctgtgcctttttctaaagcctcttgggatggcattccaggccctaggtttgaaaggctgtgtgtgtgtgtgtgcgcgcgcgcgcgtgtgcgtgtgtgtgtgtgtgtgtgtgtgtgtgtcaggcctctcctctacttgcctaaggtccccatgaggcagcgggggcctagttagagtgctgctctatcccagaagtcatcgcaaagggggcatctttaggtcagttctgtctctaagaaacagaagcaagtgggctgtagttccctgagaatctttttcccttccttccccccaccccctccccgctttttttgctttgccttaaggaagaatttctgcagaagttaactccatcagcagcttctgtaaataaaagggactattctaaagcaggttactctttctaaatgtaaaagaagaaaaaaaggttaatgcaagtaaaagtggataaccaaaaactataataaactcttgttttattctaattaaaggcactcacttgggagaccactttggatgattttttgaagtaactgggagtgaaagaatttgaaagggttactggtcattcctagaagggggtttacagggagcaatccacattcaaatttttttctaactaggcaacaatgtttgaagttttctaggttctaggaacaacaacaacaaaagacctgaggttgaattgtatattccaagaacatttttaacatttccctgaaatatcaccgttacagaactaacaaaaaacttttaaagtggaaatcatttttatcaggaaagaaaaacttcaatactacatcataacaaatttttttctgcatatcagaagagtgagaaatgatttctaagaatcattgttaccactgtgctgaattacctttgcagggcatatgtgtgtatttgtcctgtgttgctgagagtcagagactaattctgagcaaaatgactcagggtggtaatgcaacagatttatgaaagaaaccctccaaatacccttcagtgaggtt

SEQ ID NO: 586312 - DNA, 4001 bp, Homo sapiens
aggcaggaggatctcttgaggccagaagtttgagaccagcatgtgtaacacagtgagatcccacctctacaaaaaatcaaaaaattagccagtcatgatggtgtacacctgtgatctcagctacacaggaggccaaggtcgggggatcacttgagcctgggagatcaggtttgcagtgagctatgatcgcaccactgcattccagcctggggagcaagcaagaccctatattaaaaaaaaaaaaaaaagaaagaaagcacaagaggtcagtcctgagtggctcctaggcctagcaaatcctgagcctctgtttcttcagctaaaggaaagatactactctaatgttttaaccctagggttgttaaggatcaaaagaaatggagattgggaggccaaggcgggaggatcgcttgagcccaggagtttgcgacaagcctgggcaacagagttgagattctgcctctgcaaaaaaaaaaaattaaaatataaaaaagagacggagggaacagacacaggtagtgcattccagagcgctgtcatagctgtgtaggttgtagttatcactaaatgagaaaagctaaattcaagcgagttatgcaaacgaggcgtttggcaacttttacttgcatgcttatggttttctggggaaattcaaatgcgggctccggagccgcagccctgagcgtcccgggggtggccatggcgccacctgccggccgagaggaaggagacgcctggcgggtcccggcgcccgggcccggtgaccctgcgccctctccaaccccgccacggagccacccgatcccagccggttccacgtcccggggtggctggggagtcgcagccgaggatcctccgcggcctcagccccaaagactgggcgggaatgacccctctggtgtcctggggccgctgataggagaggggtgcccgggacgcgaggccttggccacccgagaacctgctccgcgacacaaagccgcagccgcgcaggtgagcggcagagccacgtgagcggccgaacgccccgggcagagccccagccccagccacggcggtcggaaccacctctactcggagcccggaacgagggggcgaaggttggggaagcgaagaaaggaagggacagggtgggcgcggccagagaccaccgcagccccggagccggacccgaaccttcagcccccgcaaccccgcagccccgcagccccgcggccccaacccccagcctcctccatcgctcgttccagctgccccgtctgcagcccccaacccccgccgccccgcgccccagcccccaatcgccctgcacccaaggcccttcggtctttccccccgtgaccccaacccccagccaccgccatttcgtcccagttgccccgtgtcccctgcccctggcatccgccaccccgcgcccccaggcccgaatcgccccgcaccccaaccccctccagctctcgttccagctgcccggtgtctgcagcccccagtccccgctgccctgcgcccccaagtcccggatcgccccgctctccagcccccaagcctcgctccagccacccagtggccagggcccccgctgtccgctccctccccccaccccccggcccctcggccccgagctactcaccggcggctcgcgtagccgctgccaggggagccggcgccgggctcggggtagccgtgctgctgcagagctgcggccgagaagggatagaggaagccggtggccagcgccgacccgcagaggcagcaacacgcccagggcaggagcagggccagcttcatcgtgcgcagcagcccgcggggacccggagtcccgggcacgaggaccggcaggagcgcaccggcgcccggaccgaacccgcggcaccggccgggagcacagcgagaggagcggggcgagcggtcggagcccgggtgcgagctggaaatgtgtggggggcgcccacgcctctccggggccgccttttcaaattcggcgaggtgggctctaagccgtcaaagggggcgtggggcttttttgttaaccctcggcggtccggggccgaggaggcggcagtggcggcagagctagggtgcgagctccgcaggaggtccctggagcctaacaccccgaaagccagacctcgcgcccaggcccccgctacacaccttagaacctttgaaaccaaaccttcttcgggtccgcgaatgctttcggagcgcccattctgtgtctgccaatttcacctggacgatgttggtgaatcctcgccacactgccctcgatggtcccattcagaagtggaaactgaggctggagaaagttaagccagacaaatgcgagtcttccgatccttgtgcagggctctttggatcaaagcgctgcgttcccgtgagaaactgaccagagcttcccaggattctcctccttcccctttaacctccagcccccacctgccccgctgtctcttccaggtaagaagctttgggaggggcggaagggtcagttggggtgagaagttgtagctagattgggaggccgaggtgggcggatcacctgaggtcaggagttcgagaccagcctggccaacatggtgaaacctcgtctctactaaaaatacaaaaattagcctagtgtggtggcaggtgcctgtaatctcaactacaggctgggctgaggcaagccaatcacttgaactcaggaggcggagggtgcagtgagccaatatcaggccactggcctccagcctggatgacaaggtgaggctccatctcaaaaaaagaaaaaagttgtagctagaatcacagattcatgagacatcctatccagaaaagggcttcaggaagatgtaggacaatcccaccttttataaacagaaaagcagagtcctagatcccatgctgggcccaaggccagcctggacccaagttttggtcttttctatgttgcaggattcccatagggcttggaccctgctccaggcccaggtgggaccagaaatccagcccgtactctactcgcccgggttaggagcattttgttcctttttttttttttctttttcttttttttttttttttgagttggagtctcgctctgtcacccaggctggagtgcagtggtgcgatctcggctcactgcaacctctgcctcccgggttcaagtgattcttctgcctcagcctcccgagtagctgggattacaggcaagcaataccatttcgggttaatttttgtatttttagtagagacggggtttcgccatgttggccaggctggtttcgaactcctgacctcaggtgattcacccacctccgcctcccaaagtgctgggattacaggtgtgagccacctagcccggcctgggagcttttttcctaattcttccaaaagcaacctaagggtgcagatgccctgaggcttgctctgcccctgtgaccagttgaaaactcctgtctgtaaaatgcctacaggatggagaaaaaccatcaaatatggaagtgtttgctggactggagcacattttgcaaaaggattgtagaggccagtggcaatggctcacttcagtaatcctaatcctttggaagccgggcacagtagctcacgcctgtaatcccagcactttgggaagttgaggtgggcagattacttgaggtcaggagttcaagaccagcctggctaacatggtgaaaccctgtctctactaaaaaaatagaaaaaattagctgggcgtagtggcatgcacttgtaatcccagctactcaggaggctgaggcaggggaatcgcttgaacccggggttgcagtgagctgagatcatgccactgcactccagcctgggggacagagtgagactccgtctcaaaaaacaaaacaacaaagacctaatgctttgggaggctgaggcgggaggattgcttaaggccaggagttcgaggccagcttggacaacatagtgagacccccccatctctacaaaaaaaaaaaaaaagcaaagcgtggaggtgtgtgcctgta

SEQ ID NO: 586313 - DNA, 4001 bp, Homo sapiens
gaatgggaacgagaaagcttatttcgaatcaatacttagtatggcttaaaaatgcttgcctgctgaaactttattgacttcaggagttctggaaaaggaatcacattttccttctttggcaccttgcctttaggggataagaatctgggaaatcatgagcacgatttttccagactctgagtagagagtggaaatatatgcaaaggcagtgaggagtgagatggagactgacttttttcatacatgccagatggataaaccccaaagggaaacaaaactgttgggttaggagaggaccaatggatggcttcatgccacagtctgctcctcacatagcatcatccagctggaagtgtattaaaagaactttggataggtatgaccaaacatcttgtgtagcaattggccaaatgccaactgatcctcagacaaggtatactaaaatgtaaagacagctgggtattaaaaacaaaacaaaaccaagaaatgtgctaaggaaacagaacacacaaaggccatctctcctcaagttgtccctttgctaaccaaggaaaaaaataaatgatgtacaactttaagtctgaaggttagtgtaaagataaggctatgtgaaaaacacagttgttattgcattttcaaaggggaaagggaataacaccatggccatggtattacatatgacttttctctttggttgagttcataccataaggaacatctcagaagttctggaaataagaggctgagaactgaattccattgagaactgagcaagattttataagcaacataatcaagcaactcttcaaaacccttcatgtaaggttttagaaatactggctttaaataaagatttatcttttcccaaaactaagcacctgctcttactgttttcttggcatataatcatgaatttgtacctgatccctgtatatatgatattcacaaacataacttttccattgacaataatcccagtatctcatattttgttcttatttgctctgacattgttaatctagctctcccaaaccaaagtcttgttatttctttctgtttccctattgtagccagaggacattttcatacctctctagatttgtttctctagcttgttagttctactgcttccctgaaatatctttctcgtttattaatttggcatcttgagagcccactcatttctaatcactttttaccatgttttattttgcctctgtttttaataattctcacctttctctctttctgatgtcacgtacaagcaaaataggtttcagaggaaacagtgccattagttaagtgaaagaaatgtgaacctctgtgtttactataggttacattttataaatgcagaaacaatcataattattaatcaaataccgtagttttacttttggcctaaaatttatttggggtaaatatcaggatcagtaaataaatccaagatactttattttttataatttttcaaaaataaaatgatcttatatcagagttcaccaactttagttacaatgtttgcatctcagtttctacacaaatagaaaatgattgaataaagactttattcaaattgacaaattagccaagttgtaaagtattctataactaattctgaattgtaaaccctgttccaaattaagaaaaagatgtcctaaaatatattaacatcgttgtaaaacaatttagaagactgtaaattaaaaatccatttcaaaataattttaagttttaaatttctacattttaacaatgttaatatttttctaataattgatttgaagtaattgcagagaatacaaactattgacaagctttctcacctaataattatgtaagtaagtcatttagtcttccacagttccttgatggtcctatctgatttcaagtgactaaaataaatctgttatgtcttaccttataaagtttgtcaaacaggaattaaagactagttgagtaaatgccaacagcaaggactgtggttgggggtgaagttagctatttgatattgttctgttctgtgggaaataaaagtgtctttgctttaggatcttttgcagtcttttgttcatgtttattcgactaagtcaaagcaagagtggtcaggcatttggccagggtgcaagatctgggtgggatcagtaagcaatttaaaggaacagtgtcctttcagaatgagactgtgttttccagactattgtaaaaacaacttgagagaactttctacattttaggcattggttgacagcctgcctttttttctcatgctatgtccttctctttttattgctacatttctttgcctgggggatgtgctctaagatactggttctgaacatctctgtgaaggagtataaatgacaccagactcagaatcaaagctgtttttttaagagaggtaacagtttgattgttattaaagctggatgatgagtacataggtgtgcattgttctagtctttgtatttctgtgatttttgaaattttttataataaaaggtatatataatatacagggaaagagtggtctgagtatagtcatagttctgcccctaacttttatgggggcttcagttccccacttatgaaatgagagagtagatttaatcatttattaagatgtgttcgaactgtaacatgagaggtttacagcggttaatattttggtctctctctaggaaaggatcactgtggtttttccactccctgtttccctattttctaccttgtggttatggtccatattaagtcaatgtttatcatgtaatatatactgccaagaagccacctgacccctagacagctaacaggcaggcttctccacggacttcctctgaaatagagaatagcaagatcatccgagaaagcaatacaaatgtgcatgttacggttatttaaaatgaactttcttagccattttaatgtgtatgaatttccttattacagcaataatagcctccaattcatggacacttaccaggtgctaggcactgtcctgagtgcttcacacacattacctcatttaatccttcacaagcacaaccacctatatacagtaagtcctcacttaatgtcctctgtaggttctggaaactgtgacataaagtgaaacaattgataatgaagacaattttcccaagagctaattgatataaataagagttaagctcttatggcatattcctagtcacaaaaacatcactaaacctctaaatactcaaaacacctctaataataaacattgaaataaatctaagctatatatacatttatgaaagattgataaaaacaagataactgcttacctgcatattccagttcagggtcacggttgaccagatcctgtcccagcagctgaggatacaaggcaggaaccagccctggacaggatgcagtactgtcaaagggcactcatacacccacccactctctcagacaggcaccatgtagacacaccaatgcatctaatgggcaaagctttgggatgtgggaggaaactccaggacctggagaaaacccacacagacatggggaaaacatgtcaactccacacagtgagcctggcccaggaattgaattttttttctcatcaatgttataacaaaatgacattgaacaaaatattattccaggaccccttgtacttagtagatgttgtaagaattcgaatttttccaagatggaggcagagagaggttcagtaacttgtccgctgtcatactaaaaccagagaatggcaaaatgaacttttaactcaggctggtaagacctgtgagcctcacttataacaactactgcatcattaagtatctatgcgaacgtctgtgttttcactgtctcctcctcacaaaacaggtttcgaggaactgaggaagttttgtgaggctttggtaacagaaagaagaaacggtgggtataatgcagaaataacaacggaatttcctagggaacaaccatgtatttacctgatagcctatgggtgttagtcacacttttta

SEQ ID NO: 586314 - DNA, 4001 bp, Homo sapiens
aataaatatactttccagaaagtatttcactgaatcttcagtatttctattccaggacacacttatctgaggaaaataaaaataatatacctggttcagtaagtaaagaatctttgtaagaatatgcaaacatcttcttggattgattggagtttcattgaatatacgagcctatgaaaaaacataaaaaacattgctacttttctaccttttctatcacagattatagcaaatcaactttaatacagactatttttaatcacggtatccaaagaacattgtctatagttctcaatttactaaggtatctgataaattattacacgtggccttgattttccatcctatactttctcattcccttaggttgactacttcaactttatgggctataccagttaaataaggatcacaatacttatctatatcatactaatacaatgagattaatacagataactgatttcaataaccttgcactaaacacctgttcttacatttaaaattcccaacctgtgacagtcttcatgtctttgcatttctataagctccaaattctcctgtgacaagtaacccctctttcttttccctcaaatctatattccctaaactctgttacgtttcttgttttgcatgtcgtgatcacagcagcccagggattctctgcccaccactctaaaacagaatagaaaagaaagggcacaagatacttcccagtcatacctcctgtaaaacagcactcttctccagatgctggaaaggattggagccactacctatttataaaacaaaacaaaaaaatgtcctgaacagctgttctacacaaacttatatactttccagagaagggtactgaatgcttgggaagtgaacacttggatggcacagtgataatcatggctaatacgcatacgaactgaatgaaatcattttgatcccggctctgtcactgccatactcgaagagctgagacttctctttcgcagcaaccctctccaaaatgagtgtcttctttccctgccctctttttccatgaatgttaaaaatgtgtcatttccacaacaacgaagattaatgagattgtagtagggtgcttttgatttccttaggtaagcagtattttatgtgtttctaacacttaaggagaggcagaaacgaagtttcccagagaatcatgcaggcgtaaaggtgcaagaggccatggaggttgactaacccaaccccctctcacactgtgggagatgctaccaaacactgagaatttttttctttttgaggatgcttggcatcttccccatttgctctggaccaaagacgggcatcaagacgcaggtcacttctggacacctgagcattcaacgagctgtgtcccacgggacagtcttgcccccggggacctggacagagccggtgaccccaggaaaacgataaggtaccaggcacctgaacgttcctccacacacaccctgtgccgtcgaccccagccccgggaacagggtgctcccactaggggtccgaccctaccagcacccctggacgcggagacgcgcgcacgccctcggcccccgccggaggcccgcgcgcaggggaggaggcggctcggaggggctgcgccgcaagaggggcgggaacggggcgcgcgcgggcgccggggcgggagcgcgcggcccgaagggaggctccggcgcccgggggaggggctacgggcaggccccgggcagccgcgaggggaggggaggggccggctccagctccggccccctggcacggcggcgcccacgcccccagccccgccggcctgaaagcaggtggcggcgggcgggggaaggggcgtcccgcggctgagggtgggcctcggaagccccgcgcgtaccagactcctcgtccttcttgtcgaattttttaatcatcttggacgacttcccagcgcccagacccaccgcaaccgtcccaggcgccgcagccggcgagcggaagaggctgcaggaaggccggccccgcgctctcacgccggttgggccgccgcgccttcactcggggccaaggcccgccctccccggccgccctcggcccccgggacgcagccacgcccccttctcctcttgcggcccgccggagacttcggctcgaccctcccggcttgcgacccgggagcccacgcccgcagcagcaggaatgtggttttatttgggtggcgacttctgcggacccctcagtctcaagagagcgaggcgggaggactgaggggtctgtgttcacccgatgaccgtggcctttttgataatccactgcggggccctcccgttgcggaaggcgctctccccgggcgcggttctggtgggcatgtcttccaagagcgatgcgagtgtcagtggttcccgaatcactttggaaattggcctttcactcgctgacttcttggaagctacgacaaagcacaggcaccctggtgaatgtggcttttcagaagtactcgaaggatacttaatgtgagatgtaaaggagacgcacttggagggaccagaggctggtctttagagggtagattttggaccgtgtaataccattcccaacctattttataatttttggattccttcatttcatcaaaacccagtggaaaattcattgccagtttagagtcttccttgttcaagcctatttctttcaatgattccatctgaaaccatattgacacttaagaaactcactaaattaacgtgcattcattcctaactcatgttcctctttttctcagagtgtatgctggctttctgttctcttgtctaagagtgtagctaagaaactttgtctgcctttggcttcactggcataacttgtttagaaatgtaaattgggtctatactcaacaggatcgtgcccctgcaaaattagagaaattctaacctagattacattctacatcctagagaaattctttccctgaaatacagatttaagatgaactgttgatatcctacatatggtatcatttaagatttaactccgacttgactaaatgtactattaactactatgtttgctttatatggcttgtaaaggtcaagtcatactttgtaggtggagttttctttgaaggaaatagaagtctgcactcatttattctgggggtgaaaataaacaggctttggggaaggaaacatcctcttcctcttccttggcccaagggtattgggaacctaggcagagacagtgtagataataggcccagaggttctcaaggtgggtaatgccccggagacctgctgagaagtagaaggacctgagttcagatttggggctgaccctaagactagccccttgtaaagcaagatcaatcattctctgctgttcttcagcttttctgtatatctatgaagttttgtttaataccacaggttgtttttagctgtgcagtatttacggagttaagagcatcagtaggtggaaatgggatgggatgtggtggcagataggtatagcaggagcagagaagcctgaagaagccagttaagggatggtataatatgaccccaggccttcggtatcaggactatttggactgaggatggctggcagacgggttgagcaatcactgcaatggctttgtgggacaggcaaggataccttagggagtctcaggaattgtttgaggagagaaacccagtaggagaaatggaccttatcttaaaaccatgagctggtgaagtctgaggacccaccaattatatatatctaatacacaaatgtgtactcagtgccctgaaattcttcattgggtccaaactgcctactggataaaacccaaacctttatttaaataatatttaaggcattgtggtattttcgatttcttgttattgttgtttgtttgtttttcagacagggtctcactctgttacccaggctggagtgcaatggcataatcacagctaactgcaaccttgaactcctaggttcaagcaatcctccttcctcaagccccccaagtagctcagact

SEQ ID NO: 586315 - DNA, 4001 bp, Homo sapiens
tagggtattacctctccattgattatatcaatgacagactcaaaaacgctgacaggaagctgtgaaggagacggagaaacctgaacactatatgccaacatttgggctagctgcttttacacatttcctctcatcttcccaagaaaccaatgaagtagggattacctcctttcacagtttggagattaaatgactaagccagagtcacagctggtaagtggcatctggcattccccaatagaggagtgtcacacagtaaaaggtatagcgacaatcatgacagagtaggcatggagtattactcacatctgtgtgcttggtcatagggttcaacttcagaaagagggggctctcgatgatctcacacacctggaagagagggacaatgcacaggaagtcagtgccccctacctttctccttcccctcattctccattctctgccccagcatgcacaggtgtgagcatgcatacctgcttatggacgtggatgtccgaggggtcaggtggcccccctgtggtataccaacccagaaactccagctccttgaacacctgtttaactagaggggaaggggccagaacatatagtaattctttttttttttttttctgagacggaatctcgctctgttgcccaggctggagtgcagtggcatgatctcagctcaccacaacctccgcctcccaggttcaagcaattctcctgcctcagcatcccgcgtagctgggactacaggcacgcaccaccatgccagactaatttttgtatttttagtagaggtggggtttcactatgtttgccaggctggtcttgaactcctgacctcatgatccacccacctcggcctcccaaagtgctgggattagaggcatgagtcactgagcccggcctgacatagtaattctttaaaccatccttcctcaatgtgaagctcctggtgtattttcaccagcttctctcctccctcctcaaatcctggctcagtttagaataactactcccttctatcctgtctcctctcatcctttgctttcttttgagaaagaactctgaacgttttctttttctgagatctctccagctactcttcactttttctcccctgttcttggtctcctctcctgtttctttccaaccctctccatcttccccaccctgtacattttttttttaactcccactcctcttccccacatctattccactctcacactgctcctccttggtgtaataatattccttgtcaatgataatcttctcttccacggtgtgggacagcagctcaaaggagttcatcacctcgatatttcggccctcctgcttgccaatcagagccccaatcactgggaaagagaatgacatggaaaaggtgagggtaaagaaacttctatgacctgagggtctgagatcagtgggaaccatgtattggggaaacgatgatttgggggagggggaattggctccagtagaggaaggggaaaagaccactgcctgggggaggtgagcaaggagaagagactggagtctatgcccaacactcaccctgcacaggccgcccctcctgggagcgcatgcggatccagtggtctgagatgttgagaatgacaaggggatggagagcgacggaaacactcccagtcactccgcaggccatcacgctggggactactaagggtggagggaaaggagagagggtgagagtccgggccccacgttcttccctggagatggcagtgggggacggcggagcccgggccacactttcctcccgtaacttatcccagggaaagatgttgctgctccgccctcctcccttctcccgggagcacagggaggcctcaacgaacccctgaaggaggtctccggaagccacccccgcacggcccgttacctgctgcatccacctccatcccgctgcttcctccggtcccgttcgtagctgcagccgccgccgccgccgccgccattttccccgcgcccgccagcctcggccccgcccccttccttcccggcttccgtaaggcgagcggcgcatgttcggtgtccccgcggcgtgcggcgggcctggcgtccggggagcaggcagttcccgggtcgcggcgggcggcactcggtgcggggacgcccgacgccctctgggcctcggtgcctagcgggttttcccagaccctgtccccgcctgtcgcctgcgggtgacctttgacaaattaacgacttgatcgtcctcgtctgtgaaattgggataagaacgcctagttcttaaggctgttgcagaaggaatgacatgtcgtgttatttccctcacaataaaatccaaacaactaaccacaacctgcaaggccctgcctgatctggccccggcctggcctcttctagcccttgatcttcaggcttcagctgcactggccctcatgtctggtggtggtggtggtttgttttgttttgtttgagacagggtctcgctctgtcgcccaggctggagtgcagtggcctgatgtcagctcactgcaccctcaaactcctgggctcaagtgatcctcccagttcagcctcccgagtagctgggactacaggcgcaccccaccgcacccagctaattttattatttgtttttattttgatagagacgggggtctcactaggttgtccaggctggtctccaactcccgggcagaagagatcctccatcctcagcctcccaaagcactgggattacaggcatgagccaccgcacccagctctccgtgtgtttttcacatgctttagtttcccattcaaaagcctgtggttccttctcttgttcatcatggtatcccctgtgaccaacacggtgcctgacacattggagcctagatactttttgagtgaatgaaggaataattaggggtggaatctggtgttgagttagttgctccatcttgtgaaagttgcagataccaggacaaaatcacattgtcaggtccaaacaaattggagccatgagaacaccaaggagaaggtctcatgcttgcatgtctgagataggaattatctcaaggactttcgaaaataaccccacaaggccaggcatggtggctcacacctgtaataccagcattttgggagaccgaggccagacaatcacttgaggtcagcagtttgagacgagcctagccaacatggtgaaaccccatctctactaaaaatacaaaaattagccaggcgtggtggcaggcgcctgtaatcccagctactcaggagcctgaggcaggagaattgcttgaacccgggaggtggaagctgcagtgagctgcgatcgcgccactgcactccagcccgggcaagacaaagtgagactccatctcaaaaaaaaaaaaaaaagaaagaaagaaagaaagaaagaagataactccacaaggccaggcatggtgactcacgcctgtaatcctagcactttgggaggccaaggttggaggatcacttgaacccaggagtttgagaccagccttggcaacatggtgacaccttgtttcaacaaaacatggaaacaaaattcgctgggtatggtagaggcatgccgaggaaatttatgcttgggaagtgagtcaaaactcccttcctttttgttcccagatagctgtaattccacaaccctgtgtcatagcctcatacataagccaggctcctacaatggcaaaaggcatatacctccccagatggtcttcctcacaaattgcttgccaggaaattcctcattagcctctgaatctttcagcataaacattccccctataaaccagccctaatccgagttctgtgaaatctcatactgacaatgttgattacaagcttatcttcccaattatagaacaaggaagagaccaggaatcatccctccacctatcctgagacagatgcataactgactttttcctccactccctcttttcaaatgtttattgtatcttacataaaatgtagatttactgaacactaatgagaaactcacaaaaaagtaa

SEQ ID NO: 586316 - DNA, 4001 bp, Homo sapiens
tttcgaggctgcagtgagcttgatcacaccactgcactccagcctgggcaacagatcaagaccttgtctcctaaaaataatccaggctgggcacggtggctcacgcctgtaatcctagcactttgggaggcagaggtgggcggatcacctgaggtcaggagttcaagaccagctcggccaacttggtgaaaccccatctctattaaaaatacaaaaattagccgggcatggtggcgggtgtctgtagtcccagctactcgggaggctgaggcaggagaattgcttgaacccaggaagcggaggttgcagcgagtcgagatcacaccactgcactccagcctgggtgacagagtgagactccatttcaaaaataaataaataaatgatccagcctggtcaacatggggaaactccatctttaaaataaaaaataaaaaaacaataataattagctgggtgtggtgttgcacacctatagtcccagctactctagaggctgagacaggagaatcgcttgaacccgggaggaggaggttgcagtgagtcgagatcacaccactgcactccagcctgggcgacacagtgagagtccatttcaaaaataaataaataaataatccagcctgggcaacatggggaaaccccatctctaaaaaaaaaaaaaaaaaaaaaattagctgggtgtggcgctgcacacctatagtcccagctactctagaggatgagacgggagactcccctgagtccagaaaggaaggaggccgaggcttcagtgagctatgattgcaccactgcactccagcctaagcaacagagtgagaccgtgtctcaaaacaaaaacaatcaaacccaaacttgtttccttcataaacatgctgaaaacaacaatggaaaaaacccacaacgaggtaaagtcagcccagtacgaggttaaggtgcaatgtaggtgatggtcacaggagagttcagggtaaaaattctttcatttttgctatttgaaaatgtcacaataaaatgttgggaaagaaacagtaattcacagatcgtttttcttttcttttctttctttttttttttgagacgttgtctcactctgtcgcccaagctgcagtgcagtggcccgatctcggctcactgcaacctccgtctcccggttcaagcgattctcctgcctcagcctcccgagtagctgggactacaggcgagccacatcacacccaactaatttttgtatttttagtagagacggggtttccccatgttgggcaggctggtctcgaactcctgatcttaaatgatccgcccacctcggcctcccaaagggctgggatcacaggcatgagccaccgcgcccggcccacagatcctttttcgaagccttcatgtccacggaggcaaccccaccggaatacggccagaagcactgggagatcagcagcacttttgagctttgcagcagacatcgctaggcaccgtctaagcctcggctgcagctgcgggcttcgtggccgccgaatgccccgctctgcaaacccggggcacagacagcccgccgggtgagtcagggcggagccggagacccggaagcctgacgcaaggagtcggtgtcgctgccctcgtcacgggggccacggtcctgccagctcccacctgcagggtccatgccgcagcagtgacccagggctgggtggggcggaggggcgggccgccgtgcctcagtttccccgcctgcaccgcgctagatgccggcaccccatagggctccgcgctgggccgcgacccagaccccccatcgcagacccctgcccgccgaccttccgccgctcacctaagtgatccagcgggaagctgcccttgtccgggggccgcggctggaagctcttggtcccgaaattcatggcggtcgacatgttggcgactccggagtctgcgagcgccttgcgagcgtacgcagggcggccggcggagcgccgagcaggcaccccgggagcgccgagcacgtcgagcaggccccgtccccgccccttgcccaggcccggccccaccccttgcccaggcccggccccaccccctcggagtcagcaagctcctgagccccggtgggcgctgcccgggctttcccgtcccctgggaccctcacagcagtcggtagcagaatcagcttttggaattggtgagaaaccgaggcccagaaaggttcagcgaattgcccgaggacacatagcggtgccggcgtctctgcatcccaggtgtctgctggggcctcggtttccccatcgcacagagacctcatcacggggcccatccggggaggaaggcggcacaggagggacaggagagcctgtggactcgctgcctgcggctgctggagccaggtgacaccaccgagcagcttcaacaacaggaatgtgctctcagtcctggggtctggagtccaagcagtgggcagagtgggggccctggggacagtcccagcctcccagcttctgggggccgccagcctgtgaggttccttggcttgcagaagcaccacctggtctcggcccctacgttcccatggtgtcctgcgcatgtccaaatttactatttttatttatttatttgagacagggtattgctctgttgcccagactagagtgcagtggcatgatcacgactcactgcagcctcgacctcctgggctcagcgatcctctcaccccagcctcctgagtagctgcgaccacaggcacacaccaccacaccaggctaatttttctatttttcgtagagatggagtctccctatgttgcccaggctggtccttaactcctgggctcaggcaatcctcctgcctcagcctccctaaatgccgggattataggcatgagccaccatgcccaacctaaatttcctctttttataaggatagcagtcatgttgggttaggggccgtcccaataacttcatcttaactaattatatcagcagcaaccctatttctttgttttgttttttaaaacggagtctctctcttgttgcccaggctggagtacagtggctcgatcctggctcattgcaacctccacctcccaggttaaagcaattctcctgcctcagcctcccgagtagctgggattacaggcgccaccaacacacccagctaagctaatatattttttttcaacacagagtctcactttgtaacctagacgggcgtgcagtggtacgatctcggctcaccgcaacctccacttcccgagttcaagagattctcctgcctcagcctccagagtagctgggattacaggcatgcgccaccacacccggctaattttttgtacttttcgtagagacggggtttcaccatgttgcccaggctggtctcgaactcctgaccttaagtgatccgcccacttcagcctcccaaagggctgggatgacaggcgtgagccgccgcacctggcacctatttccaaagcaaaggtcacatcctaaggtcctagtggcttcaccatacgaatgggggtggagggtagttacagctcaacctagggcagaatgaaagtgtactgtaagcggtaaggcccggcctttgcgtgtcgatgttgtcatggcaacagcagtcgtgggaaagggctcagtgaagaccccagcgtccacccgcggagtctctcccagccctgaacctgtacccacatgccctggccatgaggaagtcgaacactggcccgtttagagcaccatgggcggcccaagctccagcctccactcactcatccatcccacccatttcacaatcactggccaggccttcgtggtaagcacagtgggtccccagcaacaccgagttcgctgcctggccccccgctctggaccctggtgacacctgaacccactgttgcttaggagccagttcctgcaacttcccaggggttgtttgcagacaagggcttggtcaaggcggcccaacagcccccaccccggggcctgcccttcttcaagcctggcccaggcgtcccc

SEQ ID NO: 586317 - DNA, 4001 bp, Homo sapiens
tacagtaccttccacaatggacacttgattggaaacactggatcacctgtctttgtgtatgggcaggagtgcacacgccaagaccagggtggagactcaggcctttccaaatgtctgcatggggagtccatttaacagcgtgttccctggtaccatgatttccccgggagagcccacgcccatcacggatgccacgtgtgggtccattctcccctgtgtatgtccacatgtggatgttaccttcagcacgtaaatgggacgcccttcataggtgttgccaatctggatcttgctgacaaggtgcgggttctccgccaccagcaggtccaggaagtcatagatctgaggtgtgaaagaagagaccactggccttaatagcttctgggcacccagatgcttcccttagcagccccaccgtcccagcctgctgcgagccctgcaatggagctacgaccacacaggccacatggaaacagagcaggcgctgcgcacacccaggctggccctggccttggccctaccgcgttctaccagccatgatgaagagctggtggctgcagggagcggccgctaggggcgccctcacctcctccagggtgtggtaggtggcgtagttaaaagtgtcggtggagcgcgcccgggaccggaaggcgaacatctgctcctgctcctcgtccagcagcgactgcacgtcctcgatcatggtctcatagctgatgccgtgggactccagaaagatcttgaccgcctggatgctggggaagggcactcggacgtcgatgggggagccagggtgggcaggcccccgccagaagtccagctggggaggacaagagccggcacggtcacagcgggctgggggcaccagccaggacagcaggcagggacagggcctgcgtgggaggggctgttggtgccagaagttctcatataattggggataggtcaggggtaatagggccagagaaatacggggaaaccctggggactggagagtccagtgtggtcagggaaatggcccaggagcagagtgaggggcctttgagacagcaaggcagagggaggaactggaaaggggcccggccccttgcccaggtgctcaagggcagcaaggctctggagctgggggcttgaagtcgcttcctaacagagtcaattccatgtctccttgttgggtggagacagcccaggcacagttggccgctggggacctggggtggccccagctgataccctggggcctcagagagcccttctcccctcttctgacctgcaggtgctccaggtcctccagctccttcaccttctgtacctgggcctcatcggctacagagattcggagcacctgatgcctgggcagagtgggagtggggagtgagcacccaagctgcacctgccctggccacaagcactccccaggtgcaggagggaggcagcagcccagaatccccagactgggcctcgtcctctgggctgggcaggggacagcaccaagggtctcaacaaggagaggcctgggctccctcacctcttctctccccatctttagaaacttctagacgctgttactatctcaatcccagtttggactatttctctgttccaagccagccaggcctcctcctttctcctctcctgaaaactcctcctcagagctcaggtttctccagggctcaggagactgtcttgggagacacaacctcttcccaaccctggttgcttatctgccagctgtcccaggtggtgccaggccatcctctctggctgtgttgccatgtatctgtctgtctgtctcctctactggttgggggctgagtcctccccatcaccctcagagggcaccccctcctctccacatccctaccccacaaagtcctccttgccaaagacagcccccaacaggacactcaacaccagcaacccccgcatgctgctgccgggagggaaggtcagactgaggtcgagacggccccctggcttttaaaccctcccaggaccgaggactcctggctgctcccgaggtctgttctcccccagcacctgggtcctgtcccacggggaggctggggtgggagttctgagctctgacaccctctcaccctccatgataaagtggcagggaactgggcagctggagagataagccagagctccacccccgaccatctggggccagcggggcctgagggtcagcgggggctcgaggcctcctggagtcccagccaggactctgcctgcccacaccctaaagctgcggttctgtttgcccactgggtagcggagaaggagccaggactccaagcagccactcctgctggggcctcattccaggcgtctccttgttccgtgctcctgagtgccagcctttcattccggtgatcgagcaagtggggcttctgccctctcttgtccccaaggcagcttcaggcaggcccaggctctcccccattagacctgtgtgaagcacagatacctgcggagtgccggacacctcctcctcccacggaccctgatgccttggagagaccagcagggtggactaaccttttgcgtcggtttggcctgtcaccacaccggctttgtccaggctgccccggccctgtgcggggcagtccctctgtgggacttcccagccccctcctgctggccttagggtcctgtgggagtccagcccgggcagcagcagcagggtcaggagcccaacccttgccagcatttccctccacccccaccagtacagggccccgaggtcggggttgcccttcatgggaacagtaaccagatgtcgtctgaatagcaagtgtggcggggggagccagggccagacccctgtgaggactgcacagtgtccaggagaaactggaacccacacaggggaattcactgggttctggatgctgatctcaccctagagacaaatccatcacaaatcccacaaatccatcctcattcacgggccccccagggctttcccagcaccatctagaggctctgctctgtgtcaggaccccgaccttgggcactggtgagagccatagtgcccgttctagtttctattcactcccactgcctcctaccctaccccctagctggccaaccctcccacaccaagacagagtgacccccttatatttatccacaactatctcccaaacctaactctaggaaggtgagaaagccctaaacccgcttttaacagatgtggagcctatgcggcagctcctgctctcccctgtacagccttgctggccccacccgcctctggcagggctgcagtgctccctggagcttcttctggctgcttcctggctcacctgtctgctccttctctaaatgctcacccctttgtcgatgtattcaatcaatacttattcttctgggccaagtactgtgctccacatggacacgacacccaatacagatgttcgctgacctcagggagctcacggtctaggcgggaagacagaagtaaccaactaacttgttggtcctctaacaggtcctccaagaagctgtcaccaataagggattagacgtgcaaaggacttttggggactgttctcctccctgcaagagacctaaacagggatgtgatgtggtatgaaaagtaccatgagggctaaaaggacacacactatggcacaaagtccagggaagactttaccaagaaggtgacatttgacctaggccttttttttttttttaagacaagttcttgctctgtcacccaggctgtggagagcagtggcaccatcatggctcactgtaggctcaacctcctgggcttaagcggtcctcccacctcagcctcccgagtagctgagactataggtgtgcaccaccacacttggctaattttaaaatttttattgtagagatggagtctcactatgttgctcaggctggtcttgaactcctgggctcatgcaaccctcccaccttggcctcccaaagtgttggttgggattataggcttgagcccagcttaacttaggtcttat

SEQ ID NO: 586318 - DNA, 4001 bp, Homo sapiens
ctgcacctgttagtctctgcgtataacagattaatgcaacagtcaataatctctgtgacaatccagaaactaataaatagtatactaaacccacatcgccagaatgagaaggtgatagaatggcgttatttcctcccaggaaatgttatctaaataataatgaataggtgtacctgctcctagcaggaagcctgccattaaagttacctttcccatagctaatgagtcaaataaaacctgctgcttgtggagtgttatagcttttaatacttgcctgttcctgttgttcagaagtaagtttttaaaaagtggaataatttggtgcttgtaagaggaaacaattcatatgtgggtagtcctaagattttgtttttaatggttttgggggttttgtttgttctttgattttgtcaactgaaaatgtatcaaggttccatccccagaccccattcatggggcccaaacatggggcatggccagagatagttgggaccctgacaaattatgtgccgtgcctctctttacaaacacacacacacacacacacacacacacacacacacacacccccttaatagggaatgaaggatgaacaggaaagagaaatctcaaaacaatcaagcacatctctttaggaagagttcccttggtgacagagtttccccttctagcctttctccacgtaggcagacttcctaagtcactgccccaactgtttgtgcagtggggaaggaatcaatacaatgagccatgtacagggaccagaatatgggtcttctgaaaccaagctccatgcaatttcctacgaactccagtggaatacagaagtgatggaatgtgagctcttcgaggctcacctgccacaaatggtctgaaaattcttccatttaagtctcattattttcggttaatgcatggactcccaggagtcctcctttaaaatgggaaggcactgagaaaagtaatacaacagggtcatatttcctggtgtgtgttctaaagaatagtagttctttgagttactcagtgaaagaaagaaagaaagaaagaaagaaagaaagaaagaaagaaagaaagaaagaaagaaagagaaagaaagaaagaaagagaaagagaaagaaagaaagggcaagctgggagcagtaggtagtttatgattaaaaaaaagagtacatgctgcaacctagatcccctcttatagatttataatgcacactgatttagccaaggctcctagaaatcctatagtttgtttaatcctctgattcccacatttatttgaccagtggctttttgggaccaaacttatttgattgctttcttagctccctggaccactcttcaaaaaatgctgcctgaaacccttcatagaatcatgaagcaaagtactttggagcaaagatgagtcctccaaagccaggagaggaggagttgagctgaaatctatagccctggcctttctacttcatgaggttccaccacctaggtgctgaatctaaagatcgggggttagggcacaagggctaacgtggatggtaaagcccagaagagcaggaggaggtgggagagtagcattgacacccgctgagttgcctggaacaaatggccacacagctgtattttccctgatgtctatcatccctacagtctgatcactggagggaaaaatgagtaaggacagagagaaatagggttatgtgtgttcagttttcacttttgtcttttcctttaaatgtcattcacctcctttttgatcatccactcctttttttcacactattgacttatccccaaatctaagagaacttctctgaaaacactgaacacttatacccatttactctgtaacaatcaaagcctccatcaatcaggtaagtaaaattcaaagaagcaccagaaagcataacttaccccacaaatgtttctagacagtagatatgcccaaaaagggcaccaaaaaacaggatcaacctcatggccatgggttttcctggagtccagaattcagagtccttcctgaactttatttgtagggatggcagctgagggtgatctgctggccttctgagaactcacgtgaattcccacatgggaaaattcccacctgcatgtgaaattctcaaggttgtagacatccacctgtgtgatatcaccaatgtgtacatgttccattcctaggataagataacaaactttgatggaaagagaacaaaattgctagagcataccaagggcaatatagttatgattgagaccataaaacgccactagctaccctgtgatagaagccagattaatagacctagaggttaaagtcttttctgggtctctgacacacacacaaaaaaaaggccagagcatttatagtaattactcaggcatcctgtctatcacattccattagtttgctcatttgtttatttttataatgtttaccttgaaacactgcagtcactcagtccacatctgctgagtgtccctgtagatgtggcccattccaatcctcactctacattaaaacaaaacagaaggccttttaatattcaattttgcactttctcgaaagtgatccatctgcatttgcaccaaattgatatccctctttctgtgctttttcccaaaatgaaaatgtctttctgatgacatttcctataacaagcaacaatgaagttgcttgttataaaaagtgtgaattaaaagaaagtgttttctttaaccatcaataattcttccatccaaagaaaaccatttggcatatgtctttccaaatttctttctctgctttcgagtttttttcttaaacaaagattagaccatatcacgtatactgttctttaaacaaaggtgatcttttcttgttcataaacatagatctacattaatctgactttgttcttcattgcttaagaagaaaatataactgcttatttttagaaaccatagtttatttaattttagttgttcatacacgttatattaagcctagaaagcctcaaccacaacaagcagcaaggaaattttcgtctgtcctttgtgtgtcaaatttatcagcacacactttaaatctctgggtttgcattctcaaatatctgctttaaggggaaaggtatatacacagtgtttctgattttaagaatgactggattaacttggtttttcattctcctgggagtcagagagaagacagaaaccaaaaggcagaggccataattcatcctcatgtctccagcacctatcaaataaacagtagttcaataaactggaagtatgtacttggagaatcaataaaagcttcctggaaaaaatcaagtttcaggctgggctcagtggctcacgcctgtaatcccagcactttgggaggccaaggcaggtggatcacgaggtcaggagatcgagaccatcctggctagcatggtgaaactccgtctctactaaaaatacaaaaagttagccgggtgtggtggcgggagcctgtagtcccagctactcaggaggctgaggcaggagaatggtgtgaacccgggaggcagagcttgcagtgagcccagatggcaccactgcgctccagcctaggcaacagagtgagactccgtctcaaaaaaaaaaaaaaaaaaatggagtttgagctgagcctttgtgccaaggcaaatgtgaaaagagcctggatttctggtggtaagaaaatataagctagacagggaaccaggggagagcacatgatacacagctgggttaaggaggaaacttagcctagcagagcagagacttgaacctgggagtggtggggaaggtaaaataccagaaggtgggctagagggcaaaggatctcacaatccaaacagaggagtacacaccagatgatatggagagccttggaaggtttctaagcaggtaactgattgatgagggcaatgctgaaaatggtgaaccttgcaggatggtgcctggcagagatcctctaagcagggagccaaatatgagcctcttggggaaaccgagat

SEQ ID NO: 586319 - DNA, 4001 bp, Homo sapiens
cctgccagctactgttgatgctgtaaccagctctgcaactggttcctgttctctgcctgcctggtgcctctaggcatcctggccattgtcccatcctgaagatctctgaagaccagggcagaagactccagtagagcaagagagactggggagataggtgaggcagatggaagggaggggaatgggtggtgggtggtggggagaaaccatcatcctcatcttcagcagccaatccagagcctggcttcccaaccacttgaatgctcagaggccagcttccccttgctctaaatgttccccttgctctaaaagctgggtgtctgggacacctctagagagcccaggaagaattccactacctttgctaggtttcctactatggcgtgagaatggatttggggatgagaatgacactatcagttcaaaccatctgcagtcagctcaggcacacagctttttctgtgcaaaattcctgcagagagcattctagggcctggcccagctgtcgcagcccaggtgcccaccacattgcaagagaggtctgtatcttgcgaaatagagatttttcagccacatgaatagctgcagtgggagcctgacagttccatgcgtcagcccacacggcagcaagtctagtcactacacacctactgctgagccgcctgtgggaaaatcttccctggccacctgccactcctaacccctctgagctatttggcaacagagacacaggtgtgaacagaagtcatcatcataaaacttagtcaatctcatataagtaattacctcaaaaaacaaccccaaagtctcattagccagatagtaaaatagaaagaaaactaagagacagatccaagagatataggattttatttggagatgaacttgtgttatagcaaaagggtacgagttttacgttcagagttccagctcccctgcttcccagctaagtggccttgagcgcgttccttaacattctaaggctgatttttttcatgtttaagtggaagaaaataacacccctgcctggcaaagttgttgtgtgatcaaaaagataatgtacatgaaagctctttgcaaatggtaaagtattatgcagtaatgagttattataattcagtcttctaacagggcaccatggtatcccttttatctctcctaccacccaaatgtcctctcccctgcaaacctcaaagtattctgcatggagcgtgttgagcacgtgtgtgtgtgcacacacacacgcgcacacacacacggtgttcaggcatgtgtctctgcatgtcattttcatagctgtgtctaggcaagacctgtgaaatctccacgtcccagaagccagtaagaaagcaccagctcagaagagggtgtagctcaggggtagagcattaaactgcagatcaagagaaggcaccagctctgcaaagccttcgccattaacaaagaagtgaaaccaacaagcttgagacccagggtttccctttatgcatggcggaaattggaaacaaaccatttctggtaaccagtaactcttagtaattaataacgtagctcttagtaaccagtaactcttagtaattaataaggtaggagtaagaaagtagatgcctggaactgaccttataagtaagaactaggcagaaaaagaactggcaggagatgagggagctggggagagactgcaatgatcatctagtcctgatttcacagatgaaatggggtctcagagaagagagtggacttgtccaggatgacacaggggcaaagctggaacaagagcccaggtcttcttcctccatgtgagctattatcagccattcattttcagttccatttggctcccatatttctgaaataaccaaataataagtccaaaaggaacttacccaaaaaatttttcttggccacagatgctggacccaataagggccccaatgaacagtatccacctcatgtccccggggagtcagtcatacagtggctgagtcaagctgtatttataaagagtctgagagtgactcaagtcctcaaaaatgctaatgtgattcccaagcacccttgcaactctgactgtgacaggcaggccctaccaatgcctctcccattcctttcaagtgataaaggttgagcatctcaatttacaaggtcaggaacttgctccaggagctgaaaaagtctgtgccaagggtaccatattgctcatcacttggcatttaaatagtgttttttcagtgaataagctaattccacagtgttggatggaatttatcctgataggagaggtcagattataaacctggcatagaattacctctagaataataataaaaaagttaagactatcaaagcaagactgagctggctccaagaccacatgcttgacaagccctgccagagaatttcaccagggcaggtcaggatgaggaaagaggtttggggcctcttttatgtatctgaagcctaattcttctgactccactaaggaaatagaaatgtatcaggcaaatgatatagaaaggatgttttagtctgaataaattatcagtgttccttggggtctgatctatggggaaggcttaatggttttatcaataataagattttcagccgggcgaggtggctcatgcctgtaatcctagcactttgggaggccgaggtgggcggatcacgaggtcaggagattgagaccatcctggctatcacagtgaaacctcgtctctactaaaaatacaaaaaattagccgggcgtggtggcggacgcctgtagtcccagctactcaggagaatggcgtgaacctgggaggcggagcttgcagtgagccgagatcgcaccactgcactccagcctgggcgacagagtgagactccatctcaaataaataaataaataaataataagattttcttatacttcctagactgtgggtctggtgtcctttccgccaagtcacagctgaataaatggaagacactcatatctccataacgccttcaggggctctgggacctttgagtctgtcctgggagccccagttcccacagcctttcccatcccaccctccctacggtctacatgctttccacacccactcaaagggagtggacacaaccaagggtcatagttgagagagttaaagaaaaactatcctgacctgtgttaaaatgtaagacctaattcaagattattatgattaggaccatggctatttcagtaggaaagacttactgtgcttaacactgaatacggcaaagaaaacagagaggatcagtgggattactaagagaagacatcaaggtagggggattcttgctaaaagcaggccaaggacttatacatcaaagtccccatcaaaggtggggatgaggaacttgatcagatatcaaggtgggagggatgacttcgcaggatctttgctcaggctggcttagccagggctcaagaaccagcctaatcaaaaggagggtgcagaatctcaagtgtggtcccagagagagcctttgttaggagctgtggagctaggggccatcatctcctcttgctccctcagggtccttttgtcctctcaacacttcaactgaattcctacacccaccctgtccaccacaaagcgtgggctcagcgtcactgagatcgatgtcagctttgaagtcagcaacaagaacaactgagacccaaatctgtaagagatgtgaagtgggagaatcaaggaccaagcattctaggcaagctgaaatttagttcctaccttttctcccagggaaaatcatccacatgaagaaaacctaaatccctaatgggagtcaatatctaaagagaaactgtgtgcaacctgagaccgaggcttgatagggcaaccaggaaaaaggaatgtcattggcttgggtccccaccatttgtgtgtttgttttttttgagacagagtttcactctgtcgaccaggctggagtacagtggtgcgaccatagctcactgaagtctcaaactcttgggctcgagtgat

SEQ ID NO: 586320 - DNA, 4001 bp, Homo sapiens
ggaccaccaacgagccagccccggagcatgaaagtgggaggctgtggagctggaagtgggttcaggacaggaacccacatcctgactctccgccttgatcaggcaccagcagggcagccacctcctgctgggacacccagtcccctcctcccagccagtcctccctcccactgtggagcagccactcaccctgtgaaattcatttggcccaaagctgctgccaggataaagctgaagaccaggagtgtccgcctgtccacgggggatggcccagggcgcgtcccgcctccaggggtgccctgcatgcttcttcctcctggtgagcttcaggggctttccttgggcaccatggcccaggcctcaggacagcacagcacctagaggctggaaagcccagcctgagaaagagcattaggctgtctggggcacccagcatgtggctcccacatgccaggccttgggagagctagggctgcccctccccaacccagcacatcctctcctgggaaggggagagggaagagagaaggaggaagacaggccttagcttttcttttctctcaggaggtttgccagggcagccccttgtgagcatcaaagcttccatctctggagaaagaccaaagtagccagcagccctgggatacccctcctttcctccctcctctacagcatcttctctttcgctcttcttctccgcctagcccactcatgctttccctgggccatatcctccttacacataaggtgtggatgccattgaaacaccgctggacttagagacagagactgggtgctcacttcccgtctaaaatatctggggcagctgccctaatctctaaatctcagtttactcatccatcaaatggggttaatcatacctcccctccctacctcacagggtttgaaggggtatagatgagacaacttgagtgaattggcttggtaaagcctgcaaaatgcaatgtattattattcaaaaggcattaacttttagtcacagctgcatttgagatcagtcctccagtggcgatggggagaaggggaagagaagagaatggagaggagaacaaaggaaataactatatattgtatgagaaggaattcaatcaagattcccttttctctgtcttcaggtggtcatcattgtgctagcacagacagtgggttttctgctagacatgaaggtcaccgcagtcattattagagttctcaacagacagcagagtcaatttctcagtcctgctgaagccccacacagttccctttatagtttgggaatagcaggagtaaagcaggggccagcacacaaagcagtcatgttggaaggagaaagtgaaagatgatgcctgaatggcaaatgatgaatctaacagaaaatccacagggggtgggggtaaggcagaagctgaatccaaccaagtcgttcagcagaggacgtcaacaataggccacttaactgtcactggcgattctcagaagctccccctccccatccaaactatctcagaatggccgattaactggctatgtgtgcaaagaagggagctcgtttatcgacagaacgccctgctcccccacccacctgccctactccattatttcgtagttcagctgttcagacaagccagactcttctagtatcctggcttcagggactctcaaacagtaacattatcaaagggtttaaggacatagaaaagaaagcagttatgctttccacccaagtaacattcagcttcagtagcaatggagataaaagggtgtactgctaaacaatagctcaggaatttaaaaggaaaaaaacagagatagtgctagtcaccaaaagtacccatggggcgtcttcttgttcaaaaacatcattttaagccaccaatgatgagacaactatccctgtacttggcttaagggtgggaaaagagagagagtgagagagaaagaataagagtaaaagagagagagagaagcagttaggaagttttgagaattctatgacatagcttccaatagaactttctgtgataatggaaatattctatgtccacaccccccagtaggatagccactaacctcttgaaatgtggctattgtggttgaatattgattttggagttgtatttaactttaattaatttaaataaaatttaaatagccacatgtggctaatggctaccatattggacagcagagttctctgggaattcaccaaccctgaaagcaccatctccaatggctggatttgtttttggttttgcttcttctaagttcatgttagacgggtaatgtgctgacgtcataacaaggtttgagggtgacacatctcacacacgcatgcgtgagcacccaattatcatacttatgaactgcaattatcagcttatggctggatttgaagcggagacacatagctatgcttgacctaatacctcattttggcttttcacttataattaattactcacctaatcatttactcagtaaatgtcctctgaatacctgctatgttccaggcacttgctaaagtctggaaacaaaatagaaagcaacacatatctggcccttacatttctaaaggcgtaagtagaaaattaatttaaatagcatgaagataattggtaaacccaagacataatggtagcccatctcactccagataagtgtaaaactatagatggtgtttgtgttacaagggaaaggcacattgtaccatgaggacggggaacatgggctccacatagactgaaggagagtttccctaaattagaaatttttttggaggacttttatttcctgcaggtggggtgggttagatacctaagcaatcttgcccaaatgaaagaactcaaatgcagaagaaaatatttttagtaacaactttctaaagccattgctgggttggcacaaaaataagaatctatagatcccaaaaagaaggaaaagccagacagacacccaagtggtaagcaagttttgcctcagagaacttctcagaatgctggtgttcttgattttcctactggatgcatgtaccatgtatctagaatcatcttccctctgcttcaaatctatcttttcaaaccttcctttagttaaggtttctgtttttacttatttgaaaatttttggccaggtatggcagctcacatctgtaatcccagtgctttgggaggccaaggcaggaggagcccaggagttcgcttgagcccaggagtccgagaccagcctgggcaagtcagggagaccctatctctgcaaaaataaaataaaattagctgggcatggtgaggcacgcatctgtagtcctagctactcgggaagcaagcaagcagatcaactgagcccaggactttgaggctgcagagaaccatactccagcctgggtgacagaacaaaaacctatctcaaaaaaaaaaaaaagaaaaaaagaaaaagaaaagaaataaggaagggagggagggaggaagagagggagggagggagagagggagggagcgaggaaggaaggaaggaaggaaggacagacagaaaaaaaaagaaaggagagagggaaagagaaagaaaggaaaaaaaagaataaagaaagaagaaagaaaaaagagaaagaaagaaagaaagaaagagaagaaagaaggaaagaaaaagaaagaaaagaagaaagaagaaggaaggaaggaagaaagaaagaaagaagaagaaagaaagaaagaaagagaaaaagaaagaaagaaagaaagaattattttgctctcattcttgaaagggttttttgggatagaaattccaagttgattactgttttcctctcaacacattgaaaatattatcccacagtcttctggcttccatttttgctgctaaaaggtaatgtttgttgacttactgttcttcagaaggtgacctctctttgttcctggtttctttgaagagcttctctttgcttttgatgttccacagttttatcatcgtaagtccaggtatggattttttttgttttgtct

SEQ ID NO: 586321 - DNA, 4001 bp, Homo sapiens
gaaaaaagttaatgctagtataaatgaacaacaacaacaaaaatacacattcttcaataactttactgtgcctaaaaatagatgtacaatttcagttgcagtttcattttaaagtgtttcaacttatattatctactattctttgtcataagatagttcttggtcaggatgtttcctggcattacggataacaaatgaagtcacttaaaagtttaaaattttccttgttttaacttaatgttattttgtatttcagtaagttcttgtagttgtggtttcaaaaattattacaagggctttgaattgacttttatttggagcatcagccctgcagtaggaaccaagcagcttgatagctattgctctggggatgcatcttgtcataatgctaaccatgtgacctacctaaatggcactgtcaggctccttgttcataaaatgctaataatcctatctactgtacctgtctcacagggcagtagtctgaaacgaaataaataaaagagtttttaaaagaagtggtgctggtcaatcgtggaggttttggtaataatggtagcaacggagctggtgttcaagtagaaattctacttcaaacggtaaccggcatcataagatcgaccagaatctactgtagatataagatgctacttacagagccctctattttgttgctacaatactacttgttgtaacataaaatttagtagctttgccaccatgatcttttttgcatggatttttttttatttcttcatgttctgttttacacttgactatgttacaggtcattatattactgataggcatgaggagagtggtatattaaaatagaaatcctgtgttactttgtgtgctttttgtgttttttttcaatatttgacaagtaagattagtaagtttatctgaatagtataaatatagaataatctgtatttccctgatcctataaacaataaaatacattgtatcaattcttttgaagaaacctattatcctattattttaatgctttcgaagtaaatatattgctttagaaatgtggtcaccaattaagaatcaatctagctagttacaaaatgaaactttggagaatctttgagtctggaatggtctgggcactcatactgactgccttgagaaaagagacactcaaggtttatcaaagtttttgaaactttgatttatgtttttgaattgtaaatcctcagatctcttagaatactgatattttagaaagaatccacatcattttatgcctcctccaaactgtctacttcattccactgaaatgaagtgaaatcctaagagataaagtaatgccagaactttctggaagtaactataagaagttgaagcttatgtaacgtgtttcccagtcatcaggtcactctctaggctgtttacactctggatccctttcagacctcatggaagttaattttagttttatagaaaggacagagaagcagattgctgtctttgcagaaactgtctccgttaagcttatgagagtcttacctttctggtttcctgggcattaccagagagaaggaagcactgtttgtcctgagagaatcctttcttgcatctgcttgcctgggtttcagtggatgtgtgtgggacagccccaggggcagcggctgtgagcttcctcgaccctcggagggtcagagtctggtagaagagacagattgccaccactaagcccaccaagaagggtcgggggcaaaatcgccgacgacaagggaacactgggcgacagaccatgaccagttcagcttcacttggcccctgtccacgttgcgggaaaagtcatagcagctattttttgtcagcatgaaaaatactaatctgtcttctttttccccaactccaatcaagtttgcttcatccctgcttaagaattttccaaaaggttgtgccaaagaatcataggtcccgaaagtctgaggcttttaataagagctcttccatggatgacagtcaaaagtggatgacctgagtttaaaaaaagacatcaaataataatagttgtaacgaataacctgagtgtaccccaggctgccaaactgttgcttccagcaatgccttattctcacatctttcaactcacagtaaaggagtccgactctgcctcagctttgcaggaagagagaaaacaataccaaagtatatctggagtctgaaaacagcattgaagaacgcaaaagattaaaacccaaagtgcctgttgcacagctgaactcaggccaggttgccttagcagttcctcaattttcctccggttttaaagcagtcttgctttcagccttttgtatgcttcccttcatttagttttaaattcccactgtcctgtaagtattcacggcttttaacataaaaagggcatacgcaatttgaatggacatggttactgtcagggtttttgcttgaatttgtttcattccgtctcaagttcaaagttctatgtacttactcagttttcatccttttagccaggaaaaaaaaagtttccatgatttcctaatggattgctgatgaaaaccactcggaaggaaacacccagtcgtatgactccaattcatctcacacacacacagagagagacacacacacacacgcacacagacacataaacacacgcgcgcgcgcccgctgcacgcccggcgggagcagaggacctcggcatcgcagccacccggggccgggcagagcggggcggagctaaggccgggttcctctggccctgggggctgctggagcagcgctgtcagccctgtgtccgaaaccgtgggcttccccactttggaaacagcagctagcatttccccaaatgaggctgcccacccagagctgcagaatttagaaacgtatctgatgtctgatcctctgtgcaacttctttttcctaatacagaattggaaaaacaaatagccttagccaattggtgacaaaggtcgagaatgagactaaagtgaactccatgagtgaattgggatattcttcactccagggaattgtggttactcttctgaggataagagggtcacaagtactgtctggacctcagacagcaagcaccagaataactcagtcgtctctctgtgtcttagtatggaactcagatcacagatgttcttattactcctttcctggactaattaattgggtctttcaatgatctgatgcttcatggcctgacattttgctcctaaaatgagtcgattatagcaggtgttgggggtaacttttgcccagtagataaaggtacacagtgggctttgtccagaatcagctcagtctaattctgtgcagaccttcgggtggacgctgctaatagtgcaattctgcaaacccccttccacttttgctgaggctgtcaaggcgaaaggaaatcagtccttgctttgtgaactctggatacccagggctgtcttagcgcatagcaggcattatttaaaggctctggacctgaagaggttttcaaacttgtttctaagccaaactcttgtgggttgaggttctccgtgaggccacacccctagagtgagcctcacccagaggcacgctgctgtcagccccttgtattttgagagacggagcgccccctaggggtgcccagctagcacagattcagagaaatgggcatctagagttccttgcttgtgagaaagaaacccttttaacatcctatagaacaaattaattaacacattacagaagaaatattcacacggaagctggatttatcccaagcccttgcatgtatcgcctccagtggctttaatattattttatgtataggttcagagtccttaatcttatgacaaatgggatagagaaaaataaagtgatgcttcacttttagaagccaaaagagttttaagagaaaatggctgaacagtggtgttgtaggacatatcgttttggtggatgcaatgtgatttgagagataataagaattgtgagatttctaaattggaatccagggtgtgaca

SEQ ID NO: 586322 - DNA, 4001 bp, Homo sapiens
acataaaatttagtagctttgccaccatgatcttttttgcatggatttttttttatttcttcatgttctgttttacacttgactatgttacaggtcattatattactgataggcatgaggagagtggtatattaaaatagaaatcctgtgttactttgtgtgctttttgtgttttttttcaatatttgacaagtaagattagtaagtttatctgaatagtataaatatagaataatctgtatttccctgatcctataaacaataaaatacattgtatcaattcttttgaagaaacctattatcctattattttaatgctttcgaagtaaatatattgctttagaaatgtggtcaccaattaagaatcaatctagctagttacaaaatgaaactttggagaatctttgagtctggaatggtctgggcactcatactgactgccttgagaaaagagacactcaaggtttatcaaagtttttgaaactttgatttatgtttttgaattgtaaatcctcagatctcttagaatactgatattttagaaagaatccacatcattttatgcctcctccaaactgtctacttcattccactgaaatgaagtgaaatcctaagagataaagtaatgccagaactttctggaagtaactataagaagttgaagcttatgtaacgtgtttcccagtcatcaggtcactctctaggctgtttacactctggatccctttcagacctcatggaagttaattttagttttatagaaaggacagagaagcagattgctgtctttgcagaaactgtctccgttaagcttatgagagtcttacctttctggtttcctgggcattaccagagagaaggaagcactgtttgtcctgagagaatcctttcttgcatctgcttgcctgggtttcagtggatgtgtgtgggacagccccaggggcagcggctgtgagcttcctcgaccctcggagggtcagagtctggtagaagagacagattgccaccactaagcccaccaagaagggtcgggggcaaaatcgccgacgacaagggaacactgggcgacagaccatgaccagttcagcttcacttggcccctgtccacgttgcgggaaaagtcatagcagctattttttgtcagcatgaaaaatactaatctgtcttctttttccccaactccaatcaagtttgcttcatccctgcttaagaattttccaaaaggttgtgccaaagaatcataggtcccgaaagtctgaggcttttaataagagctcttccatggatgacagtcaaaagtggatgacctgagtttaaaaaaagacatcaaataataatagttgtaacgaataacctgagtgtaccccaggctgccaaactgttgcttccagcaatgccttattctcacatctttcaactcacagtaaaggagtccgactctgcctcagctttgcaggaagagagaaaacaataccaaagtatatctggagtctgaaaacagcattgaagaacgcaaaagattaaaacccaaagtgcctgttgcacagctgaactcaggccaggttgccttagcagttcctcaattttcctccggttttaaagcagtcttgctttcagccttttgtatgcttcccttcatttagttttaaattcccactgtcctgtaagtattcacggcttttaacataaaaagggcatacgcaatttgaatggacatggttactgtcagggtttttgcttgaatttgtttcattccgtctcaagttcaaagttctatgtacttactcagttttcatccttttagccaggaaaaaaaaagtttccatgatttcctaatggattgctgatgaaaaccactcggaaggaaacacccagtcgtatgactccaattcatctcacacacacacagagagagacacacacacacacgcacacagacacataaacacacgcgcgcgcgcccgctgcacgcccggcgggagcagaggacctcggcatcgcagccacccggggccgggcagagcggggcggagctaaggccgggttcctctggccctgggggctgctggagcagcgctgtcagccctgtgtccgaaaccgtgggcttccccactttggaaacagcagctagcatttccccaaatgaggctgcccacccagagctgcagaatttagaaacgtatctgatgtctgatcctctgtgcaacttctttttcctaatacagaattggaaaaacaaatagccttagccaattggtgacaaaggtcgagaatgagactaaagtgaactccatgagtgaattgggatattcttcactccagggaattgtggttactcttctgaggataagagggtcacaagtactgtctggacctcagacagcaagcaccagaataactcagtcgtctctctgtgtcttagtatggaactcagatcacagatgttcttattactcctttcctggactaattaattgggtctttcaatgatctgatgcttcatggcctgacattttgctcctaaaatgagtcgattatagcaggtgttgggggtaacttttgcccagtagataaaggtacacagtgggctttgtccagaatcagctcagtctaattctgtgcagaccttcgggtggacgctgctaatagtgcaattctgcaaacccccttccacttttgctgaggctgtcaaggcgaaaggaaatcagtccttgctttgtgaactctggatacccagggctgtcttagcgcatagcaggcattatttaaaggctctggacctgaagaggttttcaaacttgtttctaagccaaactcttgtgggttgaggttctccgtgaggccacacccctagagtgagcctcacccagaggcacgctgctgtcagccccttgtattttgagagacggagcgccccctaggggtgcccagctagcacagattcagagaaatgggcatctagagttccttgcttgtgagaaagaaacccttttaacatcctatagaacaaattaattaacacattacagaagaaatattcacacggaagctggatttatcccaagcccttgcatgtatcgcctccagtggctttaatattattttatgtataggttcagagtccttaatcttatgacaaatgggatagagaaaaataaagtgatgcttcacttttagaagccaaaagagttttaagagaaaatggctgaacagtggtgttgtaggacatatcgttttggtggatgcaatgtgatttgagagataataagaattgtgagatttctaaattggaatccagggtgtgacaatgctgttactgagtgataaggaataggcagacagttctattaagttctgttaaggcaagaagtctgaaaaacagagtttggggaatctaaagagtcattcttatgctttattaaattgttgagaacaaggtacagaagaaagtaaatcagatgctaaaataaaattgccattcggttgggagaaatgaaagacaacagtattgaaaattttaagataatatagctagacttcaaataatgggaattgggaagaaggtggaaaattagtatcccagaaatgattctagtagattaaagaaccccatttcccattttaaccactgagtccaagggagtggaagaaagcagtaaggaaatatttgcaagagagagaaaagaggtagcttgagaaggtgcaaacaagaggtggaaaggagatatagcaggaattatcaccaaatagactaaggcgatacacaagcatctgattttagagtaaacccaatctggatatgattcatggcactgccttttatcagctgttcttaaacaagtggtttgaccaaagtctcagctttcctcattcgtgatataaggatactaatgtttcctttgaagtgttgttggtacaactagttgagataatatatggaaagcaactaagcattctgtatttgctggataaatgaatgctgaatgcatgtatgttaaggt

SEQ ID NO: 586323 - DNA, 4001 bp, Homo sapiens
aaaggccacatgtgcagggatgatcacaagagtcgaggggtaggtaagagggggtgtgtgtgtgtgaatttgagcagctgctttttagggagtgtacagtggtgatggtgtttgtgcctgtgtcaaatagggtggtctgatgatgtctccttataagcactatcttgtcttcttgaagacttaattaatttccaatgaaactatcttgtacagaactatcaccatgtaaagttgtgggacaggcaggaaaaaaaaaaaaaaaaaaatatatatatatatatatatgccaggtgcagtggctcatgcctataatcccagtacttccgaaggccgaggtaaaaggatcacttgagcccaggagttcaagaccaaccctgggaaacatgatgaaatagtgtctctaccaagaaatacacacaaaaaaatttgccaggcgtgttggtgcatgcctgtggtcccagctacttgggagactgaggtgggaggattgctggagcctgggaagtcgaggctgcattgagccatgattgcgtcactgcacccagcctgggcgacagaggggcccctgtctcaaaagcaaacaaacaacaacaacaaaaacacataaagggacagactcagaggtcacatgtgcatgagaaggtgtgaccgcctgaggggagtgaggctgctgggagcggtgggagaccccgctggtagttgtgggcgacagcacacaacactggagagcttgcccgcctctgctatgcactgagtgattgtcagcaagtcccttcccccgcttgggtctcagtttccccatctgtggattgaactcagtgacttccacaagcccccaaactttaaggttatagcattagatttcaagtatgtccagataggaaagaagacacaaagaaaactactggtttcttttaaagtacaagatatcccaccgagtaggaggtgggaagccaggagccaccatatgaaggggagcagtgaagggagttcaggccaagggtccacaccagctgctgggtgtgatgaataactcagagttggggtccagaaaaaagtagggacgggccaaaaactagggatgagctcccaggagagtgagtcctagaagggagtttgagagtctagctggggtctcctacagaaaggtggtccttccctcagcacatctcctccaaccgcctagttttgatgaaatcaagaagagacgctcaacgtagcgggtgtgatatcctagtactctcctgcagttgggagagtgttgagggagagttccaatccaggataacccacccttattcaagaattaagcgaacagacaaggtctaccctcctacagattacctttgaacagccgcagagggccaaagatccgaggcagtgaactcctgagtccgagtgagggtaaaaggagtccccagacggtggaaatgggggcctgggagtcaggagtcctgaaaccaaggggagcgtcccgggatccagaagaggaggtctcaggatggagtgggaagagtctcgggaccacagatgagggagttcggtaactaaaggggaggatcccaggacccggaggaggtgggagggactctcaagacctagagggaggagtcctgcgaccaaaggggaggggtcccaggatccagaggaagccgggggaggtctcaggaccgaggcgagggagtcccgggatcacagaggagcgggtcccgggttcgagtcgctcttgccctcccgcccgggccccgcgctcactgtccatgccggggaagggcagcggctgcgcccccagctgctgctccaccgcgatctccaagtcaaacttgatgtggtccacgctggcgatgatttcctgcatggcggcggcggcggccccaccggcccggctccccctcggtctcctgcagccttctcgcctttacccgccgccggccccgccgcacacactcctccttcgcttcgcctcgccgccgccgccgccgccgcccgagggatgccgggagcgcccggagcccgcgccggcccttgcgcctgtccaggcactgccaatcgagactccgccgttccgctagtcccagctagccgccagccgaacaccggcctcgccagaaacctgaaaccagccgcgtgagtcggcgacgcggattgcgcctgcgcgcttggggagagggggacccgaggaagagactggttcgccgcggggaccgggcagggctccccgtcggagtgcactgcgccggacacttcaagtgagttcctgtgtgatcctcgcaggagccccgggacccgggccaagacacgccagaggggaaggaagtgcccgagccgggattggagccgggggcgtctgaggagggaaactgaggctgcagaagtccgtgtggagaggggtcggcgttggcctgagggtccgggtgggcctctgaggaggggcgggtctctccgaggaaggacggccgcagcgtgtctctaattcagggttttttctcgctctgtggcccaggctggagtacaggggtacgatcatagctcactgcagtcaacttctcagactcaagcgatcctcccacctcagcctcccgagtagctggaactacagacgctgcaccaccacacttggctaatttttaaaattttatttttaatttttgtagagacggcggggttgggggggcgggtggcgggtcttgctatgttgcccaggctggtctcgaactcctggccccaagcccaaagcgatcctcctgcctgggcctcccaaagtgctggaattgcaggcatgagccactatacagcctaattcagggttttttttaaccagggtggggtaatgagcttgtgtaggaacaaaatgcacccctatttttctctatgtgaagtatagcatttcctttcctgattgctggagcagccttagcagtgcctgaaactgtgagggtgagtgtaaatgatagttccagataacagtttgtgcagggccaggcatggtggctcacacctgtaacctcagcactttgggagtctgaggcgagaggatcacgtgaggtcaggagttcgagaccagcctggacaggatggcaaaaccccgtccctactgaaaatataaaaattggcctggagtagtggcgcgttcctgtaatcccagctacttgggaggctgaggcatgagcatggcttaaacccgggaggcagaggttgcattgagccgagattgtaccaccccactccagcctggtgacagagtgagacgcaaaaaaacccagtttgtgcagcaactacaaggtggtatcttaagctgtcacttacatttattactgctttgaaattatgatagagtcggccgggcgcggtggctcacggctgtaatcccagcacttcgggaggccgaggcgggcggatcacaaggtcaaaagatccagaccatcctggccaacatggtgaaaccctgtctctactaaaaatacaaaaattagctgggcttggtggcatgcgtctgtagtcccagctccaggggaggctgaggcaggagaatcgcttgaatccgggaggcggaaattgcagtgagccgaggtcacgcctgaggacagagtgagagactgtctcaaaaaaaaaaaaagaaaagaaaagaaattatgatagggtcttgttatttcatgcattgaaaataagcatctatactagtatagcagaaatttgtttttaaagcattttgatgccatttcaatatcattgctttttgttttgtaattctgtgtattgtaattaatgcacgtaaggcagggcatggaggcttacgcctgcaatcccaacactttgggaggccaaggctggaggattgcttgaggccaggagttctagaccagcctggcaacatagggagactccatctctacaaaaaaatacaaaaaattagacaggtatggtggtgtgcaccagtagtgctagttaattgagaggctgaggtaggaggatcacttgagcccaggagttggaggttgcag

SEQ ID NO: 586324 - DNA, 4001 bp, Homo sapiens
aaagtgagactcttgtctcaaaaaaagaaagaatgggtcattactatttaccttgagtatttgggtgctaataaacagatatctgatgatacctggggcaagaactgagttcctcccctctcattgccttagttctgtgcatcccagggtagtattcaacactcagtgtttcctctgacaaactagatgcttcccaaaacaaaaacaaactcatttttagaattctgttatattatttgcttcttgtttttattttttgtggggagtgaactggtaaacccagtggactttcttaacactcttctaagtcattcaaactgtcagtcaaaacccacctatttctcaggctagtagaatcccactataaagtgatttataaactggatttatataaattgggggatcaattgcccctcccaaacaatcatctcctataaaagattaataaaacaacatctggttaagaacactgacactacattataaagggttgcccctgtacttagactagcatgaggtacacatctagaatgcccagttagccaaacggtcttgacgaccatgcagactttcatatgccaacaaagccggtgcagtgtacttttccaaaagtgctccaattctccttttggacaactttcttaaacgttatttaccaagctaataaaatgtattctcaatggactttttactctgcttacatctttgttcttactcatcccaaagcaaagaatggaaaaaaaatgagttgtacatttagccggggaagggaaaggcaagtactgaggggctcctttttcatttactgatgccaaaactgaggctgtggaagataagttacgtccctgatgtcatccaagtagtggataccggaaccaggaattgcacagaattgtccagctccaaaacccaagcaccttgcttgggacccactggggttgcagtgaaggtggggggctcagaggtgactgcacacgggtcatgcatagccacagtcattatatggccagagttttaaacattattttgttctgtcttcaccatagacttcatcatcaatcataactgataaggaaaattacacttagctgaaaagccaagtcccgtgctagggaggcattttctgtatgttatttctatttccaataaaacaattctttaaaaagaaaaacttattatctccatctttcagatggaaagactgaggtttagtaggcttaaataatttgcccgaggtcactcactagccaaggccagaactgggatttaaatccacaaatattccaaagtccttttgtttctgtatcacttcacagggagctgcttccacctgtctcctgtgcccttggtttctgctaatcctacattccaagaataaaagtcttcctatgcgttcctaggcagaagccaagtttccctgctttgggcacgttcaaaatagaaggtattttccgcttctcttgcttctgagcacccacgaaatcaacacatccccaaaacacgcgttgagggagtaagggaaagtgtcctgcacccgccaccctcccgcgctaagagcggcagaggaccccacagcttcgtacttccccggaggagctcctggagtaggagacggcttctagcctggaagaaccccgggtgcgacagttgtgccaggaaacttcaagagtattccctcggctgggcgcacgcagtacatccccaatgctccaatttgaactttgactcggccacgaccaccccactccagtctcactctacggtgctttctcccctgttggtgctgagggcttttgagactacctgccccgcgctccctaagtccgagggaccgaggcgaggacctgtcccgctgagctggcacgacccacgcagggcaggcggcacttacgcggcgcagtcggtgctcctccctgagccgcggcgcgcaaggaccccagccggttgtccttgcagcgcttcccaaatcaggcagaagtgaggcagccccacccagtcacgaggaccctgcagaactcgagcctttaagcgctcctctaggctcacatgacccagacccacagggcaaaaagtgcgtcgtcgtgtcccaacctcctggtcccagaaacctggccgcatcaagtcagcgcttcccatgctggaagaagcaagcagccccagggtggaatcttaaaaattaatgaagagcatcggcggggtgccattcaggttggtttgtccctttgttttattttgattttgtctcccagtttttaaaagctgctatcttaaaatttcaaccctgtattttgaaattatttctgcactctaggacttacttgcaagcccaggatttacatttggaaagcgagtggtgtttgattcccactgtttaaaaaggcaacacacgttcgctgatggtctacattccagctgcactagcagtaagctcgcaccaagtgccactgtcctgccaagcactctcctgaatcactgcgctggagtctcagagccacctgatgtgttctgtaccattatacccattttgcaattgggggacacaaactaagtgaggttaagtaacccatccagggtcacattgcttgtaagtgacctgagtgtatattattagccaccaccaggtgctgggcatcgagccagacagtacgggagcaagaactaaaaaaggcaaggaggttgcaatggcaagtagataacacaaaataaaggagggtcatcattatcagcaacagcagcgtcaactgccagacaggtgggagaggccacggggaatcttctgcactgtcccgggccaacctccatctcctcacagctagctgcaggagtgagcccagggaaacccgcagtagagcagcccagccaacccgacagtcagggggaaaaattgttttaagccactttcagtttcgcgtagtttgttatgcaactaaggctaactaaagcactagttttacgagctggaacaaactaatgtcactgaatatctgttttctcctaagtacctactttattgggttgttgtgaggactcactgaaaaactatgtgtaaatcacccagcacaaagtatgtgctcagtgactgcagtcattctttgctatcataccttccatatggaagtacttcctacccacctagctctttaaggagaaaaatctgtttgtgggaaaataattcttttaaggccaaaatcagcccacctttaatatatgcaggacccagggcaaaagtacaaacagagatctgtaggccagatacctaaatatttaaaagttataaacaaagttaacaaatgattaagtacaataagttctaccttcctacctagacaaatataccttgggaattgacatgaaaggccagattgaaactttggatgatctgcacttaaatatgatggtgcagggagaggcgatttccagttcctggtttgcagccacctcctctcttcccacagggctctagtccattggtggaagctcggtcaagcttcccagaagcagctgtcccccagccacctcttgggcacaagagtatgaacaccagagtcagcaatgttcgcccatgggagtacagacattagcagataacactgctgctggcgtgcagacccttgaagcaggctcagtgccatttggggagggaatttggaatttgccttctaaagtgtgggccctggacaagggctccttgggtctaagtataaggacaactactggccaaagaatacctgtgcccacgtggaaccacttaaaaactaaactgaattttacagtaaacacaggaggagccatgctgtaagcatatttattcaaaaacagggtgtcccaaaagtcttcctgcagttttagtaacctcaaggctataaatgctgcaacttataagaacaccatttgaaagttaatttaacactatttatctctgtgaatgttgaataacacgttttaactttaatttttgtttcagttcccctgagtgaaatatggcatacattaaccagaag

SEQ ID NO: 586325 - DNA, 4001 bp, Homo sapiens
tcattcccgtagaccagtgaggatgaaagcccaacagaatggctgagagaatgaggggctaatcagcactttcaagaagttttgttgggatgggaagcagaaatggagtaagagggggacatgtatgtggggacggaggattttctaagatgaattctctaaagcagggttgtatgctcacaggaaatgctctagtaaagagggaaaaattagtaatgatggcttggactagagtaaattatatgaatagttttttaggttgcagatgaaatcccatcagtgggttgcaaaattaattcagtggttcaatttttttttttttttttttttaagacagagccttacactgtcactctggcaggagtgtagtggctctatctcagctcattgcagcctcctgggatcaagtgatcctcccatctcagcctcgtaagtagctgagactacaggcatgaaccaccacacccagctaacttcttaattttttgcagagacagggtctccctatgttgcccaggctggtctccacctcccaggttcaagtgatccttctgcctaagcttcccaaagtgctgggattgctggtgtgagccaccacggttggccccattcatattaataaaaaatagacaatatgagagtgtacgccacacattattgtttcatgagcctttcatttcagttacacagacatattgtgtttaaaaaaaaatcggaagaggccaggtgaagtggctcacgcctgcaatcccaggactttgggagtacaaagcaggaggatcacttgagctcaggagctggagaccagcctgggctgtagtgagaccctgcatctacaaaactttttttaaaaaattagcggtgagtgatggcgtgggcctgtagtcccagctactgaagaggctgaagcaggattgcttgagtccagaaagtgaggctgcagtgaaccatgattacaccccgcctgggggacagagcaagaccctgtttcttaagaaaaaacaattaattaaaaatgtaaaaatgtgaaatgccatagtacatataaccattaaacatgaggcaaaagaacataaaggaaactgtatcaaataatcagttcaaagagaacacaagatagtaatacctacaaattaatatcaaccgtataaagcccacattcagagtagatgcaaaatcttccatttgcaccaggcgcaacgagcaagcatggaaaagaccacgtggagttaaactgtcagaaaatcttttaccctcgccttgcacacacacccacacaccccctgctgtttctctggtcccagtcctggttcacgtccttcccttctccaccccaaaaccagccccttccctcacagtgtttactgctcccatcaaattccgagggcagctcttccgagggctctccaggggcctacagctgcaagcagagctctacccggccctgattcgtctctcctccacctactttcagggcggacagactcaggcctttatagccttctaagtccggggtcggataccagactgggctccacccccgcactgtgacccagaaacgctggtaaacgaatgagagaaggagggggcacattgaaaggcagccggacacggaagtgctcggccccgcaccagacacggcgtggaggggaagcgaaggttcggaagggcaaagcgagagtcccgttcgtccccgtcaccaccccgcggccctcccggacagggccggcccgctgccctcactcccgtacgagggtcgcccagtccccacggctctcggctctcagctctcagcggtcaaaccgttgggctcctcgggcgaaaagggacgcgcccgagaagacttacacttccatgacgtcccgcctcgtcgcccctagctgccagcagacaaagaacctcacacttcacagctgtctccgccgccaccaacagcgccaaggtgccagctccgcgcgccaaggtgctcgccgggatcgccgcgctgcatgccgggagcttggcggacccggaacctcgcgctgcgcgttcccctttttcggggggcagggtgggggagtgtccctgcatccttccaccaggccgatttaagactgctaagcgtttgcggacaggattatcttgtgttttcttttctttttttctttaacctttttttttttttgagacggagtctcgctctgtcgcccaggctggatctcggcttactgcaacctccgcctcctgggttcaagcgattctccttctgcctcagcctcccaagtagctgggactacaggcgcttgccaccaagcccggctaattttttgtgtttttagtagagacggggtttcaccgtgttagccaggatggtttcaatctcctgacctcgtgatccgcccgcctcggcctcccaaagtcctgggattacaggcgtgaggcaccgtgcccagcctctttttttcttttttgagacagagtctcgctctgtcacccaggctggagtgcagtggcacgatctcggctcactgcaatctctgcctcccaggttcaagcaattccctgcctcagcctcccgagtagctgggattacaggcgcccgccataacgcctagctaatttgtgtattttttagtagagacggggtttcatcatcttggccaggctagtcttgaactcctgacctcgtgatccacccgcttcggcctcccaaagtgttgggattacaggcgtgagccacctcgccgggctctgtctgttttcgtggtctaggttttaacaaagtattaatcagctgaagttgtgagacgtgatcgggttagtgggcctttgcatgttaaaatcccacctctcagagagtagtgaggctggtggcatctgggctgccagaaacattgcagtttatttatttattttttaagagacagggtcttgctctgtcgcccaggctggaatgcagtggtgcaatcagagctcactgcagccttgaactcctgggctcaagcaatcctcccaccccagcctgccagagtagctgggaccacaggtgcgctccgctacacctggctaattttctttttttctttttctttttctttttttttttttttgagatcagtctcactctgttgcccaggctggagtgcagtgtcgtgatctcggctcattgcaacctctgcctcctggattcaagcagttccctgcctcagcctccccagtagctaggattacaggtgcccgccataatgcccagctaatttttgtatttttttagtagagacggggtttcaccatcttggccaagctggtcttgaactcctgaccttgtgatccaccctcatcagcctcccaaagtgttgggattacaggcgtgagccactgcacccagccacctggctaattttctaaaataaaattctttattgtccaaagagtcagctacaaaattttttaatttttttgtagagatgggggtctcactgtgttgcccaggctggtcttgaactcctcgcctcaagtgatcctcccacctccaactcccaaagtgctgggattacaggtgtgaaccaccacaatagcctctgttgcctactttgtaaataataagggtgttaaataatccttataaagttcctggcactttattaattactgtggcaatacaaccatgactctctatgaggtacattgcattattattgacattttataattgaagaaactgaggcagacttggagagattatgatttaccaaaagtcactcatctaggaagttgtccagtgggtattgaaccccagccaatctgaacatatacaacagatgcattaactagagactgatgagtggatgaataaaatgtgctacatttgtgcaatggaaaactacttaaaaaggaggctggccgggcacggtggctcacgcctgtaatcccagcactttgggaggccgaggcgggcagatcacgatgtcaggagatcgagaccatcctggctaacagggtgaaaccccgtctctactaaa

SEQ ID NO: 586326 - DNA, 4001 bp, Homo sapiens
ccaccagctgaaagacaaccccctagctgtggcattgcagctgctggatgagacactgtcacagcgaaagaatacttcaagaacaaaagagaagggctgcccctctgcatatggataaaatgtagcctgtcagtagaaactcctggagcacccattcatcaaaagatatttgaggaacaacatactccaagttctttactgaggacaggaagcacatctggtaccccaacctccgtgctgcccacatagtgtccccatgacaagctcagcaagcaaagcccagaagatcacactgaacatctggcttttgccccagcatgaactaccactccctctcagccctgcactctgcattttttttaaacaagccactctcagccaccacaaatacttcggtgggaatcagcagggaggccctcattccttgtctcaaaataacgtcagccagagtcaaaggccaaagaggtggagcctgcaggccattttgcgaaagtttcaaatatcttggtactgaccccattaaaaaagcgtgaaggggaagcagccaagcctccagtggttttctcattagtgtcccccctcaccccagccccacccccattacaaacgtctgcatggataagaatcaaacaaagagatcttgcataaagtcctatgatcagtgctggctattgaaaacaaaatttcattttgcaaacttaataccaaaaacttgacattaaaaactttaaaagaaatgtgcgtgctctgggacagcttaatcccccaagagatctctgaggcattagtataagactgaacaagcaactggtgagctgtcccaccttccccagagcctttcttaaatatgcaactgtctcagattttccatactcctctgctggtttttcctccgaagagggaggaaggagacttcttggtcgtacagtttaagaaagcaaataaagccgcctttctccctaacgtagaggagccctttcaacacacacacacacacacacacacacacacacacacacacacacgtgtactttttaaaatataaatatgaaagaagaggaagggagggagagagggagagagaatacgagacagatgaaaaggaaatgctacttaatcttgtccagtttttgaaaacctcaaaaaaaaatcaatagcaaactaggcggaggcatgttattctcaaaacacacactccctctcccgcattacagtactgttaacaacagcaaatgatattacagatggaaaaagcctcagggaaaaaagcatgaattgttaaaggaatacaaagtggcattactctcatgagaaatgtaaaggggccagctgcccgccttcatctgctcagacattaaagtacacctcgcccaggacctcttgattctgaccatgccctgccccaaaccctgccttcccgggtcccaggactccagctgctcctcgcgtgacaacacttgcccgctttgaaagccctcctgccccgcccgccgggtcctcaccgtgtggtacatgagggcctcgccgtccccgggctctgacagctcgctcagcttgcggtcccactgcagcacgccctgctccccgctctccagcacctccatggcggtgcgggccgcgctgggccgaggatgctaagcgcaggaggggacgcgcagagctgcctcggaccggcaaggttcctctctctccgcgtgtgcttgcgtgtgtgcgcgcgcgtgtctgtagttttgcacttggaaagcaaacgtctgctcctctgccggagagaggatggccaagcgctcccgtccggtgtcctcggagatccgagaatccccagggacacgagccggaccaaaggctgccggggctaaagcgggatgtgcatccaaaatgaaggcagaagacccgctctcatcccaggaaaatcccttagccgcaagcccacttgccgctacggctccagacacaaactttgagggaccccagggctcctcggctctgctccaggacccagctgcggccccacctccctccaaggcttgaccaattggatatccgccttgcctagcagacccaatcagaagtctcattctcggctttgtcccgcccccaaaggcagaggccgcgggaagtctccgcccacgccttggaatgtagccggggagtgtctgtgacgtcaccgaggaactcctcctgcttgagcgcggcccgctgtctgctgtcgcctacagctgaccaatagagggcttgggtccggaagtgatggactggaggcttgactaatgtgaaaggggcgtctgaaaggtacagccaatgaaatagcgacaagaatacattttgtaaaagagggagggtgagttcagtcctcttgctgagaatcctcagaaatttaccagcgcgccgacagggggcgcgagagttgttgcgcggggggcttaaacattttcgagtactttagttcatttgaatctctcggaatttttttaatggattacatattatacaaaaatacaaatattcctcatgcacatacatttatattagtgcagctctaggaaattgtcattgttcttcacctttttcgcccattttctgttgggttcttctattttttatggacttcacttattgtatgtttttctttcatctgcttgataagagtcaatggcatgcttttccaggtcctacagaagtgagcccagtccttgaattcatagagcttttatctcagaggagtcaggcaataaacaaagaaataaacatttaaattcagaaagtggaaattgctataaagaaaaataaaagcaggaaaacaggatgcgtcaagatcgatgctattttacgtgctgatcagggaagttcttcctaaaggaaatgagatttcgggggaagctggtattcacgtgattgctggggaggccagtgtggctgcagcagaggtgcttggcagggaggggtgggaaaggccagaaaggtgagccagggccagagcaccaggcctgcctcctagaatagggaagagatggcctgttctaaaggaattcccccgaacactgtgattcttcttcctcctttttaattccaaaaatatagtttacctatcttaaatataaaagcaggtctttgccagttagctctagaagtttcttacaatggcacattcaggtattagctattgtgttgtttccttggcaagtattttttggcgggtggagacaaatgtctttgaactctatgttgtctttaaagcagcagtttatcatataaactattgcatttgtctggtcctatcttctggggtcttttgagatttttttttttttttttttttttttgagacagtctcactcagttacccaggctagagtgcagtggcacgatctcagttcactgcagcctccacctcctgggctcaaacagttctcctgcctcagcctcctgtgtagcttggaccacagatgtgcaccaccacacccggctaatttttaaattttttgtagaggcaagatctcactttgttgcctgggctggcctcaaactcctgggctcaagcaatcctctctcctgagtctctcaaagtgctgagatttaaggcatgagccaccacgcccagcttttgagattattttaatgcttaaatagaagctctagtttatgggcacacaccttccttatataatagttttctcatttttctcttaggttcttggtttttcttttccagcctggtatccccttcatcacattctttccatagattgctctttccatttttaaagacctttcttatttttttaatctgtcactcaatgtacaatgggattacatccacataaacccatcataaattgaaaatatcgtaagtcaaaaatgcatctactatacctaacctatcaaacattatagcttagcctagcctaccctaagatgtgctcagaacacttatattagcctacagttggaccaaatcatctggcaacacagtactagttatttactgtcatgattgtgtggct

SEQ ID NO: 586327 - DNA, 4001 bp, Homo sapiens
cattcatttcaagtactaattcatcctgaatttcaaatgtacttttctctgaaaagctatgctaaatactctgtagcaaacttttgtatagaacatggatataaacatagaactttcgagtggaaagagactccagagatcatctaagattggttccccatgcggggaggagcttctagcccaccttgccctttcctgctctttagagtagtgcccagatggtttaagtgatttgctcaaggtcaagcatcagaatcaacactcaggcctcctcacacatcatgctacttcctccaaaaattacttctcccctctgctccccacttccacctctgcccaaaaaaggaggaaagagagaagatccataaagtcataatgaatgatatccaaaacatgcgttaaataaatagacacctttctggtatgtgccgcatgcctcaatatgcatccagctgtaggatgatcacgtctaaataagcccaagagaagttttgaagttcccagaatgagaaagtgtttgccctcttgttttagtgggtttcagtttattactatctagtaatgccggatggtgtcagaaagcacccaactcaggcagcatatcacaatacgaaatctattctatgaaacagaaatgtggtaataattttcaaaacatcaaagtctctctctctgagtacacgagatccttaaaacattaagaacacaatcctttgccccctctccctgtatttcctgttaatttcttactctgaaatattaactgtttctaagacaactcaatcaagaagtcttcatcatcgccccctcactactgaagcatatcatctaaaaaattaattcaagaacataaaagtcttaaagatagcaccggattaattagcacgtggaacaacagaatgtcaacatgctcaagcaaatgcacaattgctgttaaccttcactgaaataataggggaaaggctataactacttttgaggatcatcatctattacttttaaaagctgcagtatattcttaataataaatggaacagcacaatcattcacttttcatacaacacacagttttccagtcatttacaattcaccagttacactcaaaaatcgcccccccaaccccccaaccaaccaccacaccatcacttccaccttttatgaaaagacaacagttttaagccatttaaaaaacagagagagagaatcctggcagaaaataatacacagctgtgataatatcgtgttattttaaaataccataatatagttttacttttaataataaaagataaaaaaggagcgtctgtgaataattagagattgcagtctgaagccggttacagtcactgcaattgataataaactgaaaaccccttgagagcaggtaaatgctttgcaaccctgaccccctcgctctcacattacttaactacccttcggttcttgcattacatcaccattcaagcgattggttcctgcattttaactctctccctgtctcctccgattaggagcgacaccgcagcaaagaaacttcgcccgagtttgctctttctcgcttcgctctttatttgtggcccttttgctctggttgctttggtttgctctgcttttttttttttttcttttttcctccaacccggcctctgttcaactcattcaggtctctgtgctagaacaaaaactctgatcgaagtgaaaagaaatgcctcttcgggcaagaagaggagcggaggggctggggaaagaggagaaggaagaagaggagaaacaaagacgggcagaaagggagaagggggagaaaatgaagaggaggaggaggaggacgaaggctcaaaaacagaaggcagtaggggcaaaaaaaatctataaaatcaggagaaaagaaaataaaattaaaaacaaacctcatggacatcactgaggctgaattccctcctgaggtgcagaacatgagagctctggaatgagtgtgtgtagaatttgagccaaagcttaactagcttgagtgagtcatatccttcccatttgattccaggccaagcgatgatgtaatgtgctggcccttcttttgcgcctagctctggctctccctccggctgggctctcgctcacttgctctctttctcctggtctcgccctcctcccccttctcctttttagctcagtgctagtgaagtcaccacttaaatctggcagaactgaagcaaaaacttcaatgtaaccaaaacagccccaggctgagttccaggctcggagagccttcgtggtgcacttgcccttagaaacgggtaaacaaagggggaaacagtgccgctggggatggccctacagctgccatcagagagctccaagagggacccggagttctgcaggcaggggtcagctggttctgctggaaacaaaaaaaaaatactggttaaaaaaaaaaaaaaaaaagagtgccctgtgtttggagaaagggaaataacatcaagacacgtgtagagatggggaagcagggagtgaaagatggcaggttggaaggtctgagtgtgaaaaactaacctcagttagcagcttgggctttggttcagaaccaggtgacagggtttccatcgcccagggcccttttttcctggagctggatgggattttctgttgctgaatgccaaccaccagccctccggagacttctcgcatctgacctccctgtcagcgagggcaaaaccacttctggtccaaacacgtgcccgtgtctggagccaccaagggctgtgaaatcacagtcacttctcccttggcccctatgggtcaccctgtcaggtgctaaaggaaaaagaccccagccacaaaacacaaaacttgcctttctgagattagcactccaccctcaggtgaaccttccaaaggagagggaaggaagacaagttctcccttaaaatgaaagacaggctgtgcccccacaactcaactcgctggagggggtgctggtgtgggtggggccgtctgtgactttaaagaggagaacagacagtatgtgtgtctcttttttaattacagagtgaggaaaaacagcctggggaggtgggggcagtcaagcatgatccttcacaaatgacagtgaagcctttttaatggctgaattctacccctcacttcacacctccccactcagggctccaccacgacaatgacaacagtccagacactactctattagcagggctttttaaccccatcatctctccgttttgctatttctccccacacttcatgtttccttcaaaaagaaaaaagtaacatgaaaatgggaagttcgctagaattttttttaaataccacaaaagcagaagaaaggcatgaagctgcaatttttttttccttttccaaaaatgaccatggcttgtgctacagtctattgcccctaatgccttttgtggccaatgaatcaggtagataagacaaacattgtctctgcacgttgcaaagcacagaggatcttgacttctaaactgtgtttttggagaaatctctcagcttattaaagacgtccactgatggaggtcagggatattcatctgaatcccctggaatttaaatcacagcttcagggagtgttgccgtactcagggtgaagagttaaaaagcaatatttgcccaagggtctccaggaccctgggggttggggtggggaagtgctttctccagcaagctgccctttggcttgacatcctcaattgatgctgatgccacagtagctccgagtgacacctttatcaaggcaggcagctctgaattagaggtgatcagccataattacagctggcgccactgaagcctgtggcctgacagcggcaaatgtggttgttataaagtttggtccaccatgtcagtggcctgtataactcatttacgtctgacttgccaagcagacattgatttttcttctgctaaggggaataaataaaacaaaattttcaataacttctacaagcctttacacttcaaggcaggttggc

SEQ ID NO: 586328 - DNA, 4001 bp, Homo sapiens
gtgcttttattgtacttcttgaaattaatgtcactaaacttaggtttttataggcactcactaaaatatttggtaacagattgaaccaacaagcatctaatactggtagaagatgatagaaggaagatctatggaactaagattcagtgggatttgggccatacagatagcttcatctgaagaaaatgaaatggtgatctctcttggcaagtttctagagtgattcggagtaccaagaaaggaggctcccatgacagagagtgaatcctggctctgcaacttaataactgcatgatcttgagtaaaatcctcagcttctctaaacctcagtttcctcagcagaacagagataataacacctactaaataagacaatgtaagatttgacttagtacctggcctacaataggcattaacttaattggcttatctattttctcaacatgcacaaacagtagtgtgaagtccttagccatggcccttaacaggtgctcatctctgtcactgccggttgggagtgggaccttatgagtgtgagctgagttctctaagggatgcagtcaaagtggagacaaaatcatgactgaattgcaccaaaccaaagacattcagctgcttcttctcctttgaaacctggggaaagtagagccaggggcttttcatcatttgcctctaatacaacctttcagttacctcaagagcatagtacacaattccatctgtagaattttatgtagcagagtaaatgcaacctgttccccccacatcccattatcccactttcttaaatctcacaatcaaatggtgtgaaatgtggggctggtcccctttatcagaggcaatgattagttcaagcaaaacttaagagaatctcagtctttactctcatttcaaacctaatgctaaaattcaacatttgattattttctagaaaaaaaaatgccttggaaattgtacttgtttaggaaaaaatgacaattgcatctaattacaggtaaataatttgccatcataagtgtcagaatctttgcacttggtatagttaaggtagtataattcaagcctgaaaaggaatttagtggttttaaacttttctacccctccaaaaatccatcctcttcagatcttcttgccacccaaccaaaggaataatacacagataagtagtaagagggccccgttctgtgcccacttaatagggcaaacatggtcgggggagggaacaacactgctgttttcgggcaaacacacacaggctaaacacaaaccaacagattgtagctgtgactgagttctcagatatgtttaagaaacattggaaaacataagtggaaaggccatatgcacaaatgtacacaacacaggctactaagacctctgcagcttgagccacaagggcaagaggcattgatttttactggagagggcatatcaggttgcaggaatgcacacatttaatttttatgagactgatggctcacagaaacaaaaaaaaattcactttgtgacacattaatgaagccagtgaaaggccactttaaaataaaacaaaagaaaaaggcttgatggtgttttcaaaaggtctttgaaaataaaccatcatgccacaagccactctgacatgttctgtgacactttcagtctgctggacagagaaatgttacacccaggtcgcttcctcaaatcctcttatataaatatatgtatatggtattactcacccctttctggtttctgtaaagaatattttttcattttctaggtaaatccaagagtcaccaatcttccagctctcagccaagaagaacaagtgagcaatggcagaaatgtggtttcataccagagcatcttcttccagccaaatgtaatttacatctgagtgtttggttcatctgtcacacgagtattatacaaccccaccacttaccctgaaaataaatatgagctcctcattcaggtaaatgagatcgtttcagaaataaattgactccaccactaaaacttgccttttgcaaagaaaataaatgtttgaaatgtttctcctgatgaagatgatgcagctgacacttaaatttaagaggctggttatatggccctcattcatattaaggccggcccagcagaagctagaggccactagagctggaaacgtctgatcataactttgctaaatcaactctcagctcttatcagtatgcaaaatctcccagaccaaaaaaaaaaaaaaaaaaaaatggaagggaaaaggtcaaaatgcacatccccactgacaatcacacatctggatataaaacaaccttgccaaatgacactgaattttcacaagcccacacaaggcttttaacgatccacccccctcctagggagttcccttcatttgagcttcagaacagccttgtaaattacagaaggtatcatttcgttgtttatagattgggaaactgaggtggcatgcagttacttaagtgtccaaaactcacagctagttataggttgagtgagggaggaaaaaaaaaaaaaaaaagccaggtggcctaggtgataattccagtgttcattgaatccctctgcttttagaggaattacaacacatagtccctactcttaaggtgcgtatgatctaattagaaaaataagacattcacgtgctaaattaaataacattaaacaacaccattcaagaaaaatcatcaatgccaaatacacattgttttaactattgtcaactcagtcacattaattctatgaatctgtggaattgatgaaaagattcttaataaattaacacccagttccaaacttagaattgcacaataaaagccagggccatggttcagcacaggtcgtttgtaaattatttgtattcatatgactttcctgctgaatatctaggtaaactgtaatagtcttagatataattatttaccagtaaactaaccacctcagactatatgactcacattgaaggaaaaagtagttaatgtggtttaaaaatcaacagcctcaaatatttagctatttaattattgagttacaataatctatggagatacaacattttgtcttgtttttttctgtattgtctcttcttggagctccaaaatttctaaatagttttaaaatactgttgtttctatattgtaagaaattcacctagcatggggtaaaataatcattataaagaagctgctaagataataggcagaaaaaaagtttacaaataactggatctgggtgttgaattttggcattcgattaaaattctataaaaggaatgaaattaataatcgaatcattatgataattagtaattacattttcagagaattttccaagaataattaattagtgcatacctttgaggtattattatctccattgtaaaatgaggtggtggagatggagctgagatgaggagttgcctctggccacaggcagaagcagcaagtggaatgtcagatacctggaattcctgagcccccaagcccttgttaactaattctgctcactctgagccggaatcaggaaggtcattagttaaatggcataaaccagaagccgtcctttcctctcctgaactcttcctctcaactgatgctactgaccctctagaggtctcataggagattctcttcagactgtggtttccttggcaggctgccatctaaaagtggagttgagtaaagtgagataagtagaagtctggatcttttaaaaattttattacagtagacgaaagaggaaaacagaaaaaatatgaggaagattataactgaagctacagcaagcagaagtggcatgattctaaacgtaaactgtgttcacatattcacagactcataaatcaaccacaagtaatgaagaaccaaaagaaatttttaaaccctttttacactgaaaatatatggctatacttgtgcttctagattttaaagataaagggtgcatttcctttccagaataaaaagatgtaaattttgggcgggtgtggcggcacatgc

SEQ ID NO: 586329 - DNA, 4001 bp, Homo sapiens
cttcttcctcacacttagatatttaaggcaattgccccccagtttattaccttatctcaattgtataattttcttaaatagaattcagagaaatagtcatagatttaaatttttaaacactaattaagcattggttgattcccataatacagctggtagtcaaagtggacaagataatgaattgactgagatcactgttccatcttcatccaagaaagctgcctctaaaaaaaaaaaagaccttaaattgctgtagaaatccaatttgtaagaagcaaaagaagcatatagatgggaaacaccagccaggatcacattaattttgtgactaactgcattgcttagaagaagaagaaggagaaggagaaggagaagaaagaaaagatgacaaaaataataagtccactcaaatcccaattttaatccaacaacataaccagaagaaaatgaactacaaatacaaagttcacatcttagtgatctagtgaacactacacaccgacaaaataatttttagcttagtaagaagtaaactccaatgacaagaaaatattataggattgtgatacctcattgctaaaaagtagattatagtaagaaattgggagtctaggaacttgccatcatggaaactccatgattgattggttttgaatgtgcaggtgtgggaaactgacaaatcattgtaacaaaaatcttaaacttactagaattgaaaatctatgcaggaaaagtctctgtgacaaactaccattcatttagccacctattcaaataaaagctgtgacataacagagatctagaaataagggcatggtttccaattttttgttggaatgttctaataaactatcttctcaggtatcaactatataaggtcacgactgaccgctaattgacaggcaatttatcggcaccagcaatttacattaaaaatagtgggcttggagatattttcaaatatgtttactatgagttaagttgaaaaataaaaaccactataatcagtaaggatttaaaaataagagatccatataaaatgctataagcaaaggaaaatgagaaacatttctggggagacacaagtgagttttattatacttcttcttttaagttttagaactaaagtaatagttgatattcaacccatagaatcatccttcaggggcatacacatctaggtttgaatgcggaaaactgttttattgtttttttttaatttttaggtttctttttcaagaactttcttattaaaacttaaatacttattgaagtgattcatgaaacctcacagaaaggggaattcatgcttgacacattacttaacatgctccatagcttccccactgtagttcatatgcttctgaacatattttacctgggaaataatagtcttattcacacacacacacacacacacacacacacacacatccttccacataaaatgctataagtcccaggaaactgacaaaagcaacattaaaattttgtgcaaaatctaaactccatttctgaattccatctatgaaaatacaacattggttctatttaactaagtgcaaagttttctctctgtttaatatgcataataaacatcatccttaccattatctgtagaataaaagcagcaacgtgttgcttcctgcagtcaccaaatcaagttttttcttcctttctttctagtaacttctgtttcaccagcaagattaggaagaaaataagtcttgagtatttgcctcagtatttcagaccagaagatagtgaaactagcttttagtaaaaagaacaggtctggtattttacaattacttctgcaacccagaggtacctcctagactctggtacctccctcgttctctaagtttcttttagtaatgagactaatttttccagtagtcttgaactccctagatttaactgacatggaaaatgtgactaaaaatttgtggaactgtctagcctccaaccctacacagaatcaactttgttgtaaatgttgaagaacacctcgcaagcagctacatgctcagtttatactcctgcgctacgcagcagagaacaccaaataacagtgcgccatctagttagcaagctgcaatctccatgctagaaggggggacactttcaaaccctgggagttaagaacttgtcagggttcagctgctctaaaggtccaattgtttgtttaaataaaaaaaaatatcgctactgagataatccacatctagtggatatgggaaaatttaggttataatggcactacaaacttttacatctaactttgatttacaagataaaagcaagttttaaattaaaagggctttctgttaatagagcttattattctgaagacgggaatgattttcttcgaaagttgtccctgggtgcatgcctattatctttgcttttccccttccactaatgagcatttatctaaagagcctgttaatcctctgatgtgtgcttctggtcagaggtaacagtttgaataaaaccactaatcactgatcactaaatcactgatcattaatcacactttccagtgcccatgactgggccattttttttcctttaagtctatgcatcacaaacaagaagttcaacattttcgatgcacatatattgtgtggaggttacactatttcatctctagatgtgaataaatactaaatcctgccacagacttggggaaggatgtcaattagaccccagacaggagtttcacaaatgcctaccctacagcatggctttcgctttgaagaaagtagatctaattataagaaaacatgtgttcttcaagaaattcccacatatttgcaatataaacttttctttatttagttttcaccaactccaaatcagggaccactccaatcccctctctccctctatccaaaactctgttaatacttttttaaatttaatttctgctgcacacctccctcacgcccccacccccccaccccccacaccgagggttctttttactttgatcccttgcaacaagtcatacacagggtctttatttcaactgccagatacggaggttctgactcagttcaatgacttacgtattcgacttcctctttcaacatagaaacttaaggttaagagctagaaactaacgcacgcagcaatttattgtatggaagtttaggttcaacgactcacattccctcactttggaaatgaaacgtttagtcttgatcctttcagctaaacctgattttgtcagcatccctcttctgctaaagggcaggcactacgtaaagtgaaatactttgtttgcagtgggtgtattgctttcctaagtcaccaccacgaggacagagtattatcataacgcttgcaaacatttcctgatttgccttttctatcaggactaagcattttcgccctagaggagaaggcttactggtgcctttcttaaataatacaaaagggcggattgcgcgctgatcaggtacagtggtcccctcagaccccagaagcttttacccacactccagggaccgtgctcgccccagggaaagctgtaaaaaggcgggggcggggctagagtgataacggtgtagacgggggagtggtggagagggaggggctgggaagagagggcaataaagatgcccagggagccggcgattgcacgagtgtgttgtggggagggtagggggatgcaaagcagagttgctttgtcagcattctaagctcctgaacccttgaggagctcaagccgttaatcaaacacttactggcctgcagaatgacgtaatggacctgtatccagtctttattccttgacacatgtcagagaaggagggaaaaataaaaatcaaacacattctgcagactgacaacgaaatatacaagtagcccgctccagtccccggccttgagcaagcatcaagtgggggcggcaccggtccagggaaagttggggatgggggtgagagtgtggacaaggtctagggctttatctaccagacgccccttaaaaa

SEQ ID NO: 586330 - DNA, 4001 bp, Homo sapiens
cactaaagtttgctcccacacacactagtctagagtgagtggattcttcccctcatgtacttgaaacgcatgaaaatccctgccagacaggttgaccacaatccaaggacagctgaaataactggttctctgacgtcacaccaacctgaacagttcctaatcaaaaagtaagcttgagcaacttttctgttagagcggtggttctcaaatctgtctacatattagagtcacctttaaaaagagcctttaaaaagatcaaaatgtagatcctactgtgaaccaattaaatcacagtctctagagcagtggttcttaaatttctaaatatctgaatcactgaaggagttgttaacacacagattggtggaccccaaacccagtctctgagtcaggggtctggaccagggcctgagaatctgcatttatgacaagttccaaggttttgtgtgtctgtggaccatactttgacaaccactattcaggagttggccctgaagagtagtatttttaaaaaaatgcccttcgtgagagtttaatgtgcagccaagtttgataaccactgtcctacagaaagatgagtctataaaaaaatcatattagttccctaactccgtgtgaaatgtgtttcatcacattaaatcacacacactaatgctcaaccagtttcggcacagactatccatggtttcaaaacgttttggcaacaggaaatgttcactgggatttttgtttaaatgtgtattttttttactgctagtatgaaaactcctcaaaagcatgggctgttttgaatgcacctttgtccccacaggtactacgcacaggggcatggcacatagacatgttcaataactgtagaattgaatctgtttattgtccacccaacaccagccacctggagatggacatacgctctgttgagaaaaggacaaaattgcctgaaattttcatttttcaccaagctgccttgacggcatataaatgtaatcaaaactcctgaatgttgacacaaatattagacaagcaaattatcttctcacagcccattcagtcagtgtgtaaatgtgatattctcaatgggagccaaaacttgagaactagcaccatatgaggaaggtgagaagcctagttcaagcaatccttgcacgggtaatggagggtcacagtttgacaaggtgagcatccctccctgtatgagtgaaatgaaacacctaaggtagtaataaataaataaataaataaataaataaataaataaataaataaataaagctaaaaagcagtataaataacaaaacggaaaacaggatgaaaagggcaacacattacacaaaaatggatccggagaaattaggactgactgaataattacatttaattatcaaaatcttagtggtatagattgattcttacaatacgcaacatgtagattcaatttcaagaccatgttgatgtccatcaaacacattatccaatgtgtatattagtttgccctggctcctaaactttggtaacacaacattgcagcattgcaaaatatatctatctaacatagggtaaatgttaaataaatgtttgttgggtcacattgcacaatcaatgctagtgaataacacttcctaaggttttcaggtagcatgagcaaaaaacatccagtatttgtctattcttttgaggacaataacaaaagaatatcagtagccttgcctagagctttctgcaatgagggaaatgttccatatctgtattgtacaatatggtagctagtagccacatgttgagcaactgaaatgtggctagtatgactgagggtctgaatttttaatttattcaatcttaattaattttaatttaaatagctacacatggctgttgcctaccttactggacctccagaaacagggacgaatgccagagcataaatgctttaggcagtttctgtcattctcataaccgtgtccaaaatctgcctcttgctccactccttggattcatcagatcaaaaataagacaaacttaaaaaatactccagttaatttcctatagaataacaacacagaggcttccaatgtgaaatccacactctttgaaaggccacagactccctcacttttataaacagtcccaaagtaaaagcaatcacaatggccggcagctttagtatttataaatcccagtccttcggacagagggagaggcccttttaaagcccagacctctttagagacttccaattgtgccacccagtggcaatacggttggttgaatttctgactccagcaaaatcctctctggccaaggaagaatcctgcaccgtcaggatgataagcagtaagcagtcaggtaagacagtgacgatgatgggatgggggacctaacctgtccattcacactgtgactttgtcacatgtatttccatcttcagtcaatccatgctttgtcttatagcctttctcagaaggaatataaaacaccagtgatcatcatcttggtgggttattaattgtgtttaagattccagaagattgtctctgaattccttcagccggatgcatttacatttacattacaagaaatgtatctcccactcatcaaattttatatgaaggtgccggatgagtctttgcctttgattaagaatttttttaaatagaacatttagtgagccagaaacatttggtaacatcattttctgaggatttaaaaacacttcaacataaaatcaaacgcagatgtataatttgagagttcatgaatcattagttatgtacatttataattacgctaaacctaaatatttgaaaagccacattagtttctggctattgcagctaattctcgggtaaagaatttgaatggcattctagtattgcattttacctagactacactgttacagaattgtgtgtaggattagttgattttttttcaatttagaatttccactcatgggaaaaatactcaatatgaaatatagctaagcttcttatagatgtaggttccaagaaacaaatgtctaaggaacagaaagttatatagaaactgaaaatagaggaacaacacacactggggcctgtaggaaggtgggtggggaggagggagagcatcaggaagaattgctaatagatgctgggcttaatacctaggtgatgggatgatctgtgtggcaaaccaccatggcactcgtttacctatgtaacaaacctgcacatcctgcacatgtacccctgaaatttaaataaaattcggaaataaaaaaaaaggaactgaaaataaccagttccatacagcattcactgtgattttaaagtaagcagatggcgcacctccggcttccacaactcaagaggccccaagactgtactaagtttggcagagaatcttgctggagctcaagatctaacaaaatgtaactccaggggacattttaaagtgataggagctgcaaatcttccctggcacaaatgcagagagagcaagcttaaacctaagaaaatgacatgaacacaacattggcccacttagcaagcgttgatacttttgttggcagtcctagcagaaagacaaagactgaacaaacacaattacccagattggcactaggtaagtagtgcaaagacctttgttacttcttgaatttttttttatttttttattttattttatttttttgagacagggtctgtttctgtcaccaagactggactgcagtgatgtggtatagtcccagcctccaaatcctgggttcaagtgatcctcctgcctcagcctccagagtagctgggactagaggcccacaccatcaggtctggctatttcctgaggatcttgaagtccttctcagaagggctccgctccagtttctccattgtcatccccagagcctgttctcagcacacaatgggaacctagcacatttgttttttgacagtaaatcagtccttcattgactctaccacttactgtctgtgtgtccttgggcaggccactttctggaggct

SEQ ID NO: 586331 - DNA, 4001 bp, Homo sapiens
catcgtctcaggacccgggaaaaagtcccattgccatgaaggccccgtgagaggaaggctgggctttggcgtcagaaaggccgaggtttaagtgctctccagctgcttacatgctgagtggctgtgggtaagtaactggtctctatcccactccgggatccgcaggagagctaggcgcagggcctgggatgacctcaagggacgctgagaccacagtgttgccctgagaatcctagggcacctctggagcagccagcagaagcttcctccgtctaaccagcttgggcggctggcagcatggaccccagagggacgggctgaggggcaacccttgccccaacacttggatctcctggaaggcacctatctggaaaacaagtgggagagggcaagagagctcaaagcccaagatgtcttgggggcagaggggtggatggtgagccccctgtacaaccttcacccatcccaattgcagtctgcaaagtcactcaaaggactcagcaggtctgggggccatctgcctatcggacactgaccacagctcagcatactacctgcctcccacctctctcctccacctggccaggcccccaggaaggcagggaccctcatgtcctcatgctgtatctgtggcggctggcacaaaagcatagctggcattcactgcgtgctcacaccacaccaagcatgatgctgcttgctttacttgtattacctcaatgttcctcacaacaagcttgttcagtaagcaccgttgtgatcctcattttactgatgaggaaactgaggatttgagtaacctgtccaaggtcacacattaagcagcaaagcagggatctggattggttttgtaggcaattatctgttgaattactgttgaatgtattatcctccttatacgtatagggacactaagccccagagaatggtccccaaagctggtctgtggcagagtcaggacagcgacaagcctcttagcttccacaggcactactttccagattgtgaggcctaggacaggtcaccctaccactctgagcctcagtttccccatctgtaaaatggggagaaggctggaggtggaccactcccaccagcctctcccctacttcttcagctctcttttgatggtcgctctgtgtcccttctccccaccttccatcggtggcccctgactctggacaaaggcacggggtgtggctggatgaagctctgagtcttgagaaacccttggagaggctggttctcccagagcccactctgtccccatcgctcatctggtactgggggctgcctgattccaggcactgagaggaaggatggagacaaggcagcaggggcaggaggtggctctctgcgggtccctgggggtaagggtcagaactaggggtgggctggggaaagaagtcaaggatcttgcaggagagatggaggggggtcatgggggtggggagagaatggataggagacagggaatcttggaccctgaggtagtcaagttctggatgctaggatgtcaccccagaaccctctgcttatccacaggggtctcccagtctcatcctggccagcctcacagtttcatcttcccttcccctgccccctcacccaggcacgggatctccaattcatcatcagacacaaggatccccgatccagcccagccaccaggccctgagaccccctcacccaggcacgggatctccaattcatcatcagacacaaggatccccgatccagcccagccaccaggccctgagacccccgcccctagtcatgagagctgggagctccgtgctcctggcgccccacctcgtggactcccactccctgcacttacgtattggagcggcggtgggaggaggcagagcaggcagaggaggaggtgtgggacgtagaggaggcctgggggccctgagggacccctcatgccagtagtggctgggggttagggactggagcctgctgcccagcacggtggtcacaccctggccagccccaccccacccggccctggaggggaggccaaggtaaggccttgggcatgaggaggtattctccacccacttcttccacagggcagtggtgaccccgccccacagcccacagcctccaggttatttatagctggtcccagacagctgctgctacccagccagccaaggggctatgctctccatccagcctgcagagaaggggttaatgccttctatcggctgccagcattgcccggggctgtagctccccaggtgggagagaggaattgagacaggcaggaggggcctaggctgtggtccctgcttcagcacagggttgggctgccctgggtctcagctgaaccagcactgcctaacacctatctgaggagcttttaacaggtgctaatgcctactgggatgactgagatgggagtgtggatgctgggttagatagtactgtatcaatgctacatctgctgattctgatactgtactgtgggtaggtaagagaatgttctcattcttggaaaatacacatttaggattaaaggggcaccatgtttccaacatactttcaaatggttcagaaataaactcagatagatacatagatagaacaagagagcagatggggcaaaatgtaaattgttggtaaatctggaaaaggggtatatggatatgctttggatcattcttccaacttttctgtacgtttgaaattctatcaaaataaaatgctttcaaaaaaaaaaaaaaaaaacccaaccgacagcaaatacagccatggcagggctcacccagagattccaatgaagtagcttgggatggggcccaggtgtctgtctgtatggggcccaggttccatttcaggaaatggttagggatcctgatatcaggtggctgagcagtgctgttcttggcggggacaggttcaacctggggctgggtcagggctcatgaggtgaggtctgttcttccagagcctcagaagcctccttaggagctgttcctgacaggtgggcctggtgcagggggtttaaaagcttaagccacagttgcaccttgcttgttgttaggatctgaggggaaagcatgtgaggaatgtgattagtggggcaccaaactttctcctggagatgcaggcatggtggagagagaccttggaaaactcagtcccgatttaagtaactcagacactctgtgctccttccggtctccctatctaagacatgggacacttttctgtccttgagtgcttcctccccaccctcagccccttcctccaggcagccttcctggctgttccaggtcccacctccctctcctgtgaaatctcacaggtctgagtctgaagctctgcctcgctggtgtggactgttctccaagctctgggaggataaggatgaatgtggatgtgccccaaccttcctctccttgttttttcttctcccttccctcctattttgtacagagcttagtctcagtggtacagggaaatctttataggaaaaatggaggaagaattgatcggattcctcatttatttgaaggtggcagggtgaaaaccctatcccaagtcctggggcaggatttggctttcccggacccagccagatgggcttggtcagagagggctccttgtagaaggtggatacctcctacaaaacatcataagctgggaaggactttgagagctgggcagactctgaaagatggctgggacagttcccttcagcagccttcagctgtaggtctccaggggccagcctaatagcaggcaccaagagcagaggccagcctcagagtgtgcagggacatgggaaggagaggcatggggaacccatgagacctggcatccataactgatgggaggtgggacatggcacaggtgctgggccagctcaggggagtgagagggcacttcctgggaaggtactgcaggagcaccttgaagggtttaagcagatggaggaatgggagacccttactgcaaatggggaagtctcctgagcagaagcaggg

SEQ ID NO: 586332 - DNA, 4001 bp, Homo sapiens
tgccccaccccacacagctcacggaatcctaaaaatacagttttataaggtcaggactaggaaggcacagggaaatcattccttctgcttgcacacctcctagcttggggatcttacttccttctagggagatctgttttaatcatggatgggaagcatgtgctccctgggcccaccagagccctcagctggtgcagccaggagagtgcggcttggcatcaggtgcaggtacatctctcttgccttctaaccatctctcatggcaaagccctcagcctcagcttctgaaagcttgtgtgtgtgtgtgtgtgtgtgtgtgtgtgtgtgtgtatgtgtggtggaggtggagctgggctaccaatcagacacagacactctgaggatgtttccaggatgagaggcttcagacaaacaatccagatagggtctcagcgtgcttgacaactggggtccggctggagatatcaggggggttctaggtggggcagtgattgctgcccccacagcctcccgcagaccacacacctggctcccatcccatgttccacagggcacagacaggcacctacccacacgcacacacccagaacccacactgaacgaccccacctggaggctgtgtaactccagcaacctctactgcccttttccccagagcctcaagccagtccatgatttgccaggaggaaggcaggcacaggttgttctccttgagagatggtgttggggtgctgattcagacaccactcattatgggggcgcaggaataatgctgcccacagcccctgactcagcccagcaggtcagtcctgggacctcggattagggaagatgcaacaccccgcaccctctggcttagcagaacctacgcctgcatgtcctccccacgaaacatgcgctcgccccagccctcctgcctcctaccctcctcctcccctctggtagtagggtctggtcactgcactcactctgggggatttgggacttagcatatccgccctcctgggataggtccccctcctgggcaggggaagcattgtctaaacaatgaagccctaatggggaacttcaggcaacgggaacctacaatgagggaaggaggtttacactccaagaggaggaagtatttccttctcccctttttgggctgtcaccgcatggagcacgggaattgtgggcaaatcactggcttactgagattagacgctgtattgggggtagaagcagaaggcgcgcccccaacactgtaaggggtccttaacgcccgcggtccgcggtaccgcggccgtcagcagctttgtaccgctgggtccggaatcctctttactccctaaaccgccttctcaggaggccggtgtagagcaggcagcgagggccgggggcactcacgggtcgtgttgtacttgacgccgttgaagtactcggggcacggcctctccacgagggctccggcagcgctgcggggccagcacgttccgatctggtccaaggtcgtgttgcagtaggagtagggacctggcggcgggagagagcgcagtagggctcagaggggcccgcagggacgcggggctctcggagcgcggggtcaggggcgcacccagcgcgcgagagaaggagcccgcgcagcctccgaccgctcgcctcccgcctaccctcggggtccaggggtggcccccagccgtccaagagcagctcttcagccagcgccaggctgcagttggcctccagcaggctgtggagcagtgccgcgtccatcgcgtcccgcagccgcgtgcggagagggagtgggagtgcgcgcccggcgtgactgcgagggagtggacgcgagagtgagcggccgagagggcgcggggtcctggcccccgccagcccagccccgatctcccgggcagcctttgggcgccacctccggtcgcccagagctgtcaagtggggaccttcccggagaggagccgccgagtgcacggagctgcgggtacagccgctccgccgcggccaatggctgcgccggggggcggggccgggcggctcctctcggaggggctcagtctccagcccccgggccctccaccctgcccaaagtacggcttctcagttcgcagctctcttccactcgcggcgtccagaggagggcggtgggctggagagcgtgggcctggggtgacggaatgctctgtgcggggatcgcaggcccccgagctgcagggggcagcaaagcgcgcccacctgcccgcctgcccgaggagaacaccgcagctctgctaatcgagggacagccgcaacccaaagttcggcagctttccgcctgagcttcccctccctgagcgaggacactggagggaggcagagacggagagcccatgggcagatctgcatcctccaaaagcctccatagcctctgggaaggaaatgtatcgaggaggcctggagggaagcagggagacacccatgagtctaatgagatcaagtggcctgagtgggttgaagtccttggatcagaccgtggaagctggaatggagagagatttcggaggggcagccagacctggtgaggaggaactggagtgggtggctggttttaagtaggagcccagaggcagggataacatcaggtctcctgcttgagtgactgggtggccatttaatcagatggagtaagtctaggggagaaattggctgaaattatctggaaggctttatacacccagttgttagtgccttgggcaccagaaagaataaaggaagaagtgagaatgtgtctctcttcctcaaggcttgggcagggcttcacctgaccctggtttccacaccagtagcggggcaggggcggggagaatcaggccccacagcaggtgtggaggagctggaaacctccccagagaacttgcccaggccccccaccccaccctggcccagaatgcctccttggtgatctgctgtggctgcaccctcagagtgcccagggcgggcctgctgtgtctgccagctgagtggggcattgggctcgggaagcagggcctggggtaaggcatgcttccactcaggctgcattttggtccagcctctgactctgctctccctgccatggtaccccaggcaggatgcttgccctctcttctggagctttctccatcagtgaaatcttccccgaggcccctctcagctctgagactctctggttctgagttatgagacggagagtctggggaagacatacatgtgtgttgtgtgttgtttgtttctatctttagagggcaaggagagctggaacctagtctcagaaaccagtcctgttcccctgccatcctccacataaacctaagctgctaggaaaggctgaaaccaccatgaactagcaccatgccctgggcagagagaggcaaagcagcaggcaggctgcttttgtgtgctccgctctcaccagcctccatattaatggtgctgtcactgcccaggcagagcgagtgagaccacactaagaccagggctgagccctggaatctctccagggcctgctgactggcaggaacaagatgctgagcagccagccaggtctaccctctgcctcctgaatggacagtgagagcccaggctcagctctgggcagctgcagaggtagaggttccttggtcttcatattatccagtgccaggagcaggggaggacctaggcagagtcctaccctccgctcctagactgagccctgttacccagggtcccacacaggccagagggtggctggccaggtcagcccatgtattcacagggcaatagtgtccctcatatacaagggatagcccttcacacagcacggtgcagcacagaggaagggagaaatcctaagccaagcttaagttattatccttgttcattactgcagccaccacctaggtggtgcctaaagcacctatagatgcagctatgtcaagaggtggtgtgctcccaatgaccagaggccagggacttctcatctcatgcagatttctgcagaacagagggtt

SEQ ID NO: 586333 - DNA, 4001 bp, Homo sapiens
gtaccactaatataaagagataatttgaaaatgagaaataataattaactcaaagttctttagcttctttctatctattgactttggctgcacaccattttgaccatccataaaaatgggtttgtacctaatggaaatgtagatctggatccaagtacagactctgccactttctagccatgtgcccctagggcaaccaactttaagtgaatttccttatcttagagtggttaatcatacaattcaataaagtcagaatttgttttcaatgcctgtgaaagcacattataaaaacaaaataatcctgcctgaaaccaccatattgtggtaggcacaattactatgaatggcccccaagattccacccctgctaatccccagaacctgcgaatatggtgagatcattactcctgtgattgtgatattctctacagaactgaccttaaaatagggatattatcgaattggaactaatctaatcacttgagtccataagagcaaagagctttctctggccagtggcagacaagtaagactgctttaatgcttgagaaggatttgtggtgtctttgaagatgcagatggccttaaagaactgaaagaggctcaggctgacaaacagtaaggatatagaaatgtcagtgtgaattctaccaacaatctgaaatagcctggaggtggattctcccctagagcctccagaaaagaatccaaatctacagaaaccttggtttcggttttgtgaaattctaagccaagtactcagctaagcccacccaaacttcacatttacagaagctatgagataatacatttgtgttgttttaattgttgcatttgtgtaattggttaaggcagcaatagaagactagtacacacatacagagaagataagctattctgtttacctctgtgccacttaatagactctagaaaactggaagcaagagtattagttacatacccactatagtgcttaacccaccaaccggtacacattaaaaatataaattattggattctttcttgaagagttttcttgaattctcaaccacaaagattaagttaaataagatggttccaatagcactaagaaaatgattatgctagatttaattagaattgactttctgggggcaattagatatgaattcacagaaagtggaaaagaaccacgaacaatacgtgaaggaattgtcacataccagtacaccaagaagatgaactgcttgagactgccaggagcctgctgcaacaattgttttgagatcacagggaactggactaagtcggtgactgtgggaagaaagaaacaagcttaacaaatatttaagagggaaaaagaaatgaacaagctagtgaaagaaggtggaatgcagacaaactaggagttgggagttcccaagacaaacttttcgtgaatcactgcaaacacacgcaaatagtccacctgctagagagcaggagtaaatgatcatacaattaagtaggtttcagacaagtacaccttccattagacgggttcaaagggtagaggatacgttttcagtggctgggtaacaggttcgtcgcagagtggcaaggggtagaagcaggagcagagggcaatgagagctcggaggctcttcccaccaacccaagagcaactctgcactcaagaggccatcaagtgagagaaatctaagcactacaacggagcagccccgcggcccaaccttgagggtacccctgagaccccagcaggcgagatgcttgatgacactactcccccaccaaatccaggcacctttgcggttctgcacgacttaactttcccccgcccccgagttgaaggattaggggagggagggaatgctgcttcaacggacctgtccgtcctcaccgcccgcgcctcgccgcctctgccgcagcctcagcctgcagcagcaccggctcgctcccccttgggcctcaaaggtgcgggaattggactgaaggccgctagggtcccgccccgcattcgccggggaacaggattggatagaaagccgcgagggtcccgcccctcactttccggggaacgggactggacggacagctgcaagggtcccgccccgtgcctgacgtcgggggcgagccgggcctgcgcggtagtgggacccgaccctgtctccagtgggcgtcttgggccccggctctattctgggctgcgggcctgggaagggctcgccgggtgccaaatgagctgtcctaactctgcggggctgcagcttcctgcatgatgctggggagcttggcgcctgacccaggatctagaaggcactctgggcaggccgcgctccgcccacgaaggtacccaaccctctgggatagatgcaggaagcgatggttaagacccattttcacccaacttctcgccgcaggtctggcttaccacacgctcctccccattcccagtgagccgctttttgcagcaccaggcgaacacttacaccagtgctttgtaaaggaatcttattgtccaccccgtgtcttggcaaaagaacagtgatcacacagattcctacttgggctctttcctttaatcttcggaggctgagtttgcccaactcaggtatgccgcagcacactacatcatctcgggtctccttgctcttctgcagctcttcattgctacccaagttatttgaataccccagggatgcttacccccgggcctatctgatgtcttttactgttgtgccaagaaatggaatctttaaccagagtggagctacccaagttctagaagatcataatgtgattgacttagtttcacagattaattcattttgcttttaccttctgaaataaaatatactgtttcatttttaattttaaatacactgtttcatttttttgtggaaggaaagaccaaatgtttacactgactctgaactagttatcaaagataaagatttagatttcaaattaacatgtcatgacaggccccattcctttgtctgtcgtttctaactcctttagcagtaaagtttgacctgaagggaagtgaggctatgtgtaactgaatgttccctttgtgtaaatattcataagttttctacagaaatattgtgtttgattacagtacagcttgctggaagtgtttcataatatatggcagacgtactattctaagaaaagttctgaattttgaaacatatctagccaaaaagattttaaataagggattaggaatttgtagttgtaatttctgaaggtgtgataaagaactttttctttcatatataagtgcgatgctctggatgatgttaaagtttgcttacaagataaagtttttaaattgagtaactaaaaactactcagaaaccttcgttgtattttttttctcctttttagtgagtcttggcatctctttaaaagtttatgcatgtttaatgcctgttggtgcatagaatttagaaccatttcgcttcactctttttcctactcttgttgtttatttcaatggaaacaagatgtttctgtaaagattcctgaattatcggatagacaaaaaggtgtgggagtgaaaaaatgaatggaacacagatttgagtatgtagaaaaaaatcttttaaaatatgttatactgataagcatatgtaccccaaatcaccaaaaacaggtattttaaaatatgtttggcttcaaaatgtgtgatatatattttaatgaaagattccaaattatgttgcattcaggttaaacttgaacgagtttgcatttcttagagtggagcgggagatattggctggtaaggaagatgttttaggcacttgaagtatttgtgatagcaagaagttgttccaagattaaaaattgactatgagtcaaagtaactttttggaggaaaatttgtaagtagtacaagtggtgataattttttaagttgccattaaaaaaatcttttatttttgttcttctgtagttcttactcagcataccacaaattgcaaaagactttatagataagtctagat

SEQ ID NO: 586334 - DNA, 4001 bp, Homo sapiens
ggagcccatgtggtcactgtggctgttccagcggaagaagtcggggtagtcgccgtgctccaagatgaactgctggccccggaagtcggggtgattgaagcagacccaggctccgctctccacgtggatggagttcactcggttcataaagccccggtcctggaagttgtcacagtccccgaagacctccagcttctgccctgtgaagtgcttgccttcatagagagtgatctagaaagggcaggttacagagctcagggtcaggggcttctctccgtcagcgttggaggctggcgtctgggtcccaacaccctggatggaacccctactcccaggcccccaaaagcccagacctgctgcacacagtaggtgcccaacactatttgccaattgggcaaaagaacgaacagctggcaggctgatgccatacacagctactgttcctccccacccttaggagctcacagtggggcagacaaatttcagcagcgatttggggacaggggtttcccctttgtctaggtgcccatttcaaaatgggctgttttcaacttccactgcatttttaactcattttttaattattaaaacataaagccgataataacattaaaggaggtgttttcaaaagaagaaatttcacccacaaccctctcatggtaacccagcatatattttgcagaaattcgggttcctgggattgggcctccttcactggagaggctgaatgggccgaagccgcgtcagggcctggctcgggattaatgttcgcaaaagagggcttataagtgccaccctgtctctctgtgttttgtaggtcactcctttgggtagcaggcatgtatcagatctggagctccatcaccctgctgggagttcagacatcgtgtcttatagctacgtggcactcacaggttgtccttgtcccgaaacaaaacaaagtgaagcaataacaacccgccagactcatttcctgctgtggaacctaaaatctcaaccatttagtaactctttgggtttcaagaactgtggccctagaagggtcctgccagagtgcagtgatgttccccatcactatggtcgcttgtgcctcaccagtgtctccagttcgctcaaaagaacacgagaattgcccttccaggccccttggagtcaggcgtggccacatgcgttcaccggaaaggaggcagacaccttggcgttctgcaccccagagttactggggccctttgttactgaagcatcacctggcccatgcagactgatacagcaacacagtcacccccagacactctggaatgtggccttggagaccaaaggcttcatgggagtggctaggctaggggcactggagagggcgagggagagccaggtctcccgtccttcctgcaccaggcacggctggtagagggcccctgaaaccttcagggaggtctgggcaccaaagggattcggggctccctcaaatctcaacatttttcagagaaccagccctaagtgtccctgaagagaccctgggaaggaaaagccatagaggccagccttgggcaaagaagccgcagcagtggggcggagggctgtgggacaagccaagcctcccccaccccaaggaagccccagggagtctgaacaccctccctgctcctgactgcagggcgaggggttggaatcccagaaggaaggagtggagatggagaccttcctatccatccacaccagagaggccccaggccagtagcgaggccaccccattttattaagaaattaaaccagcttcccttggatttgtcaccatcaacagtgtgcaccctcctgcatcccctagcacagggggcgaaggcggagccccactcggtttccttggggttgagggacgcactcaccttccccgagcgctgcgccatggtgcgccccgccccttccgcgggtccccgtttacaccgggcagcgccctgctggctcagcgccgccccggacaaaagatttgctgggccggccccggagcgttagtgctgtcgggcgtgctaagcccgaggggccaccaggcggttgggacccgccgcggccaccctgtgccaccgcgagtgcagcccgccctgcccggggtctccctgtgctctccgcgtttagctcccgagcctccttcctccctgagccctcccgcccagcccgcggctgcccctgccctgccctggagtggtggggggaggaggggaggtgtctctctagccctccaacctttcttcccctgcgctgcccctcagccctcacgcccatctccctccctcccaaggcctgttccgagctccccagcccactcccctttctcacctggctgcaggtagtctcgccttggtgccaacttgtttgtctccacgaggatgcaacccaagcttccccggacagacagacagcccttgaccgcccctcccctggctgctctggtctgagctcccaggtccccaccttagacctccggctccaactcacccagctcctgatgcacccccccacaccccacaaaacgccaggccaggtcaggcctccctcctcccgctctcttcctgcctgcctccctccctggcactctccctccctgggtccctctctccttgaagatcctgcctagggtgaccaggtgacccgcgctgccctgagctgggggtacagtgctctgccccttgcctctctgctgcaccaactaagccaccctggacgcccaggatcagtttacagcacaaagcagccccaccgcggagggagagttccccagggcccagaacgagcacttggcagacagcagaggctcagagattgtggagtgagcagagcgaacatggagcccacaggatgtgcagcccccacacggctggggagatgagctgggaacacaggactcatgactcagatggctggggtggtgggggacaggctctgagatcaaaggagagaggggcaggtgctccacaggggcttctgctggaggggagggaggagctttggggaggagtttgggctgctcttccttcaaacagtatatttttatgaccatttcacagatgagacactgaggcccaggaagaggaggttatgtgattcttggggcagaggggtgaccttgcctctgctgtgggaggttttcaaaagtagacagggtacaaaccagaacctgcatgtcacccttgaacccagggacggtcctccctagggacgcccctccctagggacgccgcccagctgcctccactggcgcccttacttgccaagccacacattccaatgtttctctctggacctgggccctggtggggacataaaattaaaaacaaaatctccagccaacccagaaaacttctccacgaaggtagaaggaaaaaaaaacaattttattattgaataaactttaaactggaatgcgatctgcatcacgatctctcccctaagagatcgcaaagatggagagagatctcactcttctgtagccaagcagacacaacccactgcattcatgttttcaggataaaattgctgattttcttgtatctctatgactggaggtgggttttgcaatttggagtcaggtgacagctgaagtcaggcttcttaggaaacggggagggtgggggcacttactccttgatgtcaagactcaaagaggctcccagaggaaacatgactgagttgttagactggcaagaggcttgtttagccattaaaaagatttacacacatttgaaaatgacagagaaggaaattctgcaagaaaagggaggaaagggaagcctcttcccttattttcaacagggaaaaataagccttaaaaaaaggttttattttttagagcagctttaggttcaagttgaattcagcaaaaggtacagcaatttcctgtataccccctgcccctacacacacacacacacacacacacacacacacacacacacacacagagcctcctccacaatcagcgcccccattagagtggtacatttgtcaca

SEQ ID NO: 586335 - DNA, 4001 bp, Homo sapiens
ccatttctgaaggcattgacccatccattttatccaaagaagtcattttaaaacttctgggttctgctgatccagacagtctttcagaattagaataaaatctgtcttccctttgaggaggaagagctgaatcaggatatgattgtcctggtggaggaaacatcatcttacagtcctgttccaccggagatgacagggacccagtgtcagaaggagccctgtgaggatcggttaacctgtcacagcttggttctcctctttcattggtaatctgatggtccaggggattccctgggcctcttgggcctcttcctcctccctccggaagcacaggtgagagtcccagtggatcctccaacaaagtttgaggagagagaaaagctctcgtttcagatgaacgctgacccaatggtgcgggaccattcggggcatgctctctgccaaatgctgtatttgaaacatcaagtgcattaggatctttttctaaaagttcaaatttcaactctgtttcagttaatttttgtttgttgtgagcattttctttccttaaatcactgaggtttctttcagcagtccgagctgccaaccaattatcatgtcctcttttctcgtaggaaataacctgcttttgataaaaatgaacagttctctccaattcttcttcaagatctttggctagctttctataggtctccagctgttcagtggcacggctgagcttttcttccactctagaaagcttctcttcttcctctattcggtaattttcctccactgttaatttcctgtagagtttcatttcattttcttgatagaattcagtcattattttaagtttctgttgaagcttctgattctcactttcaaaatatatgttttctgattgcaaagatgcttgttgagtctgaagatttttaatatgctctgtaagctcttcctttgttttgtccacttcagataactgaataataatgtggtttctttctccttctaagctttttaaagaaacatttaacttagcagcatgaatcagtttcttcaaagctcctttcagaggatcatctaagttagcaccattttcccattgactgttcacttctaattccaggttatcatcatccgttgtgtcttcttcaagcacagcagcctgatctttcatcattggcaagtgtccagtcagggtcttgatgtgattttctttatcattcagaacttgttctgcgtgtactttggagtcttcaaatgttattttctgtttattaagttcactcacttgtcctttccatacttcagcttcttgctgaaaaagctgtttatggcttgtctgaagttgagaattttcattcaaagcatcttttattgctatagcccgtcgttcttcactcattttaaatgtcttgcagatgattttggcttcagctatttgtgatttgagggattttgactcatcttctagagactgtatactttttgaaatatccgccatcaattcatcttgttgagaatgtttagatttctcttcttttaagtctttttctagacagaggatttcatcctcaagttcagaattggacctgttcagcttttcacaggttgcctccaaacttcgtgcttcttctgctgccgccttctcaaagctggcatcctctaaagatgactctacttcatagccttcatactctttttgaataaggctaaacttttcaagtagtttacatttttcttcaattagtccagaaagcgttgcaccaagtttttgctctcttcccacgtaaagccgactcctaaccgatctaaaacttctccacaaaaaaaggagaacaacaaaaaatccaataacagctgcacataccaccagttccgatggaaaaccataaggattctcatctggtctcatactctcaggtagtgctgccacaactctgcgtagctcctccaggaccagccccaggtagggctgaggggtagcaccgggctcctccatagcgtcgaggctgctctggcggtcaccgcagtaacactggccacaacaagcggtggagaacacgcagccttgggtctggaacccgaatgcgcacgtgacaaccaaccggagcggaccactgtggagcgggctgcggggggagctggggaacgcgggcacccacaggcctcacaggcccatgttgtcccccaccacctcccctggccctcttgttacacttcacatcctgaggcagcgctggtctgagcccggcccgccttagttctggcagttttcacatcacatattttgaagctttattttttggtgaatacacttttaaaattgctgtcttcttcatgaattaaacctttgatcattatataatctctctgtttctggtaattttctttgctttatctgatatacatacaggcactcttgctttcctttcattaatgtttgtgtaatatatcttttttcatcctgttaatttggtctgccctgtattggtaaatttcaagtgagtttcttgtacacagcatgcaagaaacatataagaaagggtcatacttttacatacactcttctattatctgtctcttggtagaccattcataattaaatgaattattgatactttagtgcataagcctgacagtttttgttttctctatcaactcttgtgtctctgcttgtttttcatgactttctgtgggttatttgaacatttattttagaattccattttgttattcatagtgtttatgatgtatcttcttttttatagttttctggttgctttttatagcttagtggttgttctagatattcctttatacatacattatcacagtcaattggtgtcatctgtattccagtttgagtgtagtatagcaaccctatgtcattttatgtctctttaccctctcaaatttatagtatcattgtcttacatccatttagattaacaccagacaatgctatgatttttgcttgaaacatcaaacataatttaggaaatcgaaatctatgccaataaataaagtgagcattttagagctgccagaaggaaataggacacgacctgctttgtctttcattttttctttctttcctttatattgatcatagatattatgatgccctatctattaactccaatatctggattatctgtgaatttgtttttaataattgatttattttttatgagtctgtatttcttgcttttttgtgtatgtggtaactttttaaaagtatgctgagtttctggataatatgatatagaaatgcccaaaaattttgaatttttttctggacagatgttatattacctgcagatcaccttgctgctctcaagacctagttttaagctgtgctatggtaatgatattttattttcctcttaggacatatgccttactcctaggatactgtacctctccttagacagaatctttagggtcccaactgggtttctcagttgtttaccaacatttccccatctggctggatctgaaacccagtaggtttccaggaaattttcagtccctgatgatctcttctgctttcccagcagttgctttctactaggtctctcctcttcttagccaactgtcacacagctaaagagtcacggaaggaccaaaatggcatttacacacccatttccagggttctttctctctcccatatggtacattaacccccaattcccaaccagcttattagctttgaactctattttttgcttcttttggttaccaagaccactaacctctggttgggtcacattttcctgtaccaaggtcaggaagatgcctttctggaaaaccctggcaaatgtggtactaacctcatgtgtctcaccttccttaaagatctcatacctgacttggtacaacaatgttcttcaatgcctgctgatatggtttggctgtgtccttactcagatcccatcttgaattgtagctcccataattcccacgtgtagccttgcccacctgaaccatgctgaggacctggtgagaggtaa

SEQ ID NO: 586336 - DNA, 4001 bp, Homo sapiens
tccaaagaagtcattttaaaacttctgggttctgctggtccagacagtctttcagaattagaataaaatctgtcttccctttgtggaggaagagttgaatcaggatatgattgccctggtggaggaaacatcatcctacggtcctgttccaccggagatgacagggacccagtgtcagaaggagccctgtgaggatcgattaacctgtcatagcttggttctcctctttcattggtaatctgatggtccaggggattccctgggctgcttgggcctcttcctcctccccctggaagcacaggtgagagtctgagtggatcctccaacaaagtttgaggagagggaaaagctctcgtttcagatgaaggccgacccaatggtgagggactacatggggaatgctctctgccaaatgctgtatttgaaacatcgagtgcattaggatctttttctaaaagttcaaatttcaactctgtttcagttaatttttgtttgttgtgagcattttctttccttaaatcactgaggtttctttcagcagtccgagctgccaaccaattatcatgtcctcttttctcgtaggaaataacctgcttttgataaaaatgaacagttctctccaattcttcttcaagatctttggctagctttctataggtctccagcccttcagtggcacggctgatcttttcttccactctagaaagcttctcttcttcctctattcggtaattttcctccactgttaatttcctgtagagtttcatttcattttcttgatagaattcagtcattattttaagtttctgttgaagcttctgattctcactttcaaaatatatgttttctgattgcaaagatgcttgttgagtctgaagatttttaatatgctctgtaagctcttcctttgttttgtccacttcagataactgaataataatgtggtttctttctccttctaagctttttaaagaaacatttaacttagcagcatgaatcagtttcttcaaagctcctttcagaggatcatctaagttagcaccattttcccattgactgttcacttctaattccaggttatcatcatccgttgtgtcttcttcaagcacagcagcctgatctttcatcattggcaagtgtccagtcagggtcttgatgtgattttctttatcattcagaacttgttctgcgtgcactttggagtcttcaaatgttattttctgtttattaagttcactcacttctcctttccatacttcagcttcttgctgaaaaagctgtttatggcttgtctgaagttgagaattttcattcaaagcatcttttattgctatagcccgtcgttcttcactcattttaaatgtcttgcagatgattttggcttcagctatttgtgatttgagggattttgactcatcttctagagactgtatactttttgaaatatccgccatcaattcatcttgttgagaatgtttagatttctcttcttttaagtctttttctagacagaggatttcatcctcaagttcagaattggacctgttcagcttttcacaggttgcctccaaacttcgtgcttcttctgctgccgccttctcaaagctggcatcctctaaagatgactctacttcatagccttcatactctttttgaataaggctaaacttttcaagtagtttacatttttcttcaattagtccagaaagcgttgcaccaagtttttgctctcttcccacgtaaagccgactcctaaccgatctaaaacttctccacaaaaaaaggagaacaacaaaaaatccaataacagctgcacataccaccagttccgatggaaaaccataaggattctcatctggtctcatactctcaggtagtgctgccacaactctgcgtagctcctccaggaccagccccaggtagggctgaggggtagcaccaggctcctccatagcgtcgaggctgctctggcggtcaccgcagtaacactggccacaacaagcggtggagaacacgcagccttgggtctggaacccgaatgcgcacgtgacaaccaaccggagcggaccactgtggagcgggctgcggggggagctggggaacgcgggcacccacaggcctcacaggcccatgttgtcccccaccacctcccctggccctcttgttacacttcacatcctgaggcagcgctggtctgagcccggcccgccttagttctggcagttttcacatcacatattttgaagctttattttttggtgaatacacttttaaaattgctgtcttcttcatggattaaacctttgatcattatataatctctggttttggaagttttctttgctttatctgatatgcacacagacactcttgctttcctttcattaatgtttgtgtaatatatcttttttcatcctgttaatttggcctgccctgtattggtaaaattcaagtgagtttcttgtacacagcatacaagaaacatacaagaaagggtcatacttttaaatacactcttctattatctatctcttggtagaccattcataattaaatgaattattgatactttaatgcgtaagcctgacattttttgttttctctatcaattcttgtttctctgcttatttttcatgacttcatgtgggttacttgaacatttgttttagaattccattttgttatttatagtgtttatagtgtatcttcttttttatagtttttttggttgcattttatagcttagtggttgcattttacagcttagtgtatattcatttatataaacattatcacagtcaattggtatcatctttattccagtctgagtgaagtatagcaaccttctgtcatattatgtctctttactctatcaaatttgtagtataattgtcttacatccatttagaataacactagacaatgctatgatttttgcttgaaacatcaaacataatttaggaaattagaatctatgaaaataaagtgagcattttaaagcttccagaaagaaatctgacacaacctgttttgtctttcattttttctttctttcctttatattcatcatagatgttatgatgccctatctgttaactccaatatctggattatctatgagtttgtttttaataactgatttatttcttatcagtctgttttacttgcttttttgtatatttggtattttttttaaagtatgctgaatttatggataatatgatatagaactactcaagaattttgaattttttttctgggcagaatttgtaattacttgcagatcatcttgctgctctcaagacctagttttaagctgtgttatggtaattatattttattttcctcttagaacatatgcctcactcctgggatactgcacctctcctaagagaatttttagagtcccaactgagtttctcagttgtttgccaacatttccccatttggctggatctgaactccagtagctttccaggaagttttcagtccctgatgatctcttctgctttctgtatcccagcagtttctttctccaaggtctcccctcttcttagccaactgtcacatagctaaggagtcacagaaggaccaaaatggcatgtatacacccatttctaggttctttctctctcccatatggtacattgacccccaattcctaaccaatttagcagctttgaactctattcattgcttcttttggttcccaagaccactaacccctggttgggtcccattttcctgtaccaaggtcaggaagatgcctttctggaaaatcctggcaaatgtggtactaacctcatgtgcctcaccttccttaaagatctcatacctgacttgctacaacaatgttcttcaatgcctgctgatatggtttggctgtgtccttacgcagatcccatcttgaattgtagcttgcataattcccacatgtagccagcccacctgaaccatgctcagcagctggtgagaggtaattgaatcatgggggtgggtct

SEQ ID NO: 586337 - DNA, 4001 bp, Homo sapiens
ccaaagaagtcattttaaaacttctgggttctgctggtccagacagtctttcagaattagaataaaatctgtcttccctttgtggaggaagagttgaatcaggatatgattgccctggtggaggaaacatcatcctacggtcctgttccaccggagatgacagggacccagtgtcagaaggagccctgtgaggatcgattaacctgtcatagcttggttctcctctttcattggtaatctgatggtccaggggattccctgggctgcttgggcctcttcctcctccccctggaagcacaggtgagagtctgagtggatcctccaacaaagtttgaggagagggaaaagctctcgtttcagatgaaggccgacccaatggtgagggactacatggggaatgctctctgccaaatgctgtatttgaaacatcgagtgcattaggatctttttctaaaagttcaaatttcaactctgtttcagttaatttttgtttgttgtgagcattttctttccttaaatcactgaggtttctttcagcagtccgagctgccaaccaattatcatgtcctcttttctcgtaggaaataacctgcttttgataaaaatgaacagttctctccaattcttcttcaagatctttggctagctttctataggtctccagcccttcagtggcacggctgatcttttcttccactctagaaagcttctcttcttcctctattcggtaattttcctccactgttaatttcctgtagagtttcatttcattttcttgatagaattcagtcattattttaagtttctgttgaagcttctgattctcactttcaaaatatatgttttctgattgcaaagatgcttgttgagtctgaagatttttaatatgctctgtaagctcttcctttgttttgtccacttcagataactgaataataatgtggtttctttctccttctaagctttttaaagaaacatttaacttagcagcatgaatcagtttcttcaaagctcctttcagaggatcatctaagttagcaccattttcccattgactgttcacttctaattccaggttatcatcatccgttgtgtcttcttcaagcacagcagcctgatctttcatcattggcaagtgtccagtcagggtcttgatgtgattttctttatcattcagaacttgttctgcgtgcactttggagtcttcaaatgttattttctgtttattaagttcactcacttgtcctttccatacttcagcttcttgctgaaaaagctgtttatggcttgtctgaagttgagaattttcattcaaagcatcttttattgctatagcccgtcgttcttcactcattttaaatgtcttgcagatgattttggcttcagctatttgtgatttgagggattttgactcatcttctagagactgtatactttttgaaatatccgccatcaattcatcttgttgagaatgtttagatttctcttcttttaagtctttttctagacagaggatttcatcctcaagttcagaattggacctgttcagcttttcacaggttgcctccaaacttcgtgcttcttctgctgccgccttctcaaagctggcatcctctaaagatgactctacttcatagccttcatactctttttgaataaggctaaacttttcaagtagtttacatttttcttcaattagtccagaaagcgttgcaccaagtttttgctctcttcccacgtaaagccgactcctaaccgatctaaaacttctccacaaaaaaaggagaacaacaaaaaatccaataacagctgcacataccaccagttccgatggaaaaccataaggattctcatctggtctcatactctcaggtagtgctgccacaactctgcgtagctcctccaggaccagccccaggtagggctgaggggtagcaccaggctcctccatagcgtcgaggctgctctggcggtcaccgcagtaacactggccacaacaagcggtggagaacacgcagccttgggtctggaacccgaatgcgcacgtgacaaccaaccggagcggaccactgtggagcgggctgcggggggagctggggaacgcgggcacccacaggcctcacaggcccatgttgtcccccaccacctcccctggccctcttgttacacttcacatcctgaggcagcgctggtctgagcccggcccgccttagttctggcagttttcacatcacatattttgaagctttattttttggtgaatacacttttaaaattgctgtcttcttcatggattaaacctttgatcattatataatctctggttttggtagttttctttgctttatctgatatgcacacagacactcttgctttcctttcattaatgtttgtgtaatatatcttttttcatcctgttaatttggcctgccctgtattggtaaaattcaagtgagtttcttgtacacagcatacaagaaacatataagaaagggtcatacttttaaatacactcttctattatctatctcttggtagaccattcataattaaatgaattattgatactttaatgcgtaagcctgacattttttgttttctctatcaattcttgtttctctgcttatttttcatgacttcatgtgggttacttgaacatttgttttagaattccattttgttatttatagtgtttatagtgtatcttcttttttatagtttttttggttgcattttatagcttagtggttgcattttacagcttagtgtatattcatttatataaacattatcacagtcaattggtatcatctttattccagtctgagtgaagtatagcaaccttctgtcatattatgtctctttactctatcaaatttgtagtataattgtcttacatccatttagaataacactagacaatgctatgatttttgcttgaaacatcaaacataatttaggaaattagaatctatgaaaataaagtgagcattttaaagcttccagaaagaaatctgacacaacctgttttgtctttcattttttctttctttcctttatattcatcatagatgttatgatgccctatctgttaactccaatatctggattatctatgagtttgtttttaataactgatttatttcttatcagtctgttttacttgcttttttgtatatttggtattttttttaaagtatgctgaatttatggataatatgatatagaactactcaagaattttgaattttttttctgggcagaatttgtaattacttgcagatcatcttgctgctctcaagatctagttttaagctgtgttatggtaattatattttattttcctcttagaacatatgcctcactcctgggatactgcatctctcctaagagaatttttagagtcccaactgagtttctcagttgtttgccaacatttccccatttggctggatctgaactccagtagctttccaggaagttttcagtccctgatgatctcttctgctttctgtatcccagcagtttctttctccaaggtctcccctcttcttagccaactgtcacatagctaaggagtcacagaaggaccaaaatggcatgtatacacccatttctaggttctttctctctcccatatggtacattgacccccaattcctaaccaatttagcagctttgaactctattcattgcttcttttggttcccaagaccattaacccctggttgggtcccattttcctgtaccaaggtcaggaagatgcctttctggaaaatcctggcaaatgtggtactaacctcatgtgcctcaccttccttaaagatctcatacctgacttgctacaacaatgttcttcaatgcctgctgatatggtttggctgtgtccttacgcagatcccatcttgaattgtagcttgcataattcccacatgtagccagcccacctgaaccatgctcagcagctggtgagaggtaattgaatcatgggggtgggtctt

SEQ ID NO: 586338 - DNA, 4001 bp, Homo sapiens
cagtctttcagaattagaataaaatctgtcttccctttgaggaggaagagctgaatcaggatatgattgtcctggtggaggaaacatcatcttacagtcctgttccaccggagatgacagggacccagtgtcagaaggagccctgtgaggatcggttaacctgtcacagcttggttctcctctttcattggtaatctgatggtccaggggattccctgggcctcttgggcctcttcctcctccctccggaagcacaggtgagagtcccagtggatcctccaacaaagtttgaggagagagaaaagctctcgtttcagatgaacgctgacccaatggtgcgggaccattcggggcatgctctctgccaaatgctgtatttgaaacatcaagtgcattaggatctttttctaaaagttcaaatttcaactctgtttcagttaatttttgtttgttgtgagcattttctttccttaaatcactgaggtttctttcagcagtccgagctgccaaccaattatcatgtcctcttttctcgtaggaaataacctgcttttgataaaaatgaacagttctctccaattcttcttcaagatctttggctagctttctataggtctccagctgttcagtggcacggctgagcttttcttccactttagaaagcttctcttcttcctctattcggtaattttcctccactgttaatttcctatagagtttcatttcatcttcttgatagaattcagtcattattttaagtttctgttgaagcttctgattctcactttcaaaatatatgttttctgattgcaaagattcttgttgagtctgaagatttttaatatgctctgtaagctcttcctttgttttgtccacttcagataactgaataataatgtggtttctttctccttctaagctttttaaagaaacatttaacttagcagcatgaatcagtttcttcaaagctcctttcagaggatcatctaagttagcaccattttcccattgactgttcacttctaattccaggttatcatcatccgttgtgtcttcttcaagcacagcagcctgatctttcatcattggcaagtgtccagtcagggtcttgatgtgattttctttatcattcagaacttgttctgcgtgtactttggagtcttcaaatgttattttctgtttattaagttcactcacttctcctttccatacttcagcttcttgctgaaaaagctgtttatggcttgtctgaagttgagaattttcattcaaagcatcttttattgctatagcccgtcgttcttcactcattttaaatgtcttgcagatgattttggcttcagctatttgtgatttgagggattttgactcatcttctagagactgtatactttttgaaatatccgccatcaattcatcttgttgagaatgtttagatttctcttcttttaagtctttttctagacagaggatttcatcctcaagttcagaattggacctgttcagcttttcacaggttgcctccaaacttcgtgcttcttctgctgccgccttctcaaagctggcatcctctaaagatgactctacttcatagccttcatactctttttgaataaggctaaacttttcaagtagtttacatttttcttcaattagtccagaaagcgttgcaccaagtttttgctctcttcccacgtaaagccgactcctaaccgatctaaaacttctccacaaaaaaaggagaacaacaaaaaatccaataacagctgcacataccaccagttccgatggaaaaccataaggattctcatctggtctcatactctcaggtagtgctgccacaactctgcgtagctcctccaggaccagccccaggtagggctgaggggtagcaccaggctcctccatagcgtcgaggctgctctggcggtcaccgcagtaacactggccacaacaagcggtggagaacacgcagccttgggtctggaacccgaatgcgcacgtgacaaccaaccggagcggaccactgtggagcgggctgcggggggagctggggaacgcgggcacccacaggcctcacaggcccatgttgtcccccaccacctcccctggccctcttgttacacttcacatcctgaggcagcgctggtctgagcccggcccgccttagttctggcagttttcacatcacatattttgaagctttattttttggtgaatacacttttaaaattgctgtcttcttcatgaattaaacctttgatcattatataatctgtttctggtaattttctttgctttatctgatatacatacaggcactcttgctttcctttcattaatgtttgtgtaatatatcttttttcatcctgttaatttggcctgccctgtattggtaaatttcaagtgagtttcttgtacacagcatgcaagaaacatataagaaagggtcatacttttacatacactcttctattatctgtctcttggtagaccattcataattaaatgaattattgatactttagtgcataagcctgacagtttttgttttctctatcaactcttgtgtctctgcttgtttttcatgactttctgtgggttatttgaacatttattttagaattccattttgttattcatagtgtttatgatgtatcttcttttttatagttttctggttgctttttatagcttagtggttgttctagatattcctttatacatacattatcacagtcaattggtgtcatctgtattccagtttgagtgtagtatagcaaccctgtgtcattttatgtctctttaccctctcaaatttatagtatcattgtcttacatccatttagattaacaccagacaatgctatgatttttgcttgaaacatcaaacataatttaggaaatcgaaatctatgccaataaataaagtgagcattttagagctgccagaaggaaataggacacgacctgctttgtctttcattttttctttctttcctttatattgatcatagatattatgatgccctatctattaactccaatatctggattatctgtgaatttgtttttaataattgatttattttttatgagtctgtatttcttgcttttttgtgtatgtggtaactttttaaaagtatgctgagtttctggataatatgatatagaaatgcccaaaaattttgaatttttttctggacagatgttatattacctgcagatcaccttgctgctctcaagacctagttttaagctgtgctatggtaatgatattttattttcctcttaggacatatgccttactcctaggatactgtacctctccttagacagaatctttagggtcccaactgggtttctcagttgtttaccaacatttccccatctggctggatctgaaacccagtaggtttccaggaaattttcagtccctgatgatctcttctgctttcccagcagttgctttctactaggtctctcctcttcttagccaactgtcacacagctaaagagtcacggaaggaccaaaatggcatttacacacccatttccagggttctttctctctcccatatggtacattaacccccaattcccaaccagcttattagctttgaactctattttttgcttcttttggttaccaagaccactaacctctggttgggtcccattttcctgtaccaaggtcaggaagatgcctttctggaaaaccctggcaaatgtggtactaacctcatgtgtctcaccttccttaaagatctcatacctgacttggtacaacaatgttcttcaatgcctgctgatatggtttggctgtgtccttacccagatcccatcttgaattgtagctcccataattcccacgtgtagccttgcccacctgaaccatgctgaggacctggtgagaggtaattgagtcatgggggtgggtctttcccatgctgttcttgtgatagtgaataagtctcatgagatctgatggttttacaaag

SEQ ID NO: 586339 - DNA, 4001 bp, Homo sapiens
tttttgtttgttgtgagcattttctttccttaaatcactgaggtttctttcagcagtccgagctgccaaccaattatcatgtcctcttttctcgtaggaaataacctgcttttgataaaaatgaacagttctctccaattcttcttcaagatctttggctagctttctataggtctccagcccttcagtggcacggctgatcttttcttccactctagaaagcttctcttcttcctctattcggtaattttcctccactgttaatttcctgtagagtttcatttcattttcttgatagaattcagtcattattttaagtttctgttgaagcttctgattctcactttcaaaatatatgttttctgattgcaaagatgcttgttgagtctgaagatttttaatatgctctgtaagctcttcctttgttttgtccacttcagataactgaataataatgtggtttctttctccttctaagctttttaaagaaacatttaacttagcagcatgaatcagtttcttcaaagctcctttcagaggatcatctaagttagcaccattttcccattgactgttcacttctaattccaggttatcatcatccgttgtgtcttcttcaagcacagcagcctgatctttcatcattggcaagtgtccagtcagggtcttgatgtgattttctttatcattcagaacttgttctgcgtgcactttggagtcttcaaatgttattttctgtttattaagttcactcacttctcctttccatacttcagcttcttgctgaaaaagctgtttatggcttgtctgaagttgagaattttcattcaaagcatcttttattgctatagcccgtcgttcttcactcattttaaatgtcttgcagatgattttggcttcagctatttgtgatttgagggattttgactcatcttctagagactgtatactttttgaaatatccgccatcaattcatcttgttgagaatgtttagatttctcttcttttaagtctttttctagacagaggatttcatcctcaagttcagaattggacctgttcagcttttcacaggttgcctccaaacttcgtgcttcttctgctgccgccttctcaaagctggcatcctctaaagatgactctacttcatagccttcatactctttttgaataaggctaaacttttcaagtagtttacatttttcttcaattagtccagaaagcgttgcaccaagtttttgctctcttcccacgtaaagccgactcctaaccgatctaaaacttctccacaaaaaaaggagaacaacaaaaaatccaataacagctgcacataccaccagttccgatggaaaaccataaggattctcatctggtctcatactctcaggtagtgctgccacaactctgcgtagctcctccaggaccagccccaggtagggctgaggggtagcaccaggctcctccatagcgtcgaggctgctctggcggtcaccgcagtaacactggccacaacaagcggtggagaacacgcagccttgggtctggaacccgaatgcgcacgtgacaaccaaccggagcggaccactgtggagcgggctgcggggggagctggggaacgcgggcacccacaggcctcacaggcccatgttgtcccccaccacctcccctggccctcttgttacacttcacatcctgaggcagcgctggtctgagcccggcccgccttagttctggcagttttcacatcacatattttgaagctttattttttggtgaatacacttttaaaattgctgtcttcttcatggattaaacctttgatcattatataatctctggttttggaagttttctttgctttatctgatatgcacacagacactcttgctttcctttcattaatgtttgtgtaatatatcttttttcatcctgttaatttggcctgccctgtattggtaaaattcaagtgagtttcttgtacacagcatacaagaaacatacaagaaagggtcatacttttaaatacactcttctattatctatctcttggtagaccattcataattaaatgaattattgatactttaatgcgtaagcctgacattttttgttttctctatcaattcttgtttctctgcttatttttcatgacttcatgtgggttacttgaacatttgttttagaattccattttgttatttatagtgtttatagtgtatcttcttttttatagtttttttggttgcattttatagcttagtggttgcattttacagcttagtgtatattcatttatataaacattatcacagtcaattggtatcatctttattccagtctgagtgaagtatagcaaccttctgtcatattatgtctctttactctatcaaatttgtagtataattgtcttacatccatttagaataacactagacaatgctatgatttttgcttgaaacatcaaacataatttaggaaattagaatctatgaaaataaagtgagcattttaaagcttccagaaagaaatctgacacaacctgttttgtctttcattttttctttctttcctttatattcatcatagatgttatgatgccctatctgttaactccaatatctggattatctatgagtttgtttttaataactgatttatttcttatcagtctgttttacttgcttttttgtatatttggtattttttttaaagtatgctgaatttatggataatatgatatagaactactcaagaattttgaattttttttctgggcagaatttgtaattacttgcagatcatcttgctgctctcaagacctagttttaagctgtgttatggtaattatattttattttcctcttagaacatatgcctcactcctgggatactgcacctctcctaagagaatttttagagtcccaactgagtttctcagttgtttgccaacatttccccatttggctggatctgaactccagtagctttccaggaagttttcagtccctgatgatctcttctgctttctgtatcccagcagtttctttctccaaggtctcccctcttcttagccaactgtcacatagctaaggagtcacagaaggaccaaaatggcatgtatacacccatttctaggttctttctctctcccatatggtacattgacccccaattcctaaccaatttagcagctttgaactctattcattgcttcttttggttcccaagaccactaacccctggttgggtcccattttcctgtaccaaggtcaggaagatgcctttctggaaaatcctggcaaatgtggtactaacctcatgtgcctcaccttccttaaagatctcatacctgacttgctacaacaatgttcttcaatgcctgctgatatggtttggctgtgtccttacgcagatcccatcttgaattgtagcttgcataattcccacatgtagccagcccacctgaaccatgctcagcagctggtgagaggtaattgaatcatgggggtgggtctttcccatgctgttgttgtgatagtgaataagtctcatgagatctgatggttttacaaaggggagctcccctgcacatgccctctctcttgtctgccatgtaagatgtgcctttgcttttcctttgccttctatcatgattgtgagttctccccagccatgtggaactgtgagttcactaaacctctttcttttataaattacccagtcttgggtatgtctttattagcagcatgagaacagactaatacacctgccaagaattttttctatattttggccagattgtatagttttttatggtgggagggtgaatctgacacaagctatttggtgtcaagtagccaagtcacatactaatttatttttaatgtaaagctatacaaccttctttctatacctaaatttttaattaaaatataataattaaaatattactaaaaatttcttaatgattttatttcatggtgaaagagactcagtctgg

SEQ ID NO: 586340 - DNA, 4001 bp, Homo sapiens
ttttgtttgttgtgagcattttctttccttaaatcactgaggtttctttcagcagtccgagctgccaaccaattatcatgtcctcttttctcgtaggaaataacctgcttttgataaaaatgaacagttctctccaattcttcttcaagatctttggctagctttctataggtctccagcccttcagtggcacggctgatcttttcttccactctagaaagcttctcttcttcctctattcggtaattttcctccactgttaatttcctgtagagtttcatttcattttcttgatagaattcagtcattattttaagtttctgttgaagcttctgattctcactttcaaaatatatgttttctgattgcaaagatgcttgttgagtctgaagatttttaatatgctctgtaagctcttcctttgttttgtccacttcagataactgaataataatgtggtttctttctccttctaagctttttaaagaaacatttaacttagcagcatgaatcagtttcttcaaagctcctttcagaggatcatctaagttagcaccattttcccattgactgttcacttctaattccaggttatcatcatccgttgtgtcttcttcaagcacagcagcctgatctttcatcattggcaagtgtccagtcagggtcttgatgtgattttctttatcattcagaacttgttctgcgtgcactttggagtcttcaaatgttattttctgtttattaagttcactcacttgtcctttccatacttcagcttcttgctgaaaaagctgtttatggcttgtctgaagttgagaattttcattcaaagcatcttttattgctatagcccgtcgttcttcactcattttaaatgtcttgcagatgattttggcttcagctatttgtgatttgagggattttgactcatcttctagagactgtatactttttgaaatatccgccatcaattcatcttgttgagaatgtttagatttctcttcttttaagtctttttctagacagaggatttcatcctcaagttcagaattggacctgttcagcttttcacaggttgcctccaaacttcgtgcttcttctgctgccgccttctcaaagctggcatcctctaaagatgactctacttcatagccttcatactctttttgaataaggctaaacttttcaagtagtttacatttttcttcaattagtccagaaagcgttgcaccaagtttttgctctcttcccacgtaaagccgactcctaaccgatctaaaacttctccacaaaaaaaggagaacaacaaaaaatccaataacagctgcacataccaccagttccgatggaaaaccataaggattctcatctggtctcatactctcaggtagtgctgccacaactctgcgtagctcctccaggaccagccccaggtagggctgaggggtagcaccaggctcctccatagcgtcgaggctgctctggcggtcaccgcagtaacactggccacaacaagcggtggagaacacgcagccttgggtctggaacccgaatgcgcacgtgacaaccaaccggagcggaccactgtggagcgggctgcggggggagctggggaacgcgggcacccacaggcctcacaggcccatgttgtcccccaccacctcccctggccctcttgttacacttcacatcctgaggcagcgctggtctgagcccggcccgccttagttctggcagttttcacatcacatattttgaagctttattttttggtgaatacacttttaaaattgctgtcttcttcatggattaaacctttgatcattatataatctctggttttggtagttttctttgctttatctgatatgcacacagacactcttgctttcctttcattaatgtttgtgtaatatatcttttttcatcctgttaatttggcctgccctgtattggtaaaattcaagtgagtttcttgtacacagcatacaagaaacatataagaaagggtcatacttttaaatacactcttctattatctatctcttggtagaccattcataattaaatgaattattgatactttaatgcgtaagcctgacattttttgttttctctatcaattcttgtttctctgcttatttttcatgacttcatgtgggttacttgaacatttgttttagaattccattttgttatttatagtgtttatagtgtatcttcttttttatagtttttttggttgcattttatagcttagtggttgcattttacagcttagtgtatattcatttatataaacattatcacagtcaattggtatcatctttattccagtctgagtgaagtatagcaaccttctgtcatattatgtctctttactctatcaaatttgtagtataattgtcttacatccatttagaataacactagacaatgctatgatttttgcttgaaacatcaaacataatttaggaaattagaatctatgaaaataaagtgagcattttaaagcttccagaaagaaatctgacacaacctgttttgtctttcattttttctttctttcctttatattcatcatagatgttatgatgccctatctgttaactccaatatctggattatctatgagtttgtttttaataactgatttatttcttatcagtctgttttacttgcttttttgtatatttggtattttttttaaagtatgctgaatttatggataatatgatatagaactactcaagaattttgaattttttttctgggcagaatttgtaattacttgcagatcatcttgctgctctcaagatctagttttaagctgtgttatggtaattatattttattttcctcttagaacatatgcctcactcctgggatactgcatctctcctaagagaatttttagagtcccaactgagtttctcagttgtttgccaacatttccccatttggctggatctgaactccagtagctttccaggaagttttcagtccctgatgatctcttctgctttctgtatcccagcagtttctttctccaaggtctcccctcttcttagccaactgtcacatagctaaggagtcacagaaggaccaaaatggcatgtatacacccatttctaggttctttctctctcccatatggtacattgacccccaattcctaaccaatttagcagctttgaactctattcattgcttcttttggttcccaagaccattaacccctggttgggtcccattttcctgtaccaaggtcaggaagatgcctttctggaaaatcctggcaaatgtggtactaacctcatgtgcctcaccttccttaaagatctcatacctgacttgctacaacaatgttcttcaatgcctgctgatatggtttggctgtgtccttacgcagatcccatcttgaattgtagcttgcataattcccacatgtagccagcccacctgaaccatgctcagcagctggtgagaggtaattgaatcatgggggtgggtctttcccatgctgttgttgtgatagtgaataagtctcatgagatctgatggttttacaaaggggagctcccctgcacatgccctctctcttgtctaccatgtaagatgtgcctttgcttttcctttgccttctatcatgattgtgagttctccccagccatgtggaactgtgagttcactaaacctctttcttttataaattacccagtcttgggtatgtctttattagcagcatgagaacagactaatacacctgccaagaattttttctatattttggccagattgtatagttttttatggtgggagggtgaatctgacacaagctatttggtgtcaagtagccaagtcacatactaatttatttttaatgtaaagctatacaaccttctttctatacctaaatttttaattaaaatataataattaaaatattactaaaaatttcttaatgattttatttcatggtgaaagagactcagtctgga

SEQ ID NO: 586341 - DNA, 4001 bp, Homo sapiens
aagggtgaaattatcaaatccccaactatcagcagtgaaaatcagacttgaacattttaaacagaagagagggaacactgaccttgttaacacagaaatctgcctggcgtcctgggttttgtttacgatctaaccaaacaaaactatatatcagctctacagaccatcagtcagatgtttgtgtttgggttaattgtcaggtgattaaaatattgagggtaacagaaacccattctgagtggattaagtaaacaaattcaacctttctggggaacaagaaacacaccacacacacacacacacacacacaccctctttctttttcgtccttccccttcacacacacacacacacacacacacacacaccctctttctttttcctcgtccttccccttcccaccttttggggatgaaggcaccaaatcatttccacttgccagagagccttgtctcaatagctagtttccttactgtgccccacagaggggagctgattcacataagtgggcaggtttcgtttgaaatcttaaagttctcattttctatgcaaagaatggaaactcaattttcccaaaagttcaaatcaaaacttgccagttttacaagtggaaattagcagtcctcctccccgtttctccttccattgccaggctcagctcctctcaccccaagtaccttcctccacatctctcctctccctctccagaaagccctacctccagagggtgggaggaagttaaagcggcccccgctgtttacgcccggccctgccctctcctgcactgattctgctcaggtcttgataggaagaggggggcgtccacgccccgctcgctccatcccaccccatccttcggcgggagcagccagatctggccaagagtgggaggcgctcccagatctgcctttctctgcagctccttgcagctcctgcgaagctgcttcccaaacaccgagaaccttttccacccaggaaatgtgggtccagcccttccccaaagtagaggctggaaaccaccagcgagtctctacaccggaatattaagggggtgaaagtaaggaccagtcaagaatggtagcgcattcggcctctagactccagagaaggagaacaatgtcttgaaaccaggtgcagaacctccacctctcctgagcatcgtctcgggaagaaccaatccatccaccccaccccaatcactaccaccaagtaatggggcagcaggctgctaggacctaaagcgctggcctcagcggcagcagcgcccacatctggacacggccctctcccagtgggcctcccgaaggcacaggaccagatgcacacaatgggcatccccacacctgctgggcgatggcccacctcccccaagctgctctcccgggtccgctgagcggtaccaggcacccccgagacacgcgctggcaaccacgcgcgcagcgagaggtgaacaatggggggtcaaattcgccaggaaacacgtcccagccttctcccccggccagaagcgaccgcagcggagggagtgggcataggggtcgcactggacgcagacagggagctgggagaaccgggcgacccggggccgcttcccgtggggcgcggaagggacaggagggatccccagccagggtggccgctccgctcccccccgcggcctccgccgtgtgggcatcccgaggaaggggggccccgatgaaggggcaccggagagtcccgggcttacggaacgccccgggggtgcgaagtcgggtccggctgggaccccggcgccgcccccggcccgcgtctacactagccccgcgcccgccccgggaactcggttaccgccgcctccgccgcggcccccgccgcgtcctccggggcccgggacaagtcgggctcgcagctcgcgccgtccgtcgccatcttcctgctctagcggatccgaatgcgagctcggagccgcggctccggactcagccgtctccgcgcgggcggcacttaacccgctgctgtccgggacgcgggcgcctggagccgggagccgggagccgcggcactccctccgcccctcgccaccgccctcgccgcttaacccgctgcgcgccggagcgccccgcctcggtcccgccccgcgccccgcgtcccgcgcccggtggcgccagccgcgggctcgtggaggtgcgagaaatgggcgcacgacctggctccgctgcggccctgcgcggggactggggatcaaagaccacggaagaggtgaaggcagaaagcgcccgaggagcgttgcattccgcagaaccccaaccaagccggagaaatccgtgcacagaccagattaaatgtcaggcctcctgaatctgaattctctgaaagatcagggaaaatcctacacttcagctccctctatcccaccgcgaggaatcacacagggcacccctttcttcttaaattgctctttcttaaatttcattgccgccagggtgtttttatcctccctatatatatacacacctggctctgatttattctatcgttgactctagtgtttctccaaaaacaattctcagatgaaaacgatttgtctgtcctgttttcttttagaacgtggcaccagcccctcagctcctaactttctatacaatctccttttcagggaatgtgtagcgggctgttttatattctgtgacccccctaagtctgagatctctcctgaaggactaactgagaagtgttaaatgtcatagctttaaaagctaaatgtcatgtcctctacttttgagagaatttaaaaaaattactccctacgtgtgaggacacgtgtacatatacaccaaaaacaatcaaacaaaagccgtatttgtaaaaatagattttatgggaattacacgtctcagaagatttttcatgagatgagtgaattaggcccaaacgcttaatcttccctttccacatctaattcagttcctaccctttgctgccaatttccagaatgtgaaaatctatcacctcaccaagaccatatggtacagcccttcccaaatcaccagatccctaaaaatgtgtcgaatgcataaaatcaaattgagacattcaagctgtgtctcaaagacgtaaaatcaaaccacaaccaaatcttgcacttgaaattttggaagatgaatgactagaatgttcagtccaagggttacagatcaaagctttttttttttttttccttttttctttctttctttctttcttctttttttaatggcaggctcctaatgaaaggttttgactctttaattgctccactttccaaattagacccaaatatgacacaaaccagggcagagaaaatcttttctgcaaagaccctgaaagggattgattaataaactgtgaaaagttccctcccagaagagaggtcaagaaagaactttacctagaactctggggctaaaagtcagaggcttagaaatcatctccaggttatcctgtgagtacaggtacttatttatttatttatttatttatttatattggctctgatagttactccctcacttatccctttaatatccatccctgttcattataccactttcctttattaagtatactctctaaaactgctcaatattagaataactagatttctttaagattaaagaaaaccactggacagtaaaagttagatgtcaaactgatagtaaaaatttaaagtccaagggcattccttgttcttttcaaaatgcacttccacacattgcaaggcaatcaattttcttgattctgatgttgaatacttctcaagcaattaactggcaaacttctggaaaaaataataataataagttttactcagggttaagagttagaaatatgaaatgacaccatctctgggaagcaaatcccttttatacatgcagcccaatttttaaaaaaaaatcactgggaaaaaattagcttgtattcacctaaatacaattaaagcaggatcatgttacaaggaaatcagtccttgcccaccccccccc

SEQ ID NO: 586342 - DNA, 4001 bp, Homo sapiens
ggcttttataaattggtgaaaaaccctagcatatctaaatttggtttgttttttgacaaaatcgtttttaaaagatgaagccaatgagaaaaaaagtttaacatatttagaaagcaattcagccatccctctcaagcttaaggaacactctcctgaaacctccaaaaatgggcattaatagagttaaagcgagccagtcttgtgtttgcatgctttggaatttgaaatgtaacgcaactatttcgactcaccatggaaaacaacaaatagaaccttcaagtaaaacatttttcaatatccaaaaacaaaccttctttaaacaaagaaaaatctcatctccaaatatctttttcaaacagaatgactggttttacattttaaacatcattacatattttactacgtaatacactctccaggatttcagaaaatcgggtacattttcgggtgcaccatgaaatgaagtgttaaacttaaaactgcacacacttctgcgaggcgttaagctatgcttaggtcctagaagctcatggcttgaagtaaaaaaggaatctagttcctcttctgccgcttcgttaagtgcattccaaaaagtgtgatcgtttactccactcagaacttttgacgattttaatgctactacaggaaagagcaattacacagagcaaacaaatatttaagtagactgcaattcagtatttgcgcacttaccactaacccctactacgaaccagaagcaaccaagagtgacccaatcggaaaagagaatcctctttttggcaaagccagccagggagaaaaccctaactttggggattcatttcaaggaatgtctacaagcattcctctctttcttatcttatgtctgcgctacacaatactgcacgggtggcagaaacgggggtctttcagatcttaagggaaaaaaaagcgacgacccccgagtctggggaccccaagtcccagcggcctggcgggcgcacggctaccctcagggtcagggcgcgcgctcccgttgggaccgggggcgcgccgaggccgcagcgcagggcccggcccgactagcgagcgataggcgggcgccggggggctctgtccggttcggccgccgggctagcatccctgcgcgcatgccccggcccgctctcccaggagaacggggcaaaagggcgactgttacccaataatagcgccctgcacgttcgcaacaatgcaggcggggaacccgagagccgcgggcagggaaccggaaagcgagagagcccggctccgcggctgctcctgcgcttgagcccagagctcacaggggaacacgcgtcggccggaaagcagcgccgggaagaagcgtgggcgcgagggggcaagggcacgggtcccggcgtcccgcggaggtcgcctcaccaggcgaggcgcggacgcccgagccgccccgggccacacgtcggcccaccctccgagaacccagcccggtcgcggcggggaaaggggccggcgccaccaggccgccgcctccaggcgcgatgaatcgtgctttttcccagtgcgtagtccaggcctggccgccccggcccgtccggggtgactcagggcccggccccgctcgctcctctgccaccttcggcgtcctccgcccacgagtcccccggcccggccgccattctgcccggccgcgtttcggcggctcaggcctcgccaggcgcctggtttcggccgtcgcggcccgagtcactgcgacaccgcggctcggggccgggcctgcgccgccgccgccgccgccacctcctctcggccccggcggctgccgacactcacccgcatctctgtggtgccccaaaggctcccgcgacgcctccgcctggtccctgggcctgggccccggcgaaagccccgtcccgccaaggtctagctgcgtccctcagctaccggggctgccccgcctggagctgcgtgcgacacggcgcccgcctcctcctcctcccctgcccgcccggccctcctcctcccgccgccgccgcctgcaccacgcaacctccgccctctcgccttccctgcgcggctccccgccctctcggcctcaccggctccggcgaccgcgggggagaagctgttgggggagggccggaacgcaccgccatcggcgtccggggcgggggagccgggaaaccgtcgtcgccatcgccccgccagcccgaggcgcgggaggggcccggaaagctccctcccgcccgctcgccgctgccggcggccccgggggcgccccttccgcggccgaggcccccgctcgcgtggggaagcttctacctgcgagcctgcggcccctgcccccggcacccgagacatccccgacccggcgcgccggattctctgccaggttttacagcctccctcgccttgggaccgccgcggaggacccgttcccgccacttcggacctcgcgagcggggctgagctgcttgggtcggggacaccaccagcctctggagaaacggcccgaagcaccccgaagaagagggggtcccagtcccctgcccctcccttgtgcgcacccccacccccagcttgcctggaacctgactccacacctttgtcgaccgggacagggactgggggttgcaccccagatcagaaagtcagaggtggccctccgaatcggcgcggacttccgaggaacctcagccaattctcgacccccttaccacctgcaaggccttaggaatcggctccagaaagctcgagcttatctgcgtgtttcgttttaaaaatcacttctaagataaaacctaactaggctttccccttcagactttcagtaactcctgtttggcaaattttgacattcactctatccttcgtctttgtaaggacatatcaagacttagaaggctttgattacacatacggatggcatgagtcgtgatataaaatagtattgttttcacgtgtacttcgaagtcatctcatttgaaattaactgtcataattgactatttggaatattcaacctaaatactacccgctgctgtggtgacggggggtggaggaagcgtggtggaaccccaacacctagtgaggggtggctgattaataccacggctcacaacataacagagcggctcattccatgaacaaccccggggggatttcgaattctatcatctgggcaaaagatgtgatgagtgtaacttcctgttttctccaaactaaaacactacgcagattcctgtaccgctctgggacagaaatcctcagccagagcagaggccgtccccagagtccacactgtttcctgcataaagtgggttatctcagaagaaacatcccactggtctgtgtgatccttctattgaaatgtggtcttttatctacatctaagtatctctagaagtaatgcgtttgtatgtacttgtcactcagatatgtaatcccttaatttgtgcggggttttggggtgtgaaaaattcttggtttatatcctacacttttaaataacctcgtcaaaacttacatgtatttaacacctttttttgtgagcacatggtaaggttggaagtaaaaatggaaggtttatccctgtggcccatgttttccagtgtacctatgtggggttttaaaaaaatgtcccaatttcttccttttactggagactgcgttttttagacaacagcttatcttcctattccctaaccagtcttctccaatcttaccattcaatatagcctccttttctgtgacttcctccagctgaatagaagggctgagtgggtcaaccttccctgtattgtttgtttcctccaccctctctttttccttaatagcagtatttggtccacccacaccaccctctctcttctcactgcctccattcctggttcttaactcctttctattctttactctccacctgcctacacgatcattcttagcagcaaatttattccatcgacttttacgtccacttaacatccagattgcatttactttgcgcagataaccttgccgcc

SEQ ID NO: 586343 - DNA, 4001 bp, Homo sapiens
ggtcactgtcaccagtcctccaggttaggaaagttcagccaagtttatcttcacgcacaccttagcagttgggagtagctgcagttccccaggggccctgaggaaccctcctatcccctcccagagcaccaggccgccctagagcattctaagccgcgggacccgggcaccccccgacatccccggttccctccgcgcctgcaacctcgggacttctggcccacacgccgctcaccttcaacctggctccggctacgcacaacatccacctggcagagtcccggggctgtcccggcgccgcgggcgccgagctggcacgtgcggggcggaccctaagggtgcgccgctcctccgggcggggggtggcaggcaggcactcgccccttgggcacggcggcgactcgggcgcgggccggggagccccggcacggtccccccgcggcgccggggactccgcgcgcggaccaccgcccggcatgccacggtcccaacgggcccccggggctctgctttcgagaacccggcccgagaaggcatctccgagcgcacccgccgcgcgctccatggcgggccctgcagagagggcagaagccccgaggggacgcaaggaagggacccggcgccgcaggtcaccgggggccgccggagcccccaggcgcgcggcgatcgcggctcggaccggcggcggggaggcagcgtacactgcccgggcacccgggggaacagcttggggcctgcctaggggaaagttgcagcctcctcctcccgcgcccgcacccggcggtccgggacaccgggacccagcgacactgcgcgcggggcacccccgccgcccctcgccaagtttccccaaagagcccccgcgggggtccgccacggaggaacaggtccgcgtcaccgacacaggcacacaaaagagcgcggcggccgcgaggtgcgcgggtggccccggggcgctccccgggacgtaaacaaacccgggggtccgcgccgggagccacacgcggggtgccggagcggcggcgcggcccgggccggtgacagccgggggcggcggccggggccggccgggggtagcgagcgcgggcgcctgcccggccacccgcccgcctggccggagccgggccgcgccgccgccgccgccgccggtggccgctctgaccctcccccgagccggcggcaccacagcgccaccagccccagctccgccgcgccggcggcagtggcggcggctcctcctggagaggcaggcgcttcaccccccgcagcaactccccacaaactttccccgggaatacggcgggccgggggcgcggggcgagcgggcgggcgggcgccaccgccgggccgcggccccctcccggcgcccgccgccgcccgccccccgccgcccgctccccgctccccgctcgcgcgcgcaccccgcgggccgccggggccgccccctccccggtcccgcggcggcaacggcggcggcggcgctggcggcggcggcggcgcggggcccgggggggcgcccggggtgggggcagacaccgggggcagtggtggcggcggcggctcccggcgccatcttgggctgatcgatgaattgaacaaagaggatcaatttccgatcaagcgagtgatcaatgggggccggggagcgggagggactcggccccgactcggccccgcggtgcccggcacccccctcctccccgccgccgcgggccccccggcggctgggccagcccggggcccccggcggaggccgcgaccgcccgcagcccccacccccgggcgcgaggccgagcgcggaggagcctgacctgcagctgctgtaaatcaaagcgcttccaatattgaaacatcgatcccacattggccgccatcttgagacatattgagacggagtgagcggctgatagagagggggctggagttcaggagccgccaggaggcagcaggcgggcggcgccaaaacccggcctggagccggccgccgccgccgccaccgaggacgcggactcctcctcacggcaccgccgcagccatggcgagcccgagccggagccggagtcgcagccccagggcgcggcggccgcggcccggcctcgcgcgcgcggccccggcccctgctcccccaacccccccaccgccgccctccccctcccctccgcgggccgaccggcgacccccgcccctcgggacaaccccccccaaagtccgcggtcgcgccggccacagacccggccccgagggggcgctggagggcagcgcccggggtcccccggcaccgcgcacctggggagggctgcgggggtggggggggtctcccgctgggatcgcgatcgcccgcggtggccgagcgcagcgccttcaagactccggttggggggaacgtcggagcgcccctgtagtggttagtgtacagagcgcggagacgccgctaccacctgcccgggaccccccacacccgacccctgcgtggcccaggccccccgcagcagcgtgcgtgggaggcgccccgacggtggacggcaacactctgatccctctgcgcccagcgaggaccgggacaccgacacgaccaggaacagcgtggcatgtttggaggagtggagttgagggggaaacagccctgaccctctcagggggccgcgcgcgtggatgccccacacccggacagcggcggtgccagcgtcgcacccgaacgcaccccaacggcggtagcgctgggggtcccggcagcccccattcgcccaagccgttccagtttaggccacgacaggaaaagtctgggagcccagttctgtgtccccccgcgccgcttcagcggaacagcccaagaaacttcctgtggttcagacaccttggtttgttgcaactttgggcgcagaaagttggaaagtgtgggtgcactcactgaaaacggaaagcgtggtcccaagtttacagaaatgctaaaatgcaaaccaaaaaataaattctcttttgatttctctcctcgcggaaagctggcgaaagcacacgttttatgatcgtcatctttcattgattatacacacgtgtgacttggagtttccagtaggaatactgttctttgactctcccgtacttcactgaacgagtaattagttaaaacaagtccccaaattccttaatctcaaaatgcatatgtaaatagaatctgcataggatacaaaataaaacgcgcaagtggaaaacaattgcttttcaagtgagttcgagggttggcgcagtgaattcggcatttttggaggaagaggctggaaatgaaagtcccaagatttagagaacacgcgtgtccccaggtcttgcgcagctggccaggggcctcagtttccccaaggggaggcccctgatgtcgggaacggggttcactgtctccccaacgcaaccttgactcgccggtgggtgggagcgcgctggcgtcggggggcacgttgcgagcctccaccctagatgcggtgacgccgcgcacagcagggcactgtggatctcgggtggccaagggctgcctccgtgtggggcgccccggcccgcgcgctcagtcggccggccgccgcgctgtagctccgaccgcgccgcccggtagagggcagcggcgccccgacactcgggtcctcgggtcctcgggtccccgcgcacgtgcccaccggcgcgcccaggcccccgcgcctgccacgccctgtcccggagtcaggcttctggcgggaagcggcattgccaccgagggacattcctgtcccggggaaatgcgacttctaaggatgcctgcacactcggggaggcggcgggggtgggggggggggtgcttccgccttcccctggcatgtctatttctgcggtggcaggcaggcgagacctaggaattgcgctaaaggtggctagacaaaatgtgcaggggcttaaaaaaaaaaagaaatccctcccatggggaaggctcaaggaaggatcagggaaatggtttggatttgatgcagatgttctcaatc

SEQ ID NO: 586344 - DNA, 4001 bp, Homo sapiens
atacaattaaagttgtcagattccatttaaatatgttttaatccaacccgcttcgtttgatacaagcctgcatctcgagctttgctcccaaaggtattgcggtaggtcactgtcaccagtcctccaggttaggaaagttcagccaagtttatcttcacgcacaccttagcagttgggagtagctgcagttccccaggggccctgaggaaccctcctatcccctcccagagcaccaggccgccctagagcattctaagccgcgggacccgggcaccccccgacatccccggttccctccgcgcctgcaacctcgggacttctggcccacacgccgctcaccttcaacctggctccggctacgcacaacatccacctggcagagtcccggggctgtcccggcgccgcgggcgccgagctggcacgtgcggggcggaccctaagggtgcgccgctcctccgggcggggggtggcaggcaggcactcgccccttgggcacggcggcgactcgggcgcgggccggggagccccggcacggtccccccgcggcgccggggactccgcgcgcggaccaccgcccggcatgccacggtcccaacgggcccccggggctctgctttcgagaacccggcccgagaaggcatctccgagcgcacccgccgcgcgctccatggcgggccctgcagagagggcagaagccccgaggggacgcaaggaagggacccggcgccgcaggtcaccgggggccgccggagcccccaggcgcgcggcgatcgcggctcggaccggcggcggggaggcagcgtacactgcccgggcacccgggggaacagcttggggcctgcctaggggaaagttgcagcctcctcctcccgcgcccgcacccggcggtccgggacaccgggacccagcgacactgcgcgcggggcacccccgccgcccctcgccaagtttccccaaagagcccccgcgggggtccgccacggaggaacaggtccgcgtcaccgacacaggcacacaaaagagcgcggcggccgcgaggtgcgcgggtggccccggggcgctccccgggacgtaaacaaacccgggggtccgcgccgggagccacacgcggggtgccggagcggcggcgcggcccgggccggtgacagccgggggcggcggccggggccggccgggggtagcgagcgcgggcgcctgcccggccacccgcccgcctggccggagccgggccgcgccgccgccgccgccgccggtggccgctctgaccctcccccgagccggcggcaccacagcgccaccagccccagctccgccgcgccggcggcagtggcggcggctcctcctggagaggcaggcgcttcaccccccgcagcaactccccacaaactttccccgggaatacggcgggccgggggcgcggggcgagcgggcgggcgggcgccaccgccgggccgcggccccctcccggcgcccgccgccgcccgccccccgccgcccgctccccgctccccgctcgcgcgcgcaccccgcgggccgccggggccgccccctccccggtcccgcggcggcaacggcggcggcggcgctggcggcggcggcggcgcggggcccgggggggcgcccggggtgggggcagacaccgggggcagtggtggcggcggcggctcccggcgccatcttgggctgatcgatgaattgaacaaagaggatcaatttccgatcaagcgagtgatcaatgggggccggggagcgggagggactcggccccgactcggccccgcggtgcccggcacccccctcctccccgccgccgcgggccccccggcggctgggccagcccggggcccccggcggaggccgcgaccgcccgcagcccccacccccgggcgcgaggccgagcgcggaggagcctgacctgcagctgctgtaaatcaaagcgcttccaatattgaaacatcgatcccacattggccgccatcttgagacatattgagacggagtgagcggctgatagagagggggctggagttcaggagccgccaggaggcagcaggcgggcggcgccaaaacccggcctggagccggccgccgccgccgccaccgaggacgcggactcctcctcacggcaccgccgcagccatggcgagcccgagccggagccggagtcgcagccccagggcgcggcggccgcggcccggcctcgcgcgcgcggccccggcccctgctcccccaacccccccaccgccgccctccccctcccctccgcgggccgaccggcgacccccgcccctcgggacaaccccccccaaagtccgcggtcgcgccggccacagacccggccccgagggggcgctggagggcagcgcccggggtcccccggcaccgcgcacctggggagggctgcgggggtggggggggtctcccgctgggatcgcgatcgcccgcggtggccgagcgcagcgccttcaagactccggttggggggaacgtcggagcgcccctgtagtggttagtgtacagagcgcggagacgccgctaccacctgcccgggaccccccacacccgacccctgcgtggcccaggccccccgcagcagcgtgcgtgggaggcgccccgacggtggacggcaacactctgatccctctgcgcccagcgaggaccgggacaccgacacgaccaggaacagcgtggcatgtttggaggagtggagttgagggggaaacagccctgaccctctcagggggccgcgcgcgtggatgccccacacccggacagcggcggtgccagcgtcgcacccgaacgcaccccaacggcggtagcgctgggggtcccggcagcccccattcgcccaagccgttccagtttaggccacgacaggaaaagtctgggagcccagttctgtgtccccccgcgccgcttcagcggaacagcccaagaaacttcctgtggttcagacaccttggtttgttgcaactttgggcgcagaaagttggaaagtgtgggtgcactcactgaaaacggaaagcgtggtcccaagtttacagaaatgctaaaatgcaaaccaaaaaataaattctcttttgatttctctcctcgcggaaagctggcgaaagcacacgttttatgatcgtcatctttcattgattatacacacgtgtgacttggagtttccagtaggaatactgttctttgactctcccgtacttcactgaacgagtaattagttaaaacaagtccccaaattccttaatctcaaaatgcatatgtaaatagaatctgcataggatacaaaataaaacgcgcaagtggaaaacaattgcttttcaagtgagttcgagggttggcgcagtgaattcggcatttttggaggaagaggctggaaatgaaagtcccaagatttagagaacacgcgtgtccccaggtcttgcgcagctggccaggggcctcagtttccccaaggggaggcccctgatgtcgggaacggggttcactgtctccccaacgcaaccttgactcgccggtgggtgggagcgcgctggcgtcggggggcacgttgcgagcctccaccctagatgcggtgacgccgcgcacagcagggcactgtggatctcgggtggccaagggctgcctccgtgtggggcgccccggcccgcgcgctcagtcggccggccgccgcgctgtagctccgaccgcgccgcccggtagagggcagcggcgccccgacactcgggtcctcgggtcctcgggtccccgcgcacgtgcccaccggcgcgcccaggcccccgcgcctgccacgccctgtcccggagtcaggcttctggcgggaagcggcattgccaccgagggacattcctgtcccggggaaatgcgacttctaaggatgcctgcacactcggggaggcggcgggggtgggggggggggtgcttccgccttcccctggcatgtctatttctgcggtggcaggcaggcgagacctaggaattgcgctaaaggtggctag

SEQ ID NO: 586345 - DNA, 4001 bp, Homo sapiens
aattaaaataatatacttattatggcaaacagtactggacagccagtaacatacacacttccacaacagggggaaaaaaagccatcagaaaatggactttcagcaaaactgaaattgttttttgattctgaaaaagaaggcaacttttcaagtttacttttgcagaagctgcttaaaggggaaggctggtcaccatgtgggaataatgtcccaaagggaaggcagtcattggcgggccccgtcccaaagagttcaaagctccactaacatacagagtgccatgagctttgtcttagaaagtgtcctcctttcaaatatgtatttaaaagacaaatttatacaacagtgcttttcttatttaaaaagaaaagaaaacctggtttttacaagtctgagataggataaaaaacttgtccaactagtcttagcaataccaaagcactgaaacttccataccacaagcctttgggactaaaaaggaaacggaataaaacacaatcttcagaaattctcttcctgagcacacactcctgtgccaaggcagcagcttcaagacccaggaagccgagggacaagaacccagtgagccagggttgcagaactgcggaacggcccaacctcacctggacccgctgacgtctccaacctggatttctctctgcaaagaccgatcagcctctttacccccaggtggcaacccaatctcagtataaagaggtctggaaaaatgagaaaaatctggaactaatgaattctctcccaaactcgttctattgactcactgactatcggtgggaattaaccagacaccaactccaaaggcctcctcaccgcccagagaaagaaccagattggcctgagacttgaactttgacattccgtattcgactaaagtttgcaaacccataggaaatcatctaaggccaaatcgttagcaaccaccaaaagcaaaggagtaaagaggaatgaagttcaaataagggactttgttttggggtttggttttgatttcttcttaatatccacataaagtgcaagtaaactgacatggaaactttcgatggaaccctggagccctgatcccctgaagaagtagctaatatgggggacaggaaggtttagagttcttaaaatctagtaactctagaaaccaaatccattttccaggcaattttgccaggatgctttaaaaaagacacttcattgatattaagctaggatgtcacatttaggaagacaagagagaaaaataataataatgtttgtccttaaaactccacaacgggttttacagtaagcacaggaattaaattatggtaaaagggagctatttttactaaaacagggtagaccaatttatcaaaaatgccattcggctgtgttcattacatccaggaatctaatttacacaatagacactttggagtaatctattttagtcaataaatacttaaactcctttaagttttaatcttatcggaaatacatatttcgcatagtcttcttcctagttaagcgagaaatttcaggaaatttcataacgactatgactcggctttatcgttcttagtaggcaagagcagaaaacaagcatatacaattaaagttgtcagattccatttaaatatgttttaatccaacccgcttcgtttgatacaagcctgcatctcgagctttgctcccaaaggtattgcggtaggtcactgtcaccagtcctccaggttaggaaagttcagccaagtttatcttcacgcacaccttagcagttgggagtagctgcagttccccaggggccctgaggaaccctcctatcccctcccagagcaccaggccgccctagagcattctaagccgcgggacccgggcaccccccgacatccccggttccctccgcgcctgcaacctcgggacttctggcccacacgccgctcaccttcaacctggctccggctacgcacaacatccacctggcagagtcccggggctgtcccggcgccgcgggcgccgagctggcacgtgcggggcggaccctaagggtgcgccgctcctccgggcggggggtggcaggcaggcactcgccccttgggcacggcggcgactcgggcgcgggccggggagccccggcacggtccccccgcggcgccggggactccgcgcgcggaccaccgcccggcatgccacggtcccaacgggcccccggggctctgctttcgagaacccggcccgagaaggcatctccgagcgcacccgccgcgcgctccatggcgggccctgcagagagggcagaagccccgaggggacgcaaggaagggacccggcgccgcaggtcaccgggggccgccggagcccccaggcgcgcggcgatcgcggctcggaccggcggcggggaggcagcgtacactgcccgggcacccgggggaacagcttggggcctgcctaggggaaagttgcagcctcctcctcccgcgcccgcacccggcggtccgggacaccgggacccagcgacactgcgcgcggggcacccccgccgcccctcgccaagtttccccaaagagcccccgcgggggtccgccacggaggaacaggtccgcgtcaccgacacaggcacacaaaagagcgcggcggccgcgaggtgcgcgggtggccccggggcgctccccgggacgtaaacaaacccgggggtccgcgccgggagccacacgcggggtgccggagcggcggcgcggcccgggccggtgacagccgggggcggcggccggggccggccgggggtagcgagcgcgggcgcctgcccggccacccgcccgcctggccggagccgggccgcgccgccgccgccgccgccggtggccgctctgaccctcccccgagccggcggcaccacagcgccaccagccccagctccgccgcgccggcggcagtggcggcggctcctcctggagaggcaggcgcttcaccccccgcagcaactccccacaaactttccccgggaatacggcgggccgggggcgcggggcgagcgggcgggcgggcgccaccgccgggccgcggccccctcccggcgcccgccgccgcccgccccccgccgcccgctccccgctccccgctcgcgcgcgcaccccgcgggccgccggggccgccccctccccggtcccgcggcggcaacggcggcggcggcgctggcggcggcggcggcgcggggcccgggggggcgcccggggtgggggcagacaccgggggcagtggtggcggcggcggctcccggcgccatcttgggctgatcgatgaattgaacaaagaggatcaatttccgatcaagcgagtgatcaatgggggccggggagcgggagggactcggccccgactcggccccgcggtgcccggcacccccctcctccccgccgccgcgggccccccggcggctgggccagcccggggcccccggcggaggccgcgaccgcccgcagcccccacccccgggcgcgaggccgagcgcggaggagcctgacctgcagctgctgtaaatcaaagcgcttccaatattgaaacatcgatcccacattggccgccatcttgagacatattgagacggagtgagcggctgatagagagggggctggagttcaggagccgccaggaggcagcaggcgggcggcgccaaaacccggcctggagccggccgccgccgccgccaccgaggacgcggactcctcctcacggcaccgccgcagccatggcgagcccgagccggagccggagtcgcagccccagggcgcggcggccgcggcccggcctcgcgcgcgcggccccggcccctgctcccccaacccccccaccgccgccctccccctcccctccgcgggccgaccggcgacccccgcccctcgggacaaccccccccaaagtccgcggtcgcgccggccacagacccggccccgagggggcgctggagggcagcgcccggggtcccccggcaccgcgcacctggggagggctgcggg

SEQ ID NO: 586346 - DNA, 4001 bp, Homo sapiens
tatataaatctaaatataaaaccaatctccagtaagttttaagatggcactcaccatctttgtgaaaagttgaacattactaacgaagtctaatcatatctttaaaaggggtaaacagtgataccatttactgaattggagttactattaaaattcaaaaactgaacatattcatttaaccacaagccagtcttagttttaaatcaggactgcccaacaaaatattctgtcagtcattcatgatctgaattctggtgtatgagatctattaaaggatggtacacataaaaaagtcatgagacatttctgttttgtaataaataaggcagtggccaattattactcattagtagcttttttgagataagctattaagtctgccctttcttccttcttcttaatgccgacaaagatcatttttgttccagggatgtacttcttgggattctccaaatactccatcagtgtatcctctccccagatgatgcctaaacaagaaagaatgcatcggttatttcacactcctgatagtttgccacatgttatattcctgcattttgtgttgttttatttaacaagtgactcttacctttgttcttattggcggctgtgtaagagtatccaggggcctgacctgtcttccgcccaaagagaccatggagatttggcccagtcttgtgcttgcctcccttttcaacggtgtggcactgggaacacttcataataaaaatcttcttgcctttctcaacatcacccatatttaattctaaaaacgaaagcttcaacttagtaaatttttcctcaggtaacaaatacagtgtaaatgaatgaccactctagccacttaattaccaatccattgctaatttatgtcattaaataccagaatgaatcttgttttgctttaatactctttataccaaatattctttaataccaaaaacatttttaggagtacctcctcaaaaacgtatttttgtgtgtatacgtgaaggaacgttaaagcccaagcaaagagggaacctaattcaaactccagtttcagaagagacaatcatggtcacgaagtcacagatctgaagctcaagggcgaacacattaagccaaaatcaccacaaccgcaacttttaaaaagacctaaccatttaatcttactacaatgtaaagccacctctccctgaggataacgcaaagcacacaaatgtttaaaaagcggtcctggctgtttctatctgcccaggtcacaggagtagcttgacactcgaacttgtgaatgggagctcaggggcaggctgcacggtcccccggggacatcccaactcccctacctgtgatctcctggggcgaccacgaggtcacccgtccaggtcggtttcaaggtgattgatgaaactccttctaggatgtcagaacgactgacggaagaaacatgtgcccacgaaaagaactggccccttattagaagagcaacagcttttgccctctgaagaagaacgtgaagctctaagcttcggctttccaggagggaagtcttgcctatcatttccatagcccttcagcaaccactacggaagaggccgcctcctcctcggatctgtatccaagccgcctccagtccctgaccgagaccatacctgtccctagttagggctccgccgcacctcaagccgttactcgcccagctcggtctgaccacagtccagggtcttcactccccgccctcccacccagcgcgggctccactcgaatgctccccgcttgggtttcggtcgctcgcaagtgcgcgcctcccacagctctgcctctaaccaggtgcggcctccgcgacccgctctcacctctttttagtcgctggcacaacgaacactcccgctccgaagccggacgtccccactctctaagtccaaggacacgccggtccgcgcttaagtaccggtgtaagtgcaaccaaactcgctccgcgctcccgcgccctgacgtgcggccgagctggcggctacgcagtaacgtcgccgcacctcattggctccagtcccaatgcctgcgccaaggacctgcgcgcgcatgctggcgagcatgttagggtgtacggcgtgcgtgcccttcttctcgaggcttttcccggccgttacgacaggcctttggtcgtacgacaacgaggtggtgtcgggagaggtgacgtcactcgcgggcctctgtgcgcttgcgtgtgctggaggagcggggagggtggggcggagtcgcttggttggtgcgttgccctgctaaagtatcagttcttgggcgtggtgatgtaatgagctttgagcagggcgttttgccggtccaggaaaagacgccctaattttggcgcacctagaggtctcctagctaccatcttgtcagcaggcgacctttacccagactctgtcctactaccacggctggcgccaacagcatcctagagggacagcctggaaccaggagttacacgagttgggcaccagctcgtgaccttgttctagttccacctatactctgttactttcagtcacattccagctctccgcttgatggacgccccaagactgaggaaggtgctgcatttgcggcagagacaggattatccctctggaactgaaaaataaaattaagaggatgcaatgataacatttatgtaccttttaaaatttttatgagtacgaagtaggtaaatatatatatatacttaagaggtacatgagatattttgatacaggcatacaatgtataataatcacatcagggtaaacggtctatccatcacctcaagcatttatcctttttttctgttacaagcaatccaattatacttttagtttgtttaatgtacaataaattattgttgagtgtagtcaccctgttgtattactagaccttattcattcttcttcagtggcgccatttaatgtctcagccccccaagtagctgggactacgggagcaaaccaccacgcccagctaatttttgtatttttagtagagatggggtttcactatttggtcaggctggtctcgaactcctgacctcaggtgattcacccgcatcggcctcccaaagtgctgggattacaggtgtgagccaccacgcccagggcaaataatattttataacccattgttttaaactgatgacaacataacattgattgcataaacaaaaatcaaagagaaaactaagaaaaactctgcactttaacttcactctccccacttttaaaactttttcttgtttctatttatatattattatactatgtcttgaaaagttgttatagctattatttttgataagttaggttaatctctaagtctttctactcaagatatgaacagtttacacacaattacagtattataatattgtgtgtttttctgtgtacttactattagtagtgagttttgtaccttcaggtggtttcttattgcttacgaatgtccttttctttcagactgaggaactccctttagcatttcttgtaggacaggtctggtgttgatgaaatccctcagcttctgtttgcctgggaaagtctttatttctccctcacatctgaaggatattttcactggatgtactattctaggataaaagttttttccctcagcactttaaatatgtaatgccactccctcccggcctgtaaagttccactgataagtttgctgccagacttattagaactcctttttatgttatttgtttcttttctcttgcttgcttttaggattctttctttatcctggatctttgggagtttgattattaaatgttttggggtgtcttcgttgggttaaatctgcttggtgttttataaccttcttgtacttgaatattgatatctttctctaggtttgggaagttctctgtcattatctcgctgaataaactttctaccctgatctctctctctagctcctctttatggccagtaactcttagatttgccctttgaagccagtttctagatcttataggtgta

SEQ ID NO: 586347 - DNA, 4001 bp, Homo sapiens
gcccagcccagtagggccagcgggaagggccggcctgcgagggagacgggcctcaggcacgtccaggcccggggaggggcgtccccggccccctgctcacctctgtagccatccagctgcccagagaggcatttcagctcctgcagaatcttgtcagccaccggctcccggcccacgcccaggctgtgcagggcacgcaccgtgaactggcgggcagccctccagcgcgccccagatgagaagaagatgcctgtaggcagatacagtgcgtggtgagcccaggttcccaccccagccagccccgccaggcaagtgggcaggaagtgagcaggctgacagggcagcgagactggctgggccctcacccccatccccactcccgtccccctgggctggccctggcccctcttgacttgggatgaaaagaaccccgcttgctggttctgagcacctgacctgctgtgtggacacctggcccttctcagcaccagcccggaggcccagctcctgcctgctcttccccaggccaccctgggagcctctcccgctgctggagcccccacccctcctggggtccaggtgcccccacacccagtaggccccgtagcgccggccacacaccgacctccacctcgctggatgagctggaagatggcgatgggaggccggtcggccagctcctgcccggggcccgccagcgcctctttgaccgcctcgaaccccgtcagcaccaccgtcttctggcgccccaggtgcacggtgaacaccggcccgtagcgttctgagagctggcagggatggcgggggtcacccgggcagccctcacccacaagaccccccttaggtcccctcaggccgggcctgtgctgggtaggggtggggacagagggaaaatgggggcaggtggagggggcacgcctagatgccataaagccagtggtgcagggtggagggggcagcgcccagcctggagcccacagagccctctcgccatctggtgcttggcatggctgttgtgggattttctttttagccaaaattcctggggggctcaagccctgagtccaggcggcaaggtcgggggctggctgtctgctggggtggcacattctgaaaggccagagtctgcacagagtgagggcctgacaggctcggcccccagagaccctgatccgtcttcggctacagcccggccagcagcaccccagcccgcagttgggggcagccggaggcagggcccgggcctgactggtcagccctgtcccactgaccctgcctgcctgagcgaggacagagcgacagtgctagtcaggctgccccgtgccgtgtccccgtaccctctgtcctcagcatccctgcccaggaggcacaggtcctcttcccatttcacagatgaggaaacagaggctcaaaagtgggaagtgtttgctgttgaacacctgagggccgaggggggctgagcaggcagccgacaggcccaggccctcctcccctctgctgtccctaagcctggcctcctgcgggctctcagcagacgccaccgcctccagggagccctccagactcctgctcccgcgccgggccctgggtggcacctccagggcttcttcgtactcagtgtgtctgcttccctgtgggacggggtggctttcccctcccaaaagcagggtgggccctccggcctcctgcgtgccccgctgggcccggcaccatgtgggaacaggcagtggaaaccgggctgggcttccccaggaggggggccaggacacggcagctgtccaagcggcaagagctgcccgggctccctgacttacctccatcagggaccggtcctgttgcgacagacgcagcaagtgcaggttcccgacgagcggcagcgggcgaggccccgggggccaccgggcagctggggaggggtcttgggcgcaggcgcagagcagcccccagagccccaggaggcccaggaacagcaagagcagcagggccatgaggacgtggctggtgaggctccactcccctcctgggccccgtcccccccgcacccttataggcctccgcgggagggcgtgcccgcaccccacccaccccaccaccccgagaatgtggaacgagcagtttgcagggcagcccccagcggatggcttaaagctgcaggcctgcgtggaatgtggggctgaggccctggtggggccggggaggggagggcaggacgggggccctctggggtcaggcatccatgtctcctggccagagagaaggatgtggcacgtggactgttctgcccctggttctgctgaacctgccagtccaggccccttggccttggccacccctcagaactgggattcacagggctttggggccgaggccctggcttggaggggagccccctgcctttcacaggctctgagtgggaccctgtggagctcagggtttgcaggcctctcccaaaccccatccgtgtgcacccagctcttctctgatcagctccccacggggcaagggacaggagtgagacctcagggaggcccatgaggggactcaaatcccacagtcctcacaggccaccacctgcatctccctgagggtgttctcgccccaggtagcagcctgctccttttcgagggctgccgcccgggcaggggatgcaaccctctgagctaggacaggaacatggaagggctgccgggtggcaggtggcggggtttacgagccctgtccatctgtctcctaaaccgctgtgaggggtgggagggctgctggcagcagaagcggccgggcctgctttgcacagcctgccctgacatgaggcagctggagctggtgccagcaggcgggaccctccccacagcctgtctctggggcgttgcccatgccctgtacgaaccgcagagccgaggcagcctgaggccctcacccctcccgggttggtcccccttgattagctgggagggaaagccccaggcacagttgcacgcctcctgtggtggggagctcactacctctatcctgctgtacagcctcagggccagggctgggcggctgcggcggggagggagtgcctcataccagggccactactgggtaggctgggggtcctacctgcctagcaaagcttacttaattaattcagggaatacttttgatttttgtgtgttttgtttttgagacagggtcttgctctgttgcccaggctggattaccgtgctgtgagtacaggctcactgcagcctccacctccggggctcaagccatcctcccacctcagcctcccaaatagctgggactacaggcatgcaccacccagcctagctaactttatttatttatttatgtagaaatggaggtcctgctacgttgctcaggctggtctcacactcctgggttcaagcaatcctcctgcctcgacctcccaaagtgttgggattgcaggtgtaagccactgcacctggcctaattttttaagttttgggtttttgttgtttttgagacggaatctcactctgttgccaggctggactacaatggcgtgatctcggctcactgcaacctccgcctcccgggttggagcgattctcctgcctcagcctcccgagtagctgggattacaggcacatgccaccacacctggctactttttgtatctttagtagagacggggtttcaccatgttggccaggacagtctcgatctcttgacctcatcatgatccgcccgcctcggcctcccaaagtgctgggaattttgtaagtttcttttagagacggagtctagaggctggtcttcaactcctcctgggctcaagcgatcctactgtggccgcctccaaaagcgctgggattactagcatgagccaatgccgggccggcctctttttcttttcttttctttttttttttttttgagatggagtctcactctcgtcatccaggctagagtgcagtggcatgatcttggctcactgcaacctccatcgcccgtgttcaagtgatcctcctgcc

SEQ ID NO: 586348 - DNA, 4001 bp, Homo sapiens
gccaggacaaactattgagttaatgtgtcagcagcattggtccccaaggaatgatctaggtgaatgtctagactcacatggttccgtgtcaaggcagaggctaggctgggcaaactgtgtagtttctttccagctcccctctgtttggtagagtaatgctgcttttggttccaatgaagaggctaacagaaaagccagtcatctattgcacttaattgtgttggcctaaggagggcattgtctgcactacagtttctgactcctgggctgcatcagcatcatctaaggctaaggtattgtctgcccagctgcctgagtctgtagtgaccaccccacaacatggcagaccacacacagagtgacacagatggtgcctctgtgtccaggcttcaagcagatgagatgcaaacatgtttgtcctttgagtgacctccactacggggccaggacccatgaatatctctttggagttctaccctgagggatgaggaatattttcttactccattttgatcctacctggatgcttttgctgtcatcactggctcacagtcttgcttactcctctgccctgagcgtttaacataacctgctaagcaggtttgtttgaaataggggtattaaaatgaacgttgggaaggtatattttaaaagatatatgcaatcttgtcatagagttatacatttgtgcattagattcatattcctgacatgattctggaaaggtgaggttattttacacacatttattgtaacaaatactgaactaacagccctcatttgtcacctagaaggaacatgttggaaatagactatctccaaaaaaatctggtttaaaatagaatgaatttaagccatatcaattagtgttaaaaggtcagaagatggaaaatatgttgccacaactcactgaatttctaacctttctgtgaaagaattaaaatgaggtttatattttctattttcctgtcattatgattcccaaatcttagtaagagtgaaattgaggtagaagtgaaatgtgacatgtgagaagcctccactacccacagtggggagtgactcttctctctacctgctctaggatggcaggatcccaccagtgagaggattcatcctcttctactgcaacataaaggggaaaatgtaaaatccaaattctagtttagtaaggagaagccaggtttccacagccaagtttggaatgagatccgtcactactttccttccttatcctccttgggtccaaactattgtcaagtagatcatcctcaatcaatgctatcccaaaacccttcttgccactaaagatggatggggaagatgcttatttattcctttatagagctgcataagatctacaataacctctatatgtttgtagcatccaacacttaagctactgctccttgaacatcttttttttttttttttttttttgagacagcctcactctgtcacccaggctgaagtgcactggcatgatctcagctcactgcaacctccgcctgccgggttcaagcaattctcctgcctcagcctcccaagtagctgggaatacaggcgtgcaccaccatgcccagctaatttttgtatttttagtagagacagagtttcaccatgttagccaggctggtcttgaactcctgacctcaggcagtccacttgccttagcctcccaaagtgctgggattacaggtgtaagccaccacgcccggcctgaacatcttttttgatcttcaaaacagataagggaaagagaggcctgattagcaccccaagtccaaggaaacagagaagaggagcctggacagttactcacagatagaggagcaccaggctgacagccaggagaagccaggtttccatggccaagtctgggatgagagccatcactactttccttacttatctctctcctctgagtcttcctttcagctctgtgttgctctttgctgggctatgtgcatggagctttcctgccctgcacagcagtgattcagtgaggctgttggattgtttatatgctagagaaggaggcagggctggagctgcagccagtagcagggccacctgtgctctgcctgcagttggaagaggcttctccaccttggaagttggcaaagaatcacacacacaccactcactgacctcctttgagttcatattctatgaggtatcataaacaactcaatcaatgttactggggagtccaagggttctgggttcttatcagaaactcaagtggagccattggcataaaatctattaaatcgcctctctcctgcccttgtctctatggctgtcctcattccaaaatacttgaaattcatcccaacaagccacacctacagatctttacctatgcctggagtgtgcctgtgccccctagaagactcctacacatccttccaaacccagacagacagagccttctcttagagtctttcctcaccaaactcctcacacagatgtaaccatttcctcccctgggcactttccatccccttcatgcaatcctattgtcctctttcctctttaccaccattgtgtttccacgcctgtttccctgaacagaggtgagctcctcaagggcatagtctagtcttattccctgtcatggctctggtccctaccagggtgctgtacacacagtgggcaactagaaaggctggtggagttgacttagctgagattgctgggcctctgcatgtcatcccttctgactttctggtgacttcttaggtcattaatacagccagagctcttggctgtgcctcagctgctgtctctgcactttcaggctggtcctctgtgattctgttggcaaggggacccctaaaggagagacagggcatggatgagatggagctgatggcttggtggaatagtatcaatttgtgctgcttcctgtgaacccttcaaaggtcctgccatagatagcaagttagacaggttctttgccaaagagtggccccttctctctggaaatactgcatgtctggaaacaggagagaaaggagagaagagaacagctgcccagatagccagatggaccccaaccacctcagccagcaatgatggggcagtggtcactgcaggtcacacagcatcaaggactccaataagatggtcccagcctcttgggggtggaattggagttcaaagcaaatggcttcctttttgacaagtggaggattttctaatgggaggagggcaggccccaggagctggtagagatgaggcctgtaatagcagttgctgccacctgtgagctccctgacccattcctgatgggagagatctcagtgatgagggtgtgaaaattatatcagctcattatcgtcactcacacccaagttctgtgtctgcctggcctgatgaatggattgcatgacaaacaaaatcacagcgttcttaaaactcaatagaaataggcgatgtttaagctgtgcttgttcgcttccttctctctttattctttctcacattcagccctcctgcagaaactgatactcaccccagaaagacaccttttcccatccctctggcccctaagcctccagggctgctcggcacctggcctgagtgggtgaacatcatgccagattccttgtcagattcaaggccaagtgggtgaatgtcatgtgcagtgttgtgccaggtgtgtgccgggagccacatgttccttggggacagcctagtgaagcaggagacaaataaacatgcttggatggtggtatgcatgtgctgtaactctggaatccctgggataaaagagccgtacagagaggcacctaaggaaagaagtgacagcaagcatcaaaccaaaaaggacaaacatgggaaggtggtgacaatccccaagagaggtaggataaaagtccagggaatttagatacatttctgtctcctttcagtggctttgctgagcacattaagtaggggccatgctactatccccagtttacagatgtagaaactgaggctcagtgactgca

SEQ ID NO: 586349 - DNA, 4001 bp, Homo sapiens
aagtgccatattttggggtttcatttttggagccccaactttcccctgtcataaacttccctagaaaatgtacatactaaagctgagttgatgcttgtggagaggacaattgaattggtagctgagtcgcaaggaatcacattaaaccagtataaaccagtctcacattcctagcaatgtcaatccagttaaacagctgtgcctcatttcaggaggtgatgttgcaggtctgctgtcatgaaagataggtctgtatatggtgcagttaaacaggtacttaataagaggtcattctaccaaagcaaaaggagaccaaaagttaatcatttagcagactagtttctgagttcacagggcagccagacaaaaagatttctacatgttggttttgaaacagctccagttggagtagaggtaggcaatggtgatctgacagattttttttctctcctatagctccttagggccagatctgaaagactttaagttgttgcaatttctctggagtctgctctatcacaaagaattctgcaaaaatcacatttcctgcctttgtggaccaaaccaatgtatttcttaaatgtatttgatatctcatgcctccctaaaagaataaaaccaagctgcaccctgaccaccttgggtacatgttcttaagacctcctgaaggctgtgtcatgggccatggtcactcatatttggcccagaataaatctcttcaagtattgtacagagtttggctctttttgttggcagcatgtattaactcattctctattacaattcccctgtcttgatgaatgggctctgttgaggcagggggcaaggtgaatctcttgggtggttacagtgaaaatccatacaaaattttacatgcatatgtgctggaggcccacaatatatgagactaaaataaggactgaatgagtaaagcttaaatagcattgtaagctaaaaagtagggagtggcttctgatagggagtttctgacacaagttatgggaaggtgaagggagaaaacacatgatgaacaaaggttattttattgtggagataaagtctctcaggtagcagtgctccaaagaataagtattatcaaactttttctcttttcctgtgaattagttttctgattgatgagattatttggagaggctcaagacaattgcattctttttggaagatcttcccttagtcagataagagaacttcagagcaaccctgcacttcaggagggaaagaatgggggatgggtagacagaagagggtcagagattctgaagacatttgtgaagtctttcagtcttctttagttcaaactactcagtatgacaaagttttatttttttttttgagacggagtcttgctctgtcacccaggctggaatgcagtggtgcaatctccgctcactgaaacctctgcctcctgggttcaagcgattctcctgcctcagcctcccaagtagctgggattacaggtgtgtgccaccatgcctgactaatttttgtatttttagtagagaaggggtttcaccatgttggtctggctggtcttgaactcctgaccttgtgattggcctgcctccacctcccaagtgctgagattacaggtgtgagccaccgcacccagactaaattttacattttcaaatgttgtattaggagtcctaacatattaataatattttatgtgttcacagtatttggcacttaggtaacttcccctccgttatctcttttatcttcaaaacaaataagaaaaagatgggcccaattagcacttcaggtcttagagttaagagcaaacatgcctgcatagttactcacatatagaggagtaccaggctggtagccacaagaacccatgtttccatggcaaagtttggaatgagatccatcaccagttttctttttcagctctgtcttctgagtttttctttcagctgtgtgctgctctttgctgggctgtgcatatagagctttgtttctctgcccagaggtgatttagttaatgttaacagcgatatttatgtgctggagaaggaggtgggtctacagcggcagccagtagaaaagccacttatgctactcctcatatggagggatttgggtacccttttcaaattgacaattggcaaataattatggctgtccttattttggcctcctttgatttcctattctgtgaacaatcagtaaacaaatcagtcactgctattggtaagcccaaaggttatagattctcaggaacctaaagaaaaatacttctgcaagaacatctgcccagcaactgcctgtccaacctcaaactgatgtcagtcttgttattgatctttatagccaaggataatcattccaaaacaaatatgtaatccttctcattatttttttaaactttgtcttactttacctacctgaataagcacatagtttaccttggcacgcatattcccattgcaatgctttattcccaaataaaaataattctttttagaaagcctatctctgtttgttatctaggttgccaaatcatgcctccaggtaaacagacaagaaggactccctgtgcctcaaaagcaaaaacaaacccaagaggccatggcaggtttaggtgatggtcatgttctctgtgttcttagtaagtgttgcaaaacctatttttctgtagccaagtcaaataacattttctgaaaaaatctgtacctgggaattttccaactgctcaccaacagatcatgtggtaagaactaactgaccacctaggaacagccaattaagagacatgtgacttggggcttaaaggctgtctaatcaagactcttttcttcactcctctgactcctctatcctgctctgtggtttttgactttatagctctccacctccgaggctgcatctcctcaatctgcagactgtgttttatagaaaatgaagctctccctctgtcctccacagatcccacaatctttactcatatttcctggtgatgaggaagggatcaaaattggctctcaagatcctctcccttgtcatctggactaatcaatgcattggcaccagcaagagtcctctaagctcagttatcttcctggcctggctgttttgtggaaaaatcagtaaatcctcttacatccaagatctcacatttaggatgaggtcttgaggtctttatttttttcagggaacctgcccttctggctctatggctacccacttgtggggtatgcttgcacttggaggggcatgcccatgtttcttggggtgcattcatgctgcatcaagcaagttcatgcctcacaggatactccatgcttcagtgttgcaaggactatcgcattttatttgcccttgaagggaccccttcctaaggtgagggctatgcataacctaggtcctaaggccatggtctctaaggcctgccatcgggtaattcggtggctctgtctctgatcaatcactatcaggtactctggcagtttttcaagtttaaaatttaaaggtaaaggctcgacagaaatggatgtgagagatacacctaaattgaactccgaagcatgcaatgaggataagaggagtctggacttctcaaagacagtaagaggctttctttcaatctgcatttttgaaagtttcaaacacaattgggactttggctgtgttttactaggagactaacctgaagagttaacccatgtctcagaaaatctgaaaaacttgaagaccctaaaatggagagtcccatatcttcctgctgctgcacttgcattctacctccacttttccctttttaccatcactgtctttgtctggaacattgcagggacctggcaacttggtaccagcaggggccattgagcccctggctccttcatgatgattgaaaactgggtgggtctctcatgagttttggacttcccacttgattgacagctgtcagttttgttcagctagttgttcttacccctggataaaagggggtgaaagaaagtctctttctttga

SEQ ID NO: 586350 - DNA, 4001 bp, Homo sapiens
gactaacagaaaagccagtcatctattgcatgtaattgtgttggcctaaggagggcctggtctacactgcattttctgactcctgggctgcaccagcattgtctaaggctaaggcattgtctgcctggctgcccgagtctgtagtgaccggcccacaacatggcagaccacacacagagtgacacagatggtgcccctgtgtccaggcttgaagcagatgagatgccaacctgtttgccctttgagtgacctccacggtggggccaggacccatgaatatctctttggagttctaccctgagagctgaggaatattttctcacttcatatggatcctacctggaagcctttgctatcgtcactggctcacagtcttgcttactcccctgtcctgagagtttaagacaatctgctaagcaggtatattcgaaaaggagttattaaaataaatggccggacaggtatatttgaaaagacgtgcagtcttgtcttagaggtatacatttgtgcattagactcatattcctgacattcaggaaaggtgacattattttacacacacttattgtcacaaatactgaactaacagccctgttttaccatccagaaggaacatgctggaaatagtctatctccaaaaaattctggtttaaaaatgaatgaatttaaaccatatcaattcatttaaaaatgttagacaatggaaaccatgttgccacaactcactgaattcctaagctttctgtgaaagaattaaaatgaggtttatagtgtctattttcatgtcattgtggttccctgctcttaataaaagtcaaattgaggtagaagttaatgggacaggtggagcctccactacccacagtggaaagtaactcttctctccacctgctctaggatgccaggaatcccaccagtgagagggtttgccctcctgtactgtaacataaaggggaaaaatatgtaaaatccaaattggctttcatggctcctgccttttcaggctgctagtagattcccattaggtgagaaacaaagctctatattaatcctagcctcccagagacgggaggaaaaagattaaagcaaagaataaatcctcgaaacttcctccaggtctcctttgctctagaggttaatcattgcaagataaaccatcctgtgtatgacagggtggaggagtgactcataggagggaggggattttcaggggcatggcacaggaaagagggaagagccaggggacagcttcccatgaagtcttggtgtcccctggtgcgttatgtaaatgatatcctgggttggaaggcgggggagcaggaaccaggtctacaggggcaatacagctacacatcccttccagcagacacagaacccagaaagcgaattaatgagacaaaaatgcaagccactccttcctgtacccagaatccccagagcctgggaaggggatgaggatcacactgtccatcatgatcagcagtttgtaatctgccgctgccatgttttcattgattagtcttcgtcagatctaagctaatcaaatcattcccactaccaaatgctgtccctaaaccctcctagtcaccaaaattagaaggtggatgggagaaatgcttatttattcattcatagatctgcataagataataataacttctatgcgtttgtagcgtccaacacttcagctacttctccttgaacatctcttttgatcttcaaaacagataagggaaaaggggcccgattagcaccccaagtccaaggaaacaaagagaggagtttggacagttactcacagatagaggagcaccaggctgacagccaggagaagccaggtttccaccgccaaatttgggatgaggtccatcgccactttccttcttcaactgtgttctgtgagtcttccttttagctgagtgctgctgtttgctgggctgtttgcctggagcttccctgccctgcacagcagtcttcagccaagctgctgaaagatttatgtgctggagaaggaggcagggctatagctgcagccaatagcaaagaatcgcacacacccctttgctgacctcttttgagttcatgttctatgaggaatcatgaaaagcttaatcagtgttatcggggagtccaagggttctgggttcttatcagaaactcaagtggagccattggcatgaaatctattaaccctcctctcacctgcccctccatggctgccttcattctagaataattgaaatccatcctcacaagccacacctacacatctttacccacgaaattccctctgcctggagtgtacctgtgccctctagatgactcctacgtatccttccaagcccagccagacagaccccttctgctaaaatttttccttaccaacctcctcacacaaatgtaaccatttcctcctctgggtgcctcctatccccctcacacagtcctattgtcctcttttctctctaccaccattgtaagtttctatgcctgtttcccttagcagaggtgagctcctcaagggcacagtctggtattatttactttcatgaccctggttcctagcagggtactgtacacatggtgggtaaccaggaatgttggtggagttgtcttgggtgagattgctgggcgtctcatcccctctgactctgtggtgatagcaatagactaatggttgcttgggactcaaatgcagccacactgtgtcccaactaataaagttggtcttgttctgcaaaggaaaataatagaaatcatgttctgccacttaattcctcataaggtaacataacatgaagagacttacctgttgagagttgtactgaatctgtcaaggaagatactgtgtatcagaagaacacccaaccagtttgtgcctctcatctattcattcctgtattaaagcattcatgatgtattttaaaagctgtgctcccagtacttgggtacaacactgactaaggcccagacattagctcagttgttttgatttgtagatcccacaagtatgtgagaacttgcaatatctgtgtttctgtgcctggcttatttcacttaacatgatgacctccagttccatccatattattacagataacaggatctcatgcttttttcatggctgaattgtgctccattgtgtataattggagtactttctttatccattcatctgttgatggacacttaggttgcttccaaatcttggcatttgtgaatagtggctattgtgaatattggagtgatgttatctcttcaatatatgatttcctttcttccaggtatatacccagcatggggatttctggatattgtggtagctctatttaatgttaattttaatgttttgaggaacctccaaattgttctctatagtggttgcactaatttacaccaacagtgtacaagggttcccttttctccacattctcgctggcatttgttgttgcctgtcttttggataaaaaccattttagctggggtaagatgatatctcattgtggttttgatttgcatttctctaatgaccagtgatgttgagcaccttatcatatgcctatgtggcatttgtatgtcttcttttgaaaaatgtctattcaaattttgcccattttttgattggattattagatttttccttacagagttgtttgagcgcttcatgtattctggctattaatctgttgtcagagtgtgactttgaaaatattttctcccattctgtggtttgtgtcttcactttgttgattgctttctttgtggtacagaagctttttaacttgatctgatccatttgtccatttttgctttggttgcctgtgcttgtggggtagttcttcagaaagttttgcccagaccaatatcctgaagagtttccacaatgttttcttgtagcagtttcatcgtttgaggtctcagatttcagttttgttttttgtttttttgttttttgtttttctgacagagtctcactctcttgcccaggctggggtgcattg

SEQ ID NO: 586351 - DNA, 4001 bp, Homo sapiens
aatggcactaatctctgcttctaaactttctacatgttacatgatctctcaggccaggacaaactattgagttaatgtgtgagcagcattggcccccgaggaaagatctaggtgagtgtctagattcacatgattccacgtcaaggcagaggctgtgcttggcaaactgtttagtttctttccagctcccctctgtttggtagagtaatgctgctttttgttacaatgaagaggctaacagaaaaatccatcatctattgcatgtaattgtataggcctaagaagggcatggtctacactatagcttctgaatcctgggctgtaccggcatcgtctaaggctaaggtattgtctgcctgactgccagaatctgtagtgacagccccacaacatggccagccacacacagagtgacactgatggtgcccttgtgtccaggcttcaagcagatgagatgccaacatgtttgtccttcaagtgacctccactagggggccaggacccatgaatatctatttggagttctaccctgaggggtaaggaatattttctcacttcatcttgatcctacctggatgcttttgctatcatcactggctcacagtcttgcttactttctagccctgagagtttaggataacctgctaagcaggtgtatttgaaatgggggtattaaaataaactcttgggaaagtatttttaaaaagacatatgcagtcttgtcctagagatatatatttgtacattagactcatattcctgacattattctggaaaggtgaggttatcttatacacatttattgtcacaaatactgaactaatagccctcttttatcactcagaaggaacatgctggaaatagtctatctccaaaaaaatctggctttaaaaaggatgaatttaagccacaccaattcatgttaaattgccagtagatggaaactatgttaccacaactcactgaattgctaacttttctgtgaaagaattaaaacgaggtttgtattttctgtttccatgtgaccatgattccttactcttaataactgtgaaattgagttagaagtaaaatgtgacaggcgggaagcctccagtacacacagtagggagtgactcttctctccacctgctctaggatgccaggatctcactggtgagaagattcaccctcttctcctgcaacttaaagggaaaaatgtaaaatccaaattctggtttggtaagctgggtacaaaccattgtctattagattatcctcaatcaatgctgtccctaaacccttctttccactaaagatgaatgggggagatgcttatttattcctttatagatctgcaaaacatccatcataacctctatatgtttgtagcatccaacacttaagctacttctccttgaaaatctttttttttcttttttttctctttttttttttttgagatggaatctcactctgttacccaggctggagtgcagtggcatgatctcagttcactgcaacctccgcctcccaggttcaagcaattctcctgcctcagccacccaagtagctgggactacagttatgcactaccatgcccagctaatttttgtaattttagtagagatggggtttcaccatattagccaggctggtcttgaactcctgacctcaggcagtccacctgctcagcatcccaaagttctgggatgacaggtgtgagccaccacggccagcctgaacatcctttttgctattcaaaacagataagggaaagagaggcctgattagcaccccaagtccaaggaaacagagaagaggagcctgaacagttactcacagatagaggagtatcaggctgacagccaggagaagccaggtttccacggccaagtttgggatgagatccatcactactttccttccttatctctctcctctgagtctttttttcagcagcgtgctgctgtttgctgggctgtgtgtgtggagctttcctgccctgcacagcagtgattcagtgaggctgttggattgtttatatgctggagaaggaggcagggctggagctgcagccagtagcagggcccccgtgctctgcctgcagtcggaagaggcttctccacctcggcagttggcaaataatcacacacacaccactcactgacctccattgagttaatattctatgtagaatcatacacaactcaatcaatgttactggggagtccaagggttctgggttcttatcacaaactcaagtggagccattggcataaaatctattaactctcctcttgtctctatggctgtcctcattccagaatacttgaaactcatcccaacaagccatgcctacagatctttacctatgcctggagtgtgcctgtgccccctagaagactcctacacatcctttcatacccagccagacagagccttctcttagagtctttcctcaccaaccccctcacacagaagtaaccatttcctcccctgggcactttccatccccttcatgcagttctattgtcttctttcctctttaccaccattgtgtgtttccaggcctgtttcccttagcagaggtgagctcctcaagggcatagtctggtcttactcactctcatggctctggtccctatcagggtgctgtacacacagtggggaccagaaaggctggtggagttgacttggctgagattgctgggcccctgtgtgtcacttcctctgactttctggtgaccactccatcttcttaggtcattaatacagccagagctcttggctgtgcctcagctgctgtctctgcactttcagatttgtcctctgtgattctgttggcaagaggacccctaaaaaagagacatggcatggatgagatggagctgatggcttagtggaatagcatcaatttgtgcttcttcctctgtagctttcaaaagtcctgccgtagatagaaagttagacaggttctttgccaaagagtggccccttctctctggaaatactgcatgtctggaaacagtaggggagaaagaagagaagagaacagctgcccagatggccaggttgacccaaaccacctcagccagcaacaatggggcagtggtcactgcaggtcacacagcatcaaggactccaatgaggtggtcccagcctcttgagggtggaattggaattcaaagcaaatggcttcctttttgacaagtggaggattttctaatgggaggagagcaggtgccaggagctggtagagatgaggcctgtaataacagttgctgccacctgtgagccctgtgacccattcctgatgggagagatctcagtgatgagggtgtgaaaattatatcagctcattatcatcactcacacccaagttctgtgtctgcttggcctgagaaatggattccatgacaaacaaaatctcagagttgttaaaactcagtagaaacagatgatgtttaagctgtgcttgttcacttccttctctctttattctttctcaggttcagcactcctgcagaaactgatactcaccccagaaagacaccttttcccatccctctggcccctaagcctccagggctgctcggcacctggcctcagcaggtgaacatcatgccagattccttgtcagattcaaggccaagtgggtgaatgtcatgtgcagtgttgtgccaggtatgtgccgggagccacatgttccttggggacagcctagtgaagcaggagacaaataaacatgcttggatggaggtatgcatgtgctgtaactctggaatccctggaataatggagccctacagagaggtacctaagaaaagaagtgacagcgtcaaagcaacaaaggacagacacgggtaggtgggtgacaatccccaggagaagtaggataaaagtccagggaattctggtacatttctgtctcctttcagtggcttcgctgagcacattaaatagggccatgctactatccccagtttacagatgtagaaactgaggctcagtgactgcaa

SEQ ID NO: 586352 - DNA, 4001 bp, Homo sapiens; identical to SEQ ID NO: 586351

SEQ ID NO: 586353 - DNA, 4001 bp, Homo sapiens
aatgtggaattcgtgtccccagagggcccactatattgtttcttcactacttactactactactactcacaattttagtcccagatacttgcttaaagaaggtatagaaaaagacaagcagtaacttgtagtatagaaagaagggaaatgtttaagaagctatatttacttctcagtaaacaatcaatctcatgcttctctcactgcaagtgaactagagccactgattttagagtttttaagagagtagatcagctctagcaagaactctagcattcttcataaaagtttctttagatgccacaaaatgagacctgcagattacaacattaagtatcctgaaaatcaaacaaaataatgaaaaagggtaatactcctcaattctctggtggtctcaaatagaaaggagcaccacaacctcacagtacacctcagctaatagaactatctttaaacactaaaagtaactttgtcttcccagagacaaatatcatttccttaaagatcccatgtgtaggaaaaaaataaataaataaataactctttcttatgcctggtatggttcaaacaaaaattattttaaaagctacttggtcaaaagtttgtacattgcattgtcagtaaaagggtagttttcaaaagctacttattgctgactgtaaaaggcacaatcaaataacatttgggagattgaaagctaggttaataaggctgttaaattgaagaaaatgattttttttttttttgagacggagtctcattctgtcgcccagactggagtccagtggcgcaatctcggtttactgcaacctccgcctcctaggttcaagtgattctcgggcctcagcttcccaagcagctgggactacaggcgtgtgccaccacatccagctaatttttgttttgttttgttgtattttagtagagatggggtttctccatgttgttcaggctggtctggaactcctgacctcaggtgatccgcccgcttcggcctcccgaagtgctgggattacaggcgtgagccactgctcccggccgagaaactgttacattattagcatcagaggaaggcccttaccacactccagtcactaccattaccacactctacacatcctccttaatatgggtataaaccaccattaggggcactgctacagcccacagaacactgaaccacacagggcagcctccaggatgacgggccagctgccaacagcatctccgtcaggacccccaccaagggccccaacgaccaccgggtcgttcaaacccacagccgccaatccagccaccgccactaggggcaccactgctgcggtcagtacagaccgctacaaccacaaatgccgcaaccacgaccccgtctaggatcagatacacagccggggaggccagcaccgccccccaacacaaggcaatggcgggtgctacagccagcgccaccagcagcagtgccgccgccgcagccactactccagcccccagcgcgcctgccaccaaagccacgccaagcatggccgcagtcgcccccgcccttgccatccactgagccggtcggggccacggagccgcccacgccagcccttcggccgcctcagctgcggcgcgcgccccactcagaccctaaagaatgtacgtaccacccctgcgggcagctggaccaggtggccggcggccagacggatcaggtagaccaggctgagggtgaaggcgcaggcgatcagcagcatggacaagaggttgccgcctgtcaccttctccatcgcctggcccagcaccgacccacccgcctgcagcaagcccagcagcagcatcccagccgccgccgccattcactccgtcggaaacactgaaggccgaggtcgccaccgctcctcccaatcgacggaacgagagaagctggcagatggtcgtccacagggggccttgccccaggtctcctactaaacccagccccacccctcgggtcccacgcgcgccaccccgtgcgtcacagaatggggcgggatgttccgctggccacgccccttaaataacactctgtgaagccgtggtcttcttgcgcgggatagggcacctgaggaagcgggctgcgcctgtggcacagtggtacggggccggaagataacttacctgaagaggcgatcaatccctgagaatcgcgggcgacccgttttttgtgtgcccgggtgcggggtgccgggacacggcgttgaaggcgctgagcggagggatctcagggcgagctcgagcggcgacggcgcgctctgtgattgcaccgcgagcgcctgaggtgatctcggcctacatcgcgtcagcggggccttgggcgtgagcaccgccccctgtccggacgcagggtactggggcacctcgaactgtggcacctcacccttctccggggccacgtcttggggactccgacagccccaaataagccctcggggactggggttgtgaaaagcgaggtcgtgaagacgccggcctcataccgaagggtaggacggtgaggtcagccccgtcccactccaactaaaatcaacctgacaggtattaatatgccaccatgaagttaacaaatgttggtgattaagtatgctaggttttacgaaaacagattttccaaaataaatgtacatgttttaggacgtcgcgagccgtttgaggcagcattccccaaggacgccacttagtctgtaggtttagcggctagaaagattcagaagctgagttcagtcctgccgccacaatcaatcttcgctcctatggcttcacagaagcgtctcccatgactaccaaatttaactccttccagatcacccacgggagcacctgaccggattcatttatttaatcaatgttaagaactaggttttgtgctaagctaggggatagagcagcgaatgagacaaaactgcaaggccctgggggaattagtaggaatatccagtgaaagggaaattaatgaattttataagtatactaatcaagaagtatattcttttcctttgaggtagaatgtaatatagcacctcccctacccaaggcctgggttaagagtatattaactgcttatttctcccctatgcgtggagaggcttatctgtgttccatcgtttcacattccttgaggcacagcgagttcttgcttccctccctagcgctgctgtaaagtcacaaaactgattagcaagtgttacaaaagcatgtattcccaaggacgtaagacatatggtgtaacaaatgtaagagtaatttactgcctttgttcttgcttctgcaagtacacttcatgcaacacgtaactcccaacacaaactgcttaaaaggtgattgatccctttgttcggggctcagactttctggaccctagtccgactgagccggtgatcaccttaataataaaggctctcctgaactctgctcggtctctcccgtctatgatttgtcccgcaacaccagttgcctgcggaacacctctacctagagagctaacactcatccccggtcagtaaatccaaaactaaacccgttgcctcctcctaccaacctgtccctcctataatgcctgtgaagaaaaggcatcactgtgcacactgttgccctctccatgcttcatctaatcagtcatcagatcctataattctaccaccttaaaagtttcaccgtttcttccgtccagtcgcggtggctcacgcctgtaatccctgcactttgggaggccgaggcgggaggatcacctgaggtcaagagttcgagaccagcctcaccaacatgatgaaacctcgtctctactaaaaatacaaaatattagccggacgtggtggcagacgcctttaatcccagctactcgggaggctgaggcaggagaatcacttgaacctgggaggcaaaggttgcagtgagccgagattgcgtcactgtactccagcctgggcaacaagagcaaaactctgtctcaaaaaaaaaaaaaaaaaaaagaaagaaactgtgat

SEQ ID NO: 586354 - DNA, 4001 bp, Homo sapiens
gccactgattttagagtttttaagagagtagatcagctctagcaagaactctagcattcttcataaaagtttctttagatgccacaaaatgagacctgcagattacaacattaagtatcctgaaaatcaaacaaaataatgaaaaagggtaatactcctcaattctctggtggtctcaaatagaaaggagcaccacaacctcacagtacacctcagctaatagaactatctttaaacactaaaagtaactttgtcttcccagagacaaatatcatttccttaaagatcccatgtgtaggaaaaaaataaataaataaataactctttcttatgcctggtatggttcaaacaaaaattattttaaaagctacttggtcaaaagtttgtacattgcattgtcagtaaaagggtagttttcaaaagctacttattgctgactgtaaaaggcacaatcaaataacatttgggagattgaaagctaggttaataaggctgttaaattgaagaaaatgattttttttttttttgagacggagtctcattctgtcgcccagactggagtccagtggcgcaatctcggtttactgcaacctccgcctcctaggttcaagtgattctcgggcctcagcttcccaagcagctgggactacaggcgtgtgccaccacatccagctaatttttgttttgttttgttgtattttagtagagatggggtttctccatgttgttcaggctggtctggaactcctgacctcaggtgatccgcccgcttcggcctcccgaagtgctgggattacaggcgtgagccactgctcccggccgagaaactgttacattattagcatcagaggaaggcccttaccacactccagtcactaccattaccacactctacacatcctccttaatatgggtataaaccaccattaggggcactgctacagcccacagaacactgaaccacacagggcagcctccaggatgacgggccagctgccaacagcatctccgtcaggacccccaccaagggccccaacgaccaccgggtcgttcaaacccacagccgccaatccagccaccgccactaggggcaccactgctgcggtcagtacagaccgctacaaccacaaatgccgcaaccacgaccccgtctaggatcagatacacagccggggaggccagcaccgccccccaacacaaggcaatggcgggtgctacagccagcgccaccagcagcagtgccgccgccgcagccactactccagcccccagcgcgcctgccaccaaagccacgccaagcatggccgcagtcgcccccgcccttgccatccactgagccggtcggggccacggagccgcccacgccagcccttcggccgcctcagctgcggcgcgcgccccactcagaccctaaagaatgtacgtaccacccctgcgggcagctggaccaggtggccggcggccagacggatcaggtagaccaggctgagggtgaaggcgcaggcgatcagcagcatggacaagaggttgccgcctgtcaccttctccatcgcctggcccagcaccgacccacccgcctgcagcaagcccagcagcagcatcccagccgccgccgccattcactccgtcggaaacactgaaggccgaggtcgccaccgctcctcccaatcgacggaacgagagaagctggcagatggtcgtccacagggggccttgccccaggtctcctactaaacccagccccacccctcgggtcccacgcgcgccaccccgtgcgtcacagaatggggcgggatgttccgctggccacgccccttaaataacactctgtgaagccgtggtcttcttgcgcgggatagggcacctgaggaagcgggctgcgcctgtggcacagtggtacggggccggaagataacttacctgaagaggcgatcaatccctgagaatcgcgggcgacccgttttttgtgtgcccgggtgcggggtgccgggacacggcgttgaaggcgctgagcggagggatctcagggcgagctcgagcggcgacggcgcgctctgtgattgcaccgcgagcgcctgaggtgatctcggcctacatcgcgtcagcggggccttgggcgtgagcaccgccccctgtccggacgcagggtactggggcacctcgaactgtggcacctcacccttctccggggccacgtcttggggactccgacagccccaaataagccctcggggactggggttgtgaaaagcgaggtcgtgaagacgccggcctcataccgaagggtaggacggtgaggtcagccccgtcccactccaactaaaatcaacctgacaggtattaatatgccaccatgaagttaacaaatgttggtgattaagtatgctaggttttacgaaaacagattttccaaaataaatgtacatgttttaggacgtcgcgagccgtttgaggcagcattccccaaggacgccacttagtctgtaggtttagcggctagaaagattcagaagctgagttcagtcctgccgccacaatcaatcttcgctcctatggcttcacagaagcgtctcccatgactaccaaatttaactccttccagatcacccacgggagcacctgaccggattcatttatttaatcaatgttaagaactaggttttgtgctaagctaggggatagagcagcgaatgagacaaaactgcaaggccctgggggaattagtaggaatatccagtgaaagggaaattaatgaattttataagtatactaatcaagaagtatattcttttcctttgaggtagaatgtaatatagcacctcccctacccaaggcctgggttaagagtatattaactgcttatttctcccctatgcgtggagaggcttatctgtgttccatcgtttcacattccttgaggcacagcgagttcttgcttccctccctagcgctgctgtaaagtcacaaaactgattagcaagtgttacaaaagcatgtattcccaaggacgtaagacatatggtgtaacaaatgtaagagtaatttactgcctttgttcttgcttctgcaagtacacttcatgcaacacgtaactcccaacacaaactgcttaaaaggtgattgatccctttgttcggggctcagactttctggaccctagtccgactgagccggtgatcaccttaataataaaggctctcctgaactctgctcggtctctcccgtctatgatttgtcccgcaacaccagttgcctgcggaacacctctacctagagagctaacactcatccccggtcagtaaatccaaaactaaacccgttgcctcctcctaccaacctgtccctcctataatgcctgtgaagaaaaggcatcactgtgcacactgttgccctctccatgcttcatctaatcagtcatcagatcctataattctaccaccttaaaagtttcaccgtttcttccgtccagtcgcggtggctcacgcctgtaatccctgcactttgggaggccgaggcgggaggatcacctgaggtcaagagttcgagaccagcctcaccaacatgatgaaacctcgtctctactaaaaatacaaaatattagccggacgtggtggcagacgcctttaatcccagctactcgggaggctgaggcaggagaatcacttgaacctgggaggcaaaggttgcagtgagccgagattgcgtcactgtactccagcctgggcaacaagagcaaaactctgtctcaaaaaaaaaaaaaaaaaaaagaaagaaactgtgatatatataaatatatatttatatatttatatatggaatggaatgctacgtggtcacaaaaaggaatgaatgaatggcattttcagcaacctggatgggattgaagactattattctaagtgaagtaactcaggaatggaaaacaaaacatcatatgttctcactcctaagtgagagctaagctatgaggatgcaaaggcataagaatgacacaatggact

SEQ ID NO: 586355 - DNA, 4001 bp, Homo sapiens
cttcaataaacttcccataatttacctcaccatgcccctgctgttggcgttgctgtttccaattttttgctattttaaacagcataatacacatctttatacgtgaggggtttatttcaaggttgcttccctgtgatatattcccagaagagatactaacaacccaaggacaattttaagacttttgatacttcatatcatcctttgttatagtactcaagacctgcaaattgctggagcacattaaagcctcctcttttcctctttattcctgctttaatcttcaagtctacatttctttactcacagagcccaaagcaccttacaaacaaaactgccaagccagctagctgccttgacgctaatgtccaacgtctgcatattacagttgtctttcttttctaacaagggaaaacagctatgcccaaattgtgacaggcaggaaacacgacatccaccgggaacccattccttaggatctcatggctccagacagcctgactgtaggagggttcgcaactgggcgccttcgttccacagcgctcccatcaacacacccactcggtgccacagtgctacccctagcttcaactataagaactgaactcgccaaatgccatgacgggtgccaacttcccaccatcctggctgcatcgcgtctttcagcaaaaaaacatctccctctgagcagcacttgaattctggaaggcaccttgatgatgaaccacttcatcctgaagcattcaatactgctgattcttacaggcagctgcaccggcagcctgtaattaagatttctctaaactgctcccttattacatggggttctgatgattctgatgatttctctgtcagctcaaaggagatcttcaggaaaaaaaaaaaaagtctagagaacctcaacttcggctgttcctgtaaaaacacgggcattaaccctttgctttccaaagcgaacacccactccatacagaggcacgttcctctgtttttaaaatctaattcccagcatgacccagcagtcatttgtattccactaaataatttccaacaaacacgattcctccagcaagaggaaaccgaacgtcagacacagaccacctgggccacgacgcgcatcgacccgacccactcgggagcacacctggctccgggcacacctggctctccggtcttgcctctgtgctgggtgcagctcgtgtctcccaccctcggctccacggagttttttgctcaatctgtcgcgtctgccgtttcctaaaacgtctaccctgaactgaactccagctggccccctccccgttcgagcaaatccagcgaccgtttctgacccaaagccaagcagactgtcacgctttccaaccgtttcccctgccctcccgtcctgtacactcgaggagcctccagtgcaaaactttcccctcccggtttcccaccggctcagccgcttccgcccacctgagctgaaagggggcgtccgaaacgccgggctccggagggcatgaacgcccttggcgacaagatgcggggaaggtcgccccgcaaggtcccccgccccagaggagcgacacccaaaccccggcccgagactccggggcgaccccagcccgcggcagccccggcctggtacccagaccctcgccagcgccgaacggcgaccccggcccgccccctccctcggcccccggagacccagcctcggccctggcccggcgtgcctcaggcctccagcggacgccgctgccgctgcccccgaccccgtctcctccggcgaaccccggcccagcgccgcgccctcgacccccagcccccggcccccgaccccaggccgccggcgagcccaccacacctccgacactcaccgccaccaccctcgccgccgccgtcttcatccatcttgaggccactcccgcagccggcgagccgggggccggcagcagaggggccgcgggctggggacgccgccggagggagcgcgcaggcgaccgggcggctcctcagcgcgcggcccgggtcgcggccgggcctcctcccgccgggcggggcctcgctggtcggcgtgccgtcacgtgacccatgccccgcctctgcccgcggtgggcggggcgtgaggccgcgcagccccgccctcgggaaccggccgggccggcggcgtctgcgctggggaaggctgtagacctggcccctgaagtgcaggccgatccggtgtgcgtggagcgaagcctcctcgccctcagcattccagtagcctgcggacgggcgtggggccccggacactggaacgccacactctgcaaaacccagtggccaggggtgcaacttgcacgtgcactcggggtaaaagatcaagaaacgaatgcattcagaagtcaggcctggccaggctcggtggctcacacctgtattccaatactttgagaggctgaggtgggaggatcgctggagaacaaaagttggagaccagccccgataacatagcgacccaggcatggtggcatgtgcctgtagttccagctactggggaggctgaggtgggaggtcacgtcacttgagcccagtaggtagaggctgcagtgagttattattgcaccactgcactccagtctgggtgacagagtgagaccctgtctcaaaaaaaaaaagaacaaggtcaggccttctccttcctaagacatgcatgtcagaagaattccagcctttcagctgtcttatatttaatggagcctctcctccttccctcctggtgagtgcatttttaaattaacaaaatgcagggcttgtaaatgaatgtggtcatgaggttggaacggaatcccgattcaacacacctggggctcagctctcaaagggcattgtaggggttggccaatctggcggctgatgcccttggagtttagcgccagtcttccttggagagctgccagctgtcctggatttatgatgcaggaggagctctgaattcagtttcccttgggcacagccagggtcctcagcacaggcctcctgggcagaaggcctcccctggcccctgctccacatcgatggatctcctctctcactccccatatctctcttccagtaactcctgaagcattgcttgtggcccctcccaagcctttctgttggaactcaatcgcattaaagaaaagcaaacattgtaatggaggagatagctcatctctaatataattttccagcaactgttttatatttacaagctgtccattgaaccaaaggatccttccgttgtcatctatcaaagtggacaatttcaccttttggttcaaggttgcgggatgatttcaaagttcaatcttctaataacctcaagaattgaacaccaagcattctcatgcaaccaaacccacgagggacactttttttttgagacagggtctcgctctattgcccagtctggcatgcagtgtctcgagtgatcctcacacttcagcctcccaaatagctgggaccataggtacatgccaccatgcatcggttaatttttgtattcttttttagagacgagatcttgccatgtttgcccatgcttgtctcaaacttctggactcaagcgatcctcccaccttgacctcccgaagtgctgggattacaggcatgagccaccacacccagccaagggacactgctgcgtgcaaaggtgtttgacagcttgagtgacaaagaggcaccagaaaaggggtctgggagtcaggagatgtagggttcaactcccaacccccagactcggcttcctgatcttgttcccgtcagctttgtcatcttggagataagagcatcgttactgagaaaaaatgacagcattactttgaacttgataatgagatatgcagagctttgaactcaaagatactatcaattataaatgctttttcatgtcaatcttaattctttaggtgtcttagaatgtgatccacaggtgcttttctcagagttttaatctgaaagtggcttctctgatctccatctaatctaattttcat

SEQ ID NO: 586356 - DNA, 4001 bp, Homo sapiens
tgaggacgatcaagtaactgctgagcaaggctccaccagcacagtccagctttcctctgtgcatgagatacaacgtcagaatgccaatccacctggcaaaaaaaaaaaagggaagggtcagaaatgaaatccaaggagctgctgtgtagaacatgatacaaagaaataaaaggggacagggcgcggtggctcacacctgtaatcacagcactttgggagggtgaggtgggcggatcacaaggtcaggagatcgagaccatcctgatcaacatggtgaaaccctgtctctacgaaaaatacaaaaaaaaaaaaaaaaatagctgggcgtagtggtgcgcacctgtagtcccagctactcgagaggctgagacaggagaattgcttgaacctgggacgtggaggtggcagtgagccgagatcgtgtcactgcactccagcctgggcaacgatatgagactccgtctcaaaaaaaaaaaaaaaaaaaaaaaaaaaaaaaaagaaataaaaggagttaatattttccaaaacaaggcaaggttcactttggaatataattttctttttgtagagacagggtcttgctatgttgcccagactggtcttgaactcctggcttcaagtgatcttcctgccttggcctcccaaagtgctgggattacaggcatgaatcactgcacctggcctggaatataattgccaacaataaaagatctaggcccggcacggcggctcacgtctgtaatcctagcactttgggaggccaaggcaggaggatcacttgagcacaagagttggacactagcctgggcaacacggtgagactccatctctacaaaaaatagaaaaagttagctgggcgtggtggcacgagtctgtggtcccagctacttggaagagtgaagtgggaagatcgcttgagcccaggaggttgaggctgcagtgagtggtgatcgcaccactgcactcccgcctgggtagcagagtgagaccctgtctcaaaaaaataaaaagaaaaggggtctcactatgttgcccaggttggtctcaaactcctgccctcaagcaatcctcccgtctcagcctctcaatgtgctgagataacaggcgtgagccatggcgcccagccaagaatctacttttgcataacaatgattcattccctgcacagatcctctgggaacagacttcaggtaccaatgccacttcccactgattccacactttgaaagacaacagcgttgtatgttgagcctgtctgcttctcacgaaatgcagccacaaccggctcggtattttttcctatccttcgtgttgcagattcaagtgccccgtacaaagggaaggaagggcacaagtggctgctcccgcctcaagaaaggagaactcgaggccaaggcttttgccggcggtaacaccctcgtggcaccccagggccaggtctcggcgctgcacacaaaggggtgctcgcgtcctgctgcgcggacttcgaaaccccctgtttgtcccccggggtcagcccacacactctgggggcttcggtttgtcatccgtcaaatggacacagcaccactgcccacctcttcgggcagtggtgagaactcgataagaggatgcgtggccagcgctgggaccgcgacagtgcttgggaagccacttctgtcaccgtctcaagggacagctcgccccccgctccctctccggtgggctccaccgcccccgtagccgccgtccttaccacagcactcgcacgaccagctcgaagaaccctgggaagaccaagtcgtcgctggcgatggcccagcgccggccgaagagtaccatccccggcatggcgaaggtcccgtagctcgcactcaggagagaccccgcgcgccgttcaccgagaacaaaccagcaccctccggacgccgccaccaaattatcggcgctcaagcgcaaacgcagcgagggcggggacctgcgcatgctcacgctgaggccgagatcggcgcaagcgcactgagccctacaccgcctcttccgccggagctgtctgcgcctgcgcagaaacgctgatccggaaggcgctggctgagtcgattgcaggtctgccggtcggtgaaatccgttctggtattttctttttctttttcgtgaagagtgcagtgatatccgttctggtgatatttccttttccttttttttttttttttttttttttttttttttttttttttggtgacggagtctcgctctgttcccaggctggagtgcagtgggtgtgatctcggctcactgcatcctccgcctcccgggctcaagcgattcacctgtctcaggctccggtgtagctgtgattacaggagcgcgccaccacggctaatttttgtatttttagtagagacgaagtttcaccatgttggccaggctggtctcgaacccctgacctcaagtgatccgcccgcctgggcctctcaaagtgctaggattacaggcgtgaaccactgcgcccggccctgtttgtctgtttgtttaaggcagcgtatggctctgtcgttcagggtggagtgcagtggcgcaatcatgactcactgcagccttgaactcctgaatgccgccttgaattcctggattccagcgactctcccacctcaacctcctgagtagctgagaccaaaggcacgtgccacactcccggctaatttatttttatttatttatttatttatttatttatttatttagagacatagttttgctcttgttgccccaggctggagtgcaatggcgcgatcttggttcaccacaacctccatctcctgggttcaagcgattctcctgcctcagcctcctgagtagctgggattacaggcatgtgtcaccatgcccagctaattttgtatttttagtagagatggggtttctccataaattttcctattttttgtagagaccggagtctcactctgttgcccaggccggtcttgaactcctggcctcaaaccatcctcccgccgcagcctcccaaagtgctggtattacaggcgtgagccactacacctgaccgaaattttcattttataaggagggacgcttcaggcctggaggaattagctagcctagagacccaggctgtcaatggcaggtgtgggactcatatcccgttctgtgagacttgcaagcatgggacaacattgcttccatctgtgccccttgctgtaaggagcccgtgttaggaacccctcgagttcagggtctgaaaccaccctgcagctggcggggtggagtctgagcgcttttcagtacccccactgccccaccctggtctgagccaccttcatctcctgcctgggctcatcaccccactgtgctttctcattctgctgtgccctcttcagcagccagggtgactttgtgaaccttcagataaagcctgcaccctgcctgggactttgcaaggctgcactttgtgcataaaattacattgcaggccaggcgcggtgcctcacgcctgtaatcccaacactttgggaggctaaggtgggcgaatcacgaggtcaggaggagatcgagaccatcttagccaacatggtgaaacctcgtctctactaaaatttaaaaaaaaagttagccaagtgtggtggcacgcacctgtagtcctggctacttgggaggctgaggcaggggaatcgcttgaacctgggaggcagaggttgcagtgagccaagatcgcgccctgcactctagcctggcaacagagcaagactccgtctcaaaaaaaaaaaaaaaattacactccagcccctggcaaaggcctttccctggtagtcacacatcaaaagtttgtaagggctcatttatctgtctccctggttactatttgcctctatcacccaccccactgcctgccgccttttccccctctgaaaagacatcagggtcatttttgctccaggggttctacattctgtgtttcctctgccaggaatagcccccctgcaggttttctgttactggatgga

SEQ ID NO: 586357 - DNA, 4001 bp, Homo sapiens
ttacccctcccagatccttaatgtccttttgaagtttttcagatatggtgacagaaggtaagtcaaggtaaaatacttttccccaaagtggcttacatttggatttttctggcctgttatcagttttcagagatttcagagatggtctgtttttttcatttttgacttggattccacctattaaagatgtttagaatcagatgttttacacagacacttttactatttttaaaatatttcattatacaatattacagaataaaaatccttacaaccctaccagtttaagttattagcattgaaatgtatttctttgtagtactacttaggatagaggcaaaatgccctatatactttcacagaccgcatattgtaaaataatagttgactcagcaagaaatattcgtgtgtttattcctgaggcacggaactatataaaactcttttgaaagattttctttttttaggatgtaaactccatggggatatttaatactcaactatttattgagcatctgccattctgctgaacattcaaaactggtgtttaaacttcatttagcgatgaaagaatcctctgttacgcagaataacctagtcctcaagggtttcagactgctcaagttttagtttcatataaagtttgtctgcatattaacaactaaacggtccatttcacatacaatttgtctacgtattaagaacttaacggtccattacgaagaactaaacctttcattattttcattagaaacagatctgagatccaagcaactgctttaaaaattaatttttcaaacgcaatctgttcttaaattggtagttactacacacacacaaacacctgtacaaaaaacttaggtgctggaatgtttcaccaaataaagtgactgaaaatggaaatttgcttttgtttccctgtttgtaatgttgaaaccagcaatggggtgtttgaaatacaatgctttcccccaacttatgaggaaaggaaaataaactttcaagggtaagaccaaaaatccacccacaatcactcaatctaatcctgaagcgaaaagccacgagcgcgtctgactttaaattgaggatgcagtccgtcgcctccaagggcccgggcggaggcttagcatatgcgagagcccgggagcagacagcgccgcagtcccggcgaggtcccggatctgcacattgtttgctagttttcaaccgaaggcacgaccgggaatcaatctgggaccgccgctgtaaacggcagagcgctcgaggggccgggtcaggatccgttccttcttaggcaaaacactgaacgggggctccttccttcagaccccagaggccggtcagaagaaaagaagctgaggacccggcgggagaagtctgaagaatcaatggtggaaccacgaggggaggaaaggattaaagggactgcaggcggaggaggggcttcttaccctggaaatgtcctttactgtggatcctcatggctccggagttcatggcagtcgcccggcacctacatgctgggtccggagaaagtgtcgcaccgggcagccgcgaaagcacggcttcccccggcctgttgacaggacggccgcctctctccttccgccagctacggcctctacgcagtagaggtaccgcgtctgcaggtcgggtttccggggccggatccggctccaaggcgcggaggaggaaggcgcaaagcacaaacgagtgggctgcggcggttgaagatttgaaaacgcgtcacgcggccgcggcgccgatacgcgcgccccgccccgtctcacgccacgcgccgtgccccgcctcgcgctcgcccctcgtgcctgccttctcgcgctgcgcgccccgccccctcacgccgccgtccttctcgcgcctcgctctggccctgcaggttgtgtttccgcctctaccccgcctccattccgttgctctctcagtctcagacccgggctctcggtccgccgcttcaggtcttggcgcagcctcagagagttggcgcggctctgtgttgaccaaacctagtggatgcagttagcgccggagcccggccccgcccgtcaccagggttattcccgccttctaggtttgccaggactgccggccctgcagctgccttctgccccaggtatgctaattttccactggtcggacgtctgggaagctgaaggcgaggggctttggctgagtccggactcagctctggccgggcccggggccggggccggaaccggagccggacagcggcggcagccgcagcccctgctcagcgcgccctgggtcgcacagcaagcggggttttcccgcggtcactgccgaccccaccggctgaggacagctgcagagggacgtgcgggagtgagggcggccccggggggcgtctgagggagggtctggccaggcggccccggccttgacggcagcgccaccgcagaacgcctccaggtcactttgtgtccttgggtagttggctatttgcgctgtcctgttgacttttattgtattcagacctgttttcttttagttgagtgtaagtttatttcaacaatgaaggagtggaaagtaacatctcatttttttttcctgtaaaacagagattaaagatcaaattaaaatgcttgtgaatatattttaattttataagttggaacatgcctctccaaaaaaaaaaaaaaatctgtttcttcaggaggaagaggatattttgaactattttgcattcctctactccaggccataataggcactcctgtagtggttgatttttttacctggtagctcaaggaagtcagagtatcagcgttacggttttgcaggtaggtaccttaaagaatagacaagggtgggttgtgacaagattagctggagaacgcagagaacaggtttgctaagggaaatgagagtttggttttagacaggtttatgttgaagggcctggggcgacagtcatggaactatgcttattagacagttaaagatgtttatgactcgagagaaatgtctagcagaagtggacatgggaagaggaaatagagattgatttgatatctctccaataaaatatttctgcatcaaggtctattgatgtcaatcatggggcaattcattagaggttaacagatcttgagtggtggaaggaagtgtagtttgaacaaacatattcaatattgtaatttctatgggaaaaaacttattttcaaaatataagctacagagagcacaaaatgtttatatttacagaaagatttaaaaagttgggaagcactaatatagaatgtagttaaagctttgggaggaaatgaaattgccaaggagagcatgtgaaataagagaattgattataagcgtcgttgatgaaatagtgaaagagatggagaaaatgccacagaattgggaagagactgcaaacattggaatcatatgggcttcactaactacttggcctctgggtaattttgagccccaattttaatctattaaaagggggtagtacttctcagggatgttgtgaagattaaatgaacatttttgaatgcttagtacagtgcctggcacagagtagagctccttaagagctccataattactatcattctagtgaacactgcaccagttccttcatccccaggacagataaggttaagacttgaaaaataagtatttgattttggcgtttcaggtatccttggtttccttaagggtaatttgagtaggtggcagagataagtacagtactagataaaaattataatcttgaagttcagacaggttgagtgtactctttcaaaaaaatttgttattgtaggaaagtataatgaagggaagactggatctttggaaggtttagaggatgtgggaaagatttttaagcatgcttctattgaggaacttttttttaaaaaaggaagtcccattttatggtcttgtgaaagatgaattgtgtgtcttatttgccgtgaagaggaaggacagtaacatagttgcaccctatgcgg

SEQ ID NO: 586358 - DNA, 4001 bp, Homo sapiens
gcaggagcctggaggtagggagggagcatagcatggctgtctgggcagatgagtccagtgagatgggtgggttctgacttcatgaggggaaagaggaggctccacaaccctcatgagggacagagagtagatggggtgggtaagcaccgggccaggagtggtagcagacagctctcgtaagcagcccaaggaaaggctaggaacataggaggtctgaagagggaagcccaaactgccaggtgggctgggaggcatcatcccaaaccagtgatggttcctgagaagactgatgatgaagagagacctggaagggagatagatgaggagtgccaggaagctcctaggtaagtctgccagggtaaacagagtgatcaagagcatgttaagaagcaaaatctttaatttggcagggctgaagaggggcaaagattcttctgggttctaaagccaagtggtatgatgtggacatgaaaatggggcactcattgcagagatacttttgactgggtttgaagtaacaggagaggtctaagagaaacacgaacaggaataggagagaggcaaaacagagggctgacatctagaaactctcctgagaaaaataacactgactgacgtgggtaaatctgagggattataaagcaggcagaaaaccccaccaaggaaatgacgagatatccttctttagatgcctccaaaacagaagatgtgctgtttggcataagtgccatccagggcactcagacctgacaggagagtctacagagaccccatagaaccaagcaactggtgttctaaagctcttcccctaatggcccagggctgaggaaaaagcaaagccataacatcctcagggtcacaatagtacactgcataaaagccgctctgtgctgggcactacggagagcagaggagatgagaaagcacttacacaagtggagatggcccccacacaaggggaagacagttgggagggcctcagtgctgaccacagtgtggccccaccacgactcagactccaaggcccagtttctattccccaaagttggtcaccttagcccaccatactcagcatatttctcagaactgggatttctcaaaactggtcagtaaaaacaatttaagcaaagaggaaagtgaggatatcttgggtggtagagggaaaatgggaccttttcccaaatagatagcgagcatcctactttcgtacatcttcccatggctcaggcacaagaaagagtacactttttggagaaacgaaagttctgaagtccacgttcacagacagccaagaacccagatccctgagctcctcgtctgaagcccccagggcagggctcacattcacagcccggctgccaggccgctctcaaatgcccatccccgaacacagcgtttgcaaaaaaaccgggcgtggcttccgccttctcagagagggctgtgcaggaaccccttctccagggaagtcccaggactggaaagaagaacctggcgaagctagcaagcacgaccaggccgaggatccaacatggaagcccgcgaagcccacagtgggtggcgagcgacagggggaggggcggggactcactgggtccccccaagccgggtttaacctgtccacgatcggcggggcaaggggtcacgagggtgagacagcactcctgctgcggtgtggaggggcagacaggtaagccccaggccacctgcctgggcaccgctccgcgctcgcgctcccgctccccccgagtcccccgctcgccccagacagacccacccctgaggcagcccctggcccgaccctggcccgtctcgccgcccaccagtcggtcggggacttctcggtgaccacccgcacgtaggcctcttgcagcgctggcccgttccggctcaggttcgccgccatggcccgccccgcagtctccgcgccgctgctgtagcttccgggccgggccgggccgcccctttgacagccgacaagcctcgcctccgacaaccggaaaccccgccccacggcaggaagcggaaatggtaggggccagccgcacccgcgggtcctagcgagctgtccggccagctggtctagcatgcaggtcccgcgaatgccgaaggacaagcgggagaagggaggacccggccttctgtttgtcctcagggagggatcctggggcgcagactagcccgtcttctggtcccacccaaacggcagctcgacttggaagcctggccgcagggacccagtccagcccccgctagctgctctcacagcaccgtgcttattcttttctaaatcttgttatgtcgatgcgcttatttgaacgatcttgggttcactgcagtctccctccagacgaggtcttcagcctgtttgtggaccctcaacagtttgatctgtgaaagaaacatgcataaatgtatgaatacacgaataaatgagtgctaagtgacgatcacaccgctacaaacctaactgaaagtgactgtgctttctcactctcacctgagtttttccctctgcagtttggtcgaggccaggatagtggaggcatgaagagaacctgtcttgtgcttcacctgcacatctggctggtcgcccctagaaggtgtcagtaattcctcaatctgctcccctcctcctgggagcaccagtttttccatccacaaatctgcatacacttgactgaactagcttcttatctgtatgatagagaaacatgccaaagcgcaaggcagctcacggcttatttcctcccatggagaataactcccctgcctccttaaaatataaatcctgccgggcacggtggctcacgcctgtaatcccagcactttgggaggccgaggtggacgaatcaaggggtcacgagatcgacaccatcctggctaatacgatgaaaccccgtctctactaaaacaaaaaattagccaggcgtggcggcgtgcgcctgtagtcccagctactcgggaggctgaggcaggagaatggcgtgaaccagggaggcagagcttgcactgagccgacatagcgccactgcactccagcctgggctacagggcgggactctgtctcaaaaaaagtatagtatatatatacatatatacacacacatagtatatatatgtgtatatatatacacacacacatagtgtatatgtatatatactatgtgtgtatatatgtatacatatatgtatatatatgcatatgtataggtatacatatatgtatatatgcataggtataggtatacatatatgtatatatatgcatagatataggtatacatatatgtatatatatgcataggtataggtatacatatatgtatatatatgcataggtataggtatacatatatatgtatatatatgcataggtataggtatacatatatgtatatatatgcataggtataggtatacatatatgtatatatatgcataggtataggtatacatatatgtatatatatgcataggtataggtatacatatatgtatatatgcatatgtatatatgcatatgtatatatgtgcatatgtatatgtatatgtgcatatgtatatatgcatatgtatatgtatatatgcatatgtatatatatgcatatgtatatgtatacatatattatatatgcatatgtatatgtatatatgcacatgtatatatatacacatatgtatatatatgcatatgtgtatatatatacatatagtatatatatgtatatatccacaatcccttaagtccagatgtgctttggaattcaatctaagatttcagaaaagttataccatgtatgtcctgggtaagcccttatcacaggatctggacaggaactggtaatcagacatgttcatgcttttgctgtgatatgtgtgaataatcagctaagtgtgtgatatgtgtgaataatcagctaagtggaatataagacgactctaaatatcctcatgacaattaaggtcagtttttgctaccaaatgaactaccaaaatcttaa

SEQ ID NO: 586359 - DNA, 4001 bp, Homo sapiens
tatacagggcagcagtgtaagccctttacctatatcctcctaaacttcacatcagctctgcaaagtagcagcctgatcccctttacagcaatgcgaagaggctgagggaagcatgcagcaggcacggagctcctctcagcccgcacagctcagaaatggctttcacacttgcctctgtacaaaccagaagaccaggaccctctgctgtctctcaacacagtgggattctaaccttttctacgaggtcctgtgcccatcgctgtcccatatgcccacgaggtgcctctgggctccctgaatgtcttcctccagaaatgccaacaagcaccagataaacacaaaacatcagaacatttcttttttttttttttttggagacagagtctcgctctgttgcccaggctgcagtgcaatggcatgatctcagctcactgcaacctccgcctcccgggttcaagcaattctcctgcttcagccccctgagtaactgggactataggcacgcacaaccacgcctgtctaatttttgtatttttagtagagatacggttccaccatgttggccaggctggtcttgaactcccgacctcaggtgatccactcgcctcagcctcccaaagtgttgggattacaggcgtgagccactgcgcccagccgcagaacacttcttttaaaatacccgcatagtgtggttttcctagagccgttccctaaacttaactgctgactcaagttgagtgtctgaaagtaaaaccttcagaataatcaacatcttgaagagcagaaaacaaaagtaattagatcccccaggctatctctttgaatttgtggcaaggggagttaagggggatttattttaattattttcttcacactggctgtgtgtagacgcccacctagcgtgtgcccagaagacaggaagaaaagaaactgctgagaatggcttgattttgtttccttcagaaccatccagacaccccttaacttgctctgtggtcagccatccaggatgcctgtgttctagtctggggtcaccgcacgctgccagcaggactccggtgcccccagcaaaaggagtgtttttctctggcacccttgacaaaccaacagaggaccagcttttgtgcagtgattgtcaccttttggaggggaaactctgcttatctgaatgagaaattttcgcaaggagcctcgcccttggagtcttcaagagagaaacaagcttgtgggaagaacccatgtcacctgcctgaatttcgcttggaaactgaagaaaacaggctgtggagggcgcagcagaccactcagcagcattttcagtgacctcacactttcctcccttattcacaatagagctctcatttattgagcacctattgtgtgcccgcccctttataaaatcaaacctggtttttactatgatctgggggaggatgctgttaattagctcctctccttcacgtctgaggaaggaaaggcggccagggaggtgtgcatctgaatgcaaacctgagtctgtggggctgcatagcctccttctttcccacccatcgtgtggcctccacggtctctacatgcacatgagccagtctggaaaataatttccactcacttagttatgttgctgtcatggctctaggaatgtggcctaaaaagcaatccaaagtttcagattctctgcctgacctgttgcttgcagatagcacaaaaaagcaagccgacctaggttggtgcctattttcttgaaaagttcctgtaaaccctgtgtcacctgcacacactgaatgctcagctgtccctgtcagccgaacctccttcctcctgcaggaggagaattcagcacagctagaatcaaccggcaaacctcccaccccaaaccccagggtcacggccatccagagagctggacgcgtgagccatgaggacaaagagcagtactcacaggcagccgggagtgacttgctctctgtcctctctctctcctctccacagtgacagttaagaggcacagaagatgtgattgccatttatgtagacagagtgtctgcctccccgaagccaatcagagctgccggctctgcattatttactgagcagcatccctccaccctcccaccacctcctgcccccactctgcccccagggggagagagccatcctagcaggatggagaggagcatcagggcctgctgggactggcgagaggccaaggaaaaaatgggccctgtgttcccaggcactgtgtaggatgcagatttggggccagggctcctgggactctcccagcaactttgagaacgaccaggctccactccaagggtgaggaagggacggcgtggcatttggggagtgctcactctgggtctgctccttctgtgagggactattaggaccctgtgatacccgggaggctcagggtcccaagcccacttccccagatgagaaagtgaagtgagatgtagattaggtgttgagccgcatgcatctcaaactcctgtgctgttacccttaagcctatcagcatctaaaacatggtttgggctcagtctctcctcccaccatggggcagcaacagggaggatcatcttccccacctccaccccctccccccactcctggttgatgggtgcaatagaaggagcaggactccgtttctcctgaaggtgcacgcagagtcatgtgaagctaggaaaggggcctgggctttgcagaggaggaagagtggagaacagggtccactcagatgacgagcagcctgcaggtgcccctgccccgaccacacacacatgcacacacaccatgcacacttatgcatgcacacacatacacaagcatacatgcatgcatgtttatacacactacacacgtacaatagcacatgcatatatgcatgcataccacacacacatgcacacacacacatacctaagtgcatgcatacacacacatacacataccacatccagggcttgtggcacagtccagagctagaaatgccccaaggagagccatccatcctctgactttaagcagcatcttttcaaggaagaagctacccctctagagcagagatccccatggaactgggacagaggcagcggccttccaggcagcagaacatgccatgagtgcaggggctgcagggcggggacctggcaggtggtacaagtgaggggatcctggtctcagcctgtgcataagcagctccctccagcagccgtgcagggacctgcaggcagcagccatgtggacaatggaggcagtaaggagattaggccccatctgcacagagggcaagatgggagctgcccaagcgtcaccatccagggggagccagaagccagcagcaaggtggctcatccccccaaacactgtgagttcagccatgaccacagaggagaggcaggccccagccgtgagcattggaggtctgtgggaggggacagtgtcaagctggacagccaggcacttcttgagctgaaactcctctgtcctgaggaacacagactcccactttcttgcccctggcaatgcacccatgagaaagagccctggtcagggaggactggccaggagcttgggggctgcagtgggtgactgagcacagggctcctacagggcggagctggggctgcactgctccctggatgtgtgcccttcaccctgcacacggcttgggctacacaccagggggacacaggtatgaggaggtgctgatattttattatcatttatgtataaatagtatttaatctctattttgtttttctttgatacatgagttattcagtagctattaaaaaaatgtccagactgccgggcccagtggctcatgcctgtaatcccagcctttgggaggccaaggtgggcacatcacctgaggtcaggagttcgagaccaccctggccagcatgatgaaatcccacctctactaaaaatacaaaaatgagctgggcacagtggcaggcacttgtaattccagctactcaggaggctgaggc

SEQ ID NO: 586360 - DNA, 4001 bp, Homo sapiens
gtttactataattggtaaagatggtggatttgttgatttctctccatagttgaaccaagattttctttatatatttaaggctctatgtatctttaaaactgcaacatattcttggcagagtaaaactttcataattttattttattattattattatttcttgagacagagtctcactctgtcacccaggctgaagtgcagtgactcgatctcggctcaccgcaacctccgcctcccacgctcaagtgattatcctgcctcagcctcgtaagtagctgggactacaggtgcatgccaccacacctggctaatttttgtatttttattggaaatgaggtctcaccatgttgcccaggctggtctcaaactcctgagcacaagtgatctgcccgccttagcctccccaaatgctgggattacaggcgtgagccacagcacccagccctcattttatataataatttatttatttattgagttgattactcaattgaccttgttaaaatgtgaaaactccgctcttcttccacatcttacctgcattcaatattcctgagactctcccctttcctggagaccagggtggcgtgaagctcaggggtggcactgtaggcagatggctgtgtctcttcaaacttatttagtaatttttaagagtctgaaaattatgatttaaatattaagcagcaccaacatgtccctggtttcaaaaatgtcacatatccactttgccaggacttccagggtagagttctatagggtcatcttcatcctacaccgcatccagataagcacagggagcaaggctgaatgctggagggacttaccccagccatgggagcagcgcttgtcgccctggacctacacactggattgcttggctgcccgacagcaccaagtgcaaacgggctacattcacatttcgtctctgccagctgcaagatcttatgccatcctcctcccctcctctggctgtttgctcacttgtgaaatggggatgtgactggaggtgaagaaggcaaaccttctagacagagcccaatgtaaactgaccactcagaagtaatggttttaactcacgcatgatggagagcaatgatttccatcgattaagctttgattcttatatacttccgacaacagacttaaaaccaggagaacttcgactccttgaagtcgataaccgaacaattctcccaatagaaattcctatccgcatatgttttcagatgggaattgtactcagcatggcaagttggtgggaaagatcttctaattctcctcaaatcacactgcataggtagacaccaaattgacctctaagtaaactataacatacaccaaaaggagagagccctgacggagcctcagatgttataaagggaagggcagagttcacatttactaatcacctccataaaatcatgggatttaatcctcacaaggtagatactaagaaaatcctcatttacagaagaaacagaggctgggggaataaaatacccaacaccatccctggtggtgcatggaaaaaatagaatcacatctggcccgcatttgctactgagccagtcatgaaatcattcccagcacctatcaaacatgtgtcactggagtgactgtgtgtgcatggagagccaccaagtgcacagcccccactgaacaaaaacccctgccagcctgcagcagaagagaaagcaccacacaagctccctcaagtgagttaacctttaagcaaatgttcagtaacatggggccagagagtcaaggtacatgttgctgttttccactactacaatctgagtaggtataaaatcagagacttacatgctggaaattcgaattccttacagggctactctccttgatgggattctccaactttggggactgaagagcatgtggagaagctgctgaggcactcggcactgagacagtcactcttcttgaaactccaagccacacgtttccctcttcttgcatttccagccacatgtgccagttaaacattaattcctgatggtgacaaaggtcaaggaaatcttgagaaatagctcgcctctgggaatcctgagagcacattctgaagagactgtttcattccaaatcctggaagcttggatctttcttatgtaattctacatacatcccatcttttactaagcagccctgatttcaagtttggagcccattaagtcatctgatatgttccagccctgcaccaggtgatgcctgcattgcacacagcctcctgcccctgaaggcagccccaaagtaagcctgcacttcccggtgcagcactcagcaatatgggtaagatttccaggttcagatatcagcagaacccaggaactcaccttccttccccaaacccatcaaaatcatagttgagatgcatgaaacaatactctgagtggaatttggacaaatttataaaaaaaccccaaagtcgatagaattttatgagagcacaaagcagggctgagaaagccacattgagaagttgagcaggcacagcctgcagggatcttaggagctggtctttctggcagacccccagcagctccaagcgtggggctcagtgggtgtgaagagcagagtgagagtgaggctggctgcgggcagctcattaaaggactggaaacaaggcagagagggctgtcactagagccatttgtcacaggctagatgcagggaagagctctccttgctctatcctaggggactggagcaggctggggcggggcacctagggttcctattgttaggactggaactggagagagaagcagagtgacattgaggagtctcaaaacctccacaggagccattggaggaaagagggaaaagagaaagaatggcaagtgagccctccaatgacgcacacccaaatgctcccgcctggggtctcacaggagctgagaaccgaagaagtgattgtccttggtaaggggaagagtgagggaagggctccaaagagggaacagcctctgcaaagttactgaggatcaagctcggcatctcccaggccctgacagaaggccaactcctaaggaccattcaaagtaggggagggggagtcttgcaagccacgttacgtaatttgtatccccccaactgtaatagaaggcattgaagtgtttctagaaagcagtaaccttagcttacttatggtttaagatcactctggctctggggtagaaaatggatcagagggagataagggtgaaagggttagaccctttaagttggaccaccaattcccaccacattccttggatttctgcactttcctgcaaaccaggagtgaattcaagtgaatccattctaggagatgggctgggggagggagggggggcttgagatgaagaagcgtgctaatattccccataagtgcgtgtgtgtgtgtgcatgttaggaggttgctggacaaggggaggagtcaaggggatggaacgactacccagtgatgaagccagtgggcaggggatgacggtcatagactgagaggaagaagactggggtggaccagtattgggtgtggggaggtgaaggacaccaaggattcagtttgggaattaaatttcagatatccacaaatcgtgtgatttgagatgtccagtacagctcagaaaaagaggcccagacaggaaataaagttatgggttgaaagtgtttagatgatatttgaagcaataggactggaaaaaaaacatccatagagaagagagacctcagttttgaaatcctcaaaaaagtgaactagtagtgtccaactactgagcaacagttatctctcaatagagaaatctacataggaatcagcatccgttcccagaagggactctttttacatttcctttcttcttgcaggtgtgggatttatggggaataggggtgaggcttcgaggaccaaagaaagaaatctagggcaggatttcccaaccatggcactttatcagtcaggtttctccagaaaactggaaataataggatatgga

SEQ ID NO: 586361 - DNA, 4001 bp, Homo sapiens
gtttccactaggaatcacacccacctctgccttaccagaggagactcttgagctcttcttcaaagccaaaggaaaaaagaaggtcagcttcgtccaccaccaaaagctccagggagtcacgaagtttcaggctgtcttgctgcaagtggcttaatatgcgagatggggtccctactaccacatctggcttctccatcagcacagctctggaggtggacaagacatcagtatcaggcagaatgtagcagctgggatctcaccctggatttgctctcttttttgccacacacaaacccaaccccacaacactgtgtagcttcattcaggtacagctttgctgcttttacccacctctgagagactgagtcttcagcagctgagacattggccactcggacatcccgagcacagtaggtagccagctgctgaatcatggactgtgcttgccgtgccagctccttggtaggaacaagaacaaggcctctcactgcctgttctaccaccggacctgtctgtaagaatatgaattaaagactttagccagcagtgcacatcactgtgtccacgtgtctctaccccttccagcctacctgacccatctgctgcaacactacttagcagtactttgatcatctatcactctgcccgcctcagaatgcagagtggagagttctttccccaggcactgaccctcaaaaagaataacgtactctgatgtttatgaagctactttaaatatactagttatgaagctaaattctcacaataattctgtaagtagaaaagatagatgtgctccctttttatgtaagaaagaaaagaaagtgctttgtcgaagattacgcaaaggttggtggtagcagggccggacaaggatccaggtaacctgaactccagcccagagtgtttgccacaacagcaccaggttctcaggccggcctgcacgggtacagggccaagagaaaacctcagacaaacgggaaccgcccttcccaggcttttggagcttgcctccttcctcccctcagctctctcgttacccaccgccttcctatggagcaacagctgcagcatcggaatagcataagcggccgtcttcccggagcccgtgcgggcccgagccaggaggtccttcccttctagggccagtgggatggccttctcctggatcagcgtaggtcgcgaccagcccagatcggtgacagcctaggagaccaggagtgcggtttaagcggcgtgaagagcgatggcgcgccccgcagagcccgtaagccggctccccagccctcgcgtgtacctgaaggagccggggatcgaggcccatgtgttcgaagcccagtgcttcagagtcctccatggcgctgctcagtagcgcagcacgcacgcgctgcaggaaaaacgccaccgacgcgagcgggagcaaagcaacaaccaatcggcttcggagacgaagtcacttcccggaagtgctggcggcctaggcttccggtactcggacggagctctgcgactgcgcagtccctaggactgggtctagtaggaggcggtggagcggccgtgctggggtcgacggggtactttggactacagagccgctccactggctcttccggcgttcccggacgccgctgacgcacctgattctcgcgacctgcaggagaagcctcggccggggcgagggccgaggtcgtgacgggcatgaccgtctctctgcttggttagggttagtgtcccgccgggcacatcaccctatgaatggagccactgagatagactgggctgaggagaaccggttggaataatgagccatggcagcaactgcctgagagagaggaccggcgggttgctgtagggctccctaaccggactgcctgtcagaaacctgcacagcttggtttctgttctttgtgtcccaaatctgactcgggtcaccagttaagacccgtgtcagacttctgacctacagacttgcgtcgttttaagccagtaaatttgtggtaatttgttacagtagcaataggaaaataatacaggtgaggactaagaatcctaatcacaaatctttttttttttttgagacatggtctgactgtcacccaggctggcgcgatctcaggctcaagtggtcctcccacctcagtctcctggaaagctaagactacaggcacgcaccaccacgtccagttagcgtgtatgtatgtatgtacgtacgtgtgtgtgtgtgtgtatgtgtatatatgtaactcctcctcccctcccccctccccttctcttcttttctttctagatggggtttcgccacgttgcccaggacggttttgaactcctggggccaagcgatctgccttcctcggcctcccaaagtgctgggattgcaggtgcgagccactgctcctggcccataagtctttcagtgtagaagagggaagcagaagaggtcaaagtggtgccatgtgagagctcaacccacccttgctggaggaagggagccagagccaagctggaaaaggcaaggaaacaacctttgtgattacattaggcccatccagatgatccaggataatttattttacagtcatctgattagcaacttaattctcttctgtcatgttaggtaacatattcatatgtttcagagtggtaggccattattctacctaccataccacccaacacaaatctacattaagactatatctgagtgttgcacaggaatctatgtcaacaagcttccaggatgatcctgtgcatcctatctgatgcagcccagcatctgagtaccagagactagcatctggctgttaggttaggagagatcagctcatgcaccaacaggtagtcatgctgggaccaaatgatgaagataggtacaactagtcccagtgagagctggggaattgggctgggataatagaggatgttaagaatggagtgtcccctcaaccccagaacttttttttctttttttgtggtaaggagggagaaggctgtttggtaaggatgttgtaaactctgagaaagcaagaatttcaaaagtcaagggtagtattggggggaaaatcactagaatttgtgtgtgtgtaccctaactactgttttggttttgtttttgttttttagaaggagtctcactctgtcgcccaggctggagtgcagtggcatgatctcagctcactgcaagctccacctcccgagttcacgccattctcttgcctcagcctcccgagtagctgggactacaggcacctgccaccacgcccggctaattttttgtatttttagtagagacagggtttcaccgttgttagccaggatggtctcgatctcctgaccttgtgatccgcccgcctcggcctcccaaagtgctgggattacaggcgtgagccaccgcgcccaggccctaactgctgttttttaaaaaactttttaggtcacaacctatctgtaaatatgacacaccagtatggaaatccttattcttctcacagccaccagctattggcccatccactgactatcccaattccacctgccttatcagtggaaaggtgaaatgtatgcccactttttcctcacaccattcccctttctatcaaaaactaccaagagaaacccaggacctaccaaaatagttaagatgtgctccactgtgtctactgccagccaaacctgttgaaggctggctcaaccctaatctgtgccttcctgtcttctcacaaacgtagtctgatttgctggctagatttctagtaacagccacagagcagaaatgtgtcccttcccaatatgtcacataatccccaagagcctcaggccagaagtccacaacatgtaactagttcaaaggataaaatttttctctgcattaattctaacatgaggaatactgaaaactcttttaaacatctgaagaatttcagcaattcacaattcaccttactggagtgttacactgtcatccagatttagaaacaggaggatataaaactattaaatggaaa

SEQ ID NO: 586362 - DNA, 4001 bp, Homo sapiens
gtcaacaggtgttcctcgaatactgagaggggccaattaagaaaaaaacaaagaactggcaattggatttagcaagatggaggttactggtggcctcgggacagggtagtttcaggaggaggttcccaaagctcaatggggtgggtcaagagaaaataggaggtgaaatgatgaaagggagtacaacaactgttctgaggagttttgctctaaagctggtttctagattagtgggtatcaaaccaactagcatgttacagaaatggactagagattaagttgcaaaatagaaaaattgttttcgaagcacagattttatttttaagcattaacatgctttattatttaatgtgttattttaacgttataaaatattcacagtgcgtgcatccatatgtataaatgaggaaactgaggcttcgagaggttagataacttgtttaaggtcacatagatagacactgatagggccagtgtatttctaaagcccacaccaagaaaaattcaagcactggtagttagcagggactaccaagttgtagactgccagggttaacataagtccttcatttaactcttggttactgtcccaattccaagtccttattacatctaaagggtaatttttaaaagcacatactcttcttttttgaggactgagaacaaacacaaaatacatgcatcagttaccaagtttccaggttaattaacaaagtatcttaagctatgaaccatctggactacaagatccatcagtttaataaaacaaataattcagctgagaacagacggttatgatgggacacaaaccactgagagagtcaggtggcgacactctgcctggccacaccggcacctacctgtggtctgcactggatttctgtctcccggtccacagtcttctgttcacagaggaaggtgggggagaggagggcagaggcgggggaggtagagagggcagaggaggcagatttcttttctctttcctgaagccgatgccaggcttcccatctttgtccccttctccggcatgtttgaacgttctccggggttttggcagagggttgatgaagggctttgtgggggaaccctccgagcccctatacacgttctcaaggctccggtcccagggccttctgcatgaacctttcctgtcctccacaagctcaggggtgggctccctgccttccaggtccgaggggtggaccctctggctgacttctgagccactcccgcctcccaggttctcaggaagggtggaccctgcctctgccttgtcaggagggcagtgtggggagtaacaagtccctggtaactggggatccagccctgccgacccatccttcaaagcctgctcgagtttcttgacctgcttcagcacggagaggggatcgttctgaaagcgtagcttgccaagtcttggctctcggcctcggccccagctaggatccacttcccgttctggctggcttaggtcttgccccggctctgggtcctgtcccccgacgttcactgctcctttattcctctccttctctgtgctctctgttcctggcctcattccattcttagcctctgtgacctgagttctcaccccatcactactcctcctctccaccgtagaggacggcagataatcctcctgtccgtctgctctcctgctgggtgcaggagtgggcacctctttcttcccttcccattctgatatcttgtcctttatgttgagggacttgtgccggggtctggctctggcagatgggcaagggttctgaacacctctgagctgcttcttcccagccctgctggcttctgcagctgggtcactgatgatcatatccaagctgaacatatccattcttgactctagcgtgaggttgtggaggccttccaggggactccttctgaagcctgactcctgatcagtctctaggaatggaatggaggactaaagtggatgccttcgagggtctttctcagtccttggaccttccaccttgaccctgcacaagaaagacaaacaccaggtgagtgattcttattgttcttggctggtcatagagatttgctagaacttagatataaatgttatatgcaagtcacaaaccacaaacattgaaattcctattaaaaaaaaaaattcactttgtgggcagggtgcagtggctcatgcctgtaatcccagcactttgggaggctgaggtgggaggatcacttgaggccaggagttcaaaaccagcctgggcaacataacaagacccccatctctacaaaaattttttttaaaaactcaatttgtgttttccttggggagacagcatggtgaaatgaaggagcaatcgggtttaggagtcagataggcttgggtttaaatcctaattcagtcacgtgaccttaggcaagttgtttaagtcctctaaacctcagtttccacctctgtaaaatgaagatcataataatatgggccaggcattgtggctcacacctgtaatcccagcactttgggaggccgaggcgggtggatcacgaggtcaggagtttgagaccagcctggctaacatggtgaaaccccgtctgtactaaaaatacaaagattagcggggtgtggtggcaggccctgtaatcccagctactcactcaagagattgaggcaggagaattgctggaacccgggaggcagagattgcagtaaacttagattgcaccactgcactccagcctgggcaacagagagagactctgtctcaaaaataaaaataaaaataaaataggagtaatttcacgaggtaaaagattacataggctgcttttcctgcttttcttatccacaggcagttctttgcaatgactatttaaaaactaaaacaacatcacaagtcatgaagtttgtgctacccctgaacttgacaaattgtctgattcaagtgggcaaagccacaatgattggatgcatctgaacagaacctcctctggaatggggcctcactagagtgagctcttcatgagccttgccaccagggcagggattattctgttattttggcctgttgtagccaagtctgcacccctagcacccaaaacaatacctgggagagttggtggtcaataaatatctggtgcatgaatgaatgcgtgaataaagaggcagattcagatttcacacttggcttagaaatgcactatctaatagagtagccaccagccacacgtgactatttaaccttaaatccaatgaaattcaagcttcagttcctcagttacacctgccacatgtcaaggactcagaagcgccatgtggctgatggctaccgtactggatggggaagaagaatatttccatcactgaataaagttttggcctagaacatatatgtaatgatacatgcttccaaatgtaattttagattagataatgccatgaagatattagaaattattttgaaggaaaaacatttttaaattagtctaacaagaatgagagtatctgtgttgtccaatgcaaacattattccaccagcaaaggttatgactgagtacagtgactttggatgtgccgacattagctaacacctcacggtgcccattttctgaatgtatagatctgaccgcatggaaattctgaaactccagttaaggttcaccgtgagggatgaataagtagcaatttcatgcatcctgttactatttagctttctattcccaaggttgtttgtgtaaagacctcttcctcagtggagacattagcacataaattacgccactgttcttggttgcatggcataaaatagaaacttgcgaaaacgcaaacacatttttttggcaaacacattttcctattttaaatatggctatcaaggcagaattccttatttaaataaacaattaggattcctaacagtgtgtttacaaagagaaaatatttttaaattgttccatcaccactggagatattagcatgaattaagattttagtcagaatcagtttgttatctcactgagggttc

SEQ ID NO: 586363 - DNA, 4001 bp, Homo sapiens
agccctctttccccaaatcacctactacatgcccaaatcctctgtcctttctaacacctcttattgagacatctcagggttccccatggtgtccctcactttaaggagaaataaaccaacttattgaactgacagtgtgttcctggaggtctttgactggaggggattgaacatcacatagagaatcagtgctgagccaagattccacccgaggtccacctgactccaaagcctgtgcccttgaccactctactctgctggctccctgttcagctttttttctgttctaatgtgggcctcatatgactcattctgtaacataagaaagtgcccttgaaaaaggtaaacctcagttacggtggaaacagaaatcattgctatggaacatgtgtcatttcctttctatctggggagacgaaacatggctgtacttgtctacttgtctcattgttagcaatttcagcatactttgaattagttttagttttctagatagcaaagtgcaattgggtctattaaattagaacagaggtggcatcttttatcttcctatccctacagcccagtacctgagctcatttttaatgagaagacaaattaatatttcatcatttctttctaaaataaaaatcggtatgtgaacgcaatgatggtcataagacaggcaggagctcgaaaggagaaggagagtgaggcgccaaaggctttggggaagtggagtgggtaacagagggcagtctgggtaagaatagagaagatgcggtgtggtggcaggcacctgcggtctcagctacgggtgtatgggaggatcccttgagcccaggaattcaaggctgcagtgagctaggatagtgccactgcactccagccttggtgacagagcgagaccctctctcaacaataacaaagaacctagccaagggaccgtggctagggggttgggccctttctctctcagatctacctaatggtctgggctcaacttctcctttagaaaaagagcttggtggtggtagattgtgaagacaattaatttcactcttcagctgcttctccaaccccacagcactcctttcattccacttggacttgccccacctgcctgcgtctcgaggacagcgaccgcaagccatccatccctttcattatcccattcactattctggacagagtagactctggaggagtgggtggtcggtgtgttcagtccacaaccagcgcttttctaagaggtgccctctagtctttcccctcggggtgcagacggcaagcggctctggaaagggtcagaggtcctcaaatggagaccaaaggaagccacgcgggcagctcttgagagccattccagcgcatgccaggcacaccgagtggggcttggcctcctccccaagctaggagctctctagataccggagcaaagtggagggggacttttttccgtccagagagactgaactccgtatctgttccgcggtccgcctccctgcacacacgcccccgagccgggagagcctccgcagcacccagagaagagaccggaacacaaaggatgaacgaatggggagggggggtttggggggttgggagaacgaaaataccagctgcgcttccaacatccaaggaaggaagtggcagcggggacggggagaggatgggaaggggatgctgactgcgagttggggcgggacgcggtgatgggaggggaccgggccgggaatgcgggaggcgaggggagcgacgggacctgccgttccggcggccgggcagccaatcgattcgtctcccctaggaaggagcgaggggagggtggcccagagagaaagcgccgcgcggcctcggctgcccccggcccgggacacccaaacagaccaaagaggatccggagtggagcccggagcggatcccgcagcccgcgcccgccgcgcacttacccgcgcgcccgctgctgggtccccggcagccgcgccccctgcgctggcggagtcggaggagcctgcgctgggccggcggggggcgggcgcttggggagggcggagagagggcccgcccgccgggacctttgctcggtccgggcgccccagagccgcgggactggccgccggaggctgcgggaggggcccgggccagacctcccagaagccccagagagagccgcttcccctccttcgtgtgactctctgggagccgggttgctgacggcccagcgctcagccggagtccccgcgcgcttttcgggactcacccgggagatgtcggggcctctcgggaagagtgggctgcgcctgccttccgcggccgcctcgcctcttcgctgcgcgggaccgtggggtttgagagcggcgcctcctcgcggggccgaacccgccacccacagtggagtgtggactgacaccgcggcctcacggttcaaccaggaaagtccaaggcctgtccagcctgtgggagcccctaatgcccgtgcctggagtagtatctgggtgtgtggtgcgacagtgcccacacttaggcctgccgctaatcagtgattcattcctgtaaactccactctaagctccttgagggcaaaaccaggcgctctcacacactgggtgctcaacgaatactgaacgagggaatctcagcatagctggtgctcaaacattgctttctgatgaactgacttaaatattagctctttttgtaacattaggaccagctgaaaccgattaaccattacttaagttgttacagcgaggcagagccaaaatctcccgggcgtgtgcaagagggaaagctttctaattgtgaacaccgcgcgccccgcagaaggctgcattggcatcacctgggactggttagaaatgccaaaaacgcctgacccgctcccaggtccagaagacagatttaagctttgcctcttgtctccttgccagttgactggcaatagaagtttttcttttctcaaaagcctgtgccacagtttggtttctgtgtgcctcaggttacgagcccattgctcagtgacactttcagtcagtgtatcgtcttcactgtgcaatgctctctactaagctgagagcaaagagtaagagaaaatgaaatttctgccctgcgagagctcacacagtatggagttgtgtggctgtcttaaaggctgttcggggagggcaggtagagaagcccggcagcgctttcccttgggccccgctatgctttaaacatatctctagattgcaattatccacctcactgtaaagcctttcctgactatccaaattaaaagtgctgcccacccacccacgggaacacctcctagttcctcctctgctttatttttctctttgcactcaccaccatctgatagactgtgtgcctcttatttcatgtattatcctctcctgtaaaatgtcagcagcatgagggcagctggtctgttttgttccctatgcccagcacctagtttaggatttgacacatggtagctatccagtaaataattgttgaattaagaaatgaatccttttgtttgtttctccacctagactgtggggcagtacacatccttgcagtacccagcgcaaaataagtgcacaattagtggttattggatgaagaagtggttcgaaatggtccatggtggtaggcccctgatttgctaatgtgatgagatgttggacgaaagaaagaatcccagccctgtcaagagacttttcatgtatgctattggttctctatcattataaaattatacggtgatgattctggcttgttgccagagattattgcatcccccgctagggtactgaccttaagaatatcctcataaacagcatactcatcaggttcccaccccaaaaagccccagtcctctatctagatagttaccacttgtaattcagagtgggtgaactttttgatgcaacagttactaagtggcttcaaattctgtcacttttttttttgtcctgcctagtcttttaattaaatgcccgaggaagatagtaataatatcagctgctatt

SEQ ID NO: 586364 - DNA, 4001 bp, Homo sapiens
tacagcccagtacctgagctcatttttaatgagaagacaaattaatatttcatcatttctttctaaaataaaaatcggtatgtgaacgcaatgatggtcataagacaggcaggagctcgaaaggagaaggagagtgaggcgccaaaggctttggggaagtggagtgggtaacagagggcagtctgggtaagaatagagaagatgcggtgtggtggcaggcacctgcggtctcagctacgggtgtatgggaggatcccttgagcccaggaattcaaggctgcagtgagctaggatagtgccactgcactccagccttggtgacagagcgagaccctctctcaacaataacaaagaacctagccaagggaccgtggctagggggttgggccctttctctctcagatctacctaatggtctgggctcaacttctcctttagaaaaagagcttggtggtggtagattgtgaagacaattaatttcactcttcagctgcttctccaaccccacagcactcctttcattccacttggacttgccccacctgcctgcgtctcgaggacagcgaccgcaagccatccatccctttcattatcccattcactattctggacagagtagactctggaggagtgggtggtcggtgtgttcagtccacaaccagcgcttttctaagaggtgccctctagtctttcccctcggggtgcagacggcaagcggctctggaaagggtcagaggtcctcaaatggagaccaaaggaagccacgcgggcagctcttgagagccattccagcgcatgccaggcacaccgagtggggcttggcctcctccccaagctaggagctctctagataccggagcaaagtggagggggacttttttccgtccagagagactgaactccgtatctgttccgcggtccgcctccctgcacacacgcccccgagccgggagagcctccgcagcacccagagaagagaccggaacacaaaggatgaacgaatggggagggggggtttggggggttgggagaacgaaaataccagctgcgcttccaacatccaaggaaggaagtggcagcggggacggggagaggatgggaaggggatgctgactgcgagttggggcgggacgcggtgatgggaggggaccgggccgggaatgcgggaggcgaggggagcgacgggacctgccgttccggcggccgggcagccaatcgattcgtctcccctaggaaggagcgaggggagggtggcccagagagaaagcgccgcgcggcctcggctgcccccggcccgggacacccaaacagaccaaagaggatccggagtggagcccggagcggatcccgcagcccgcgcccgccgcgcacttacccgcgcgcccgctgctgggtccccggcagccgcgccccctgcgctggcggagtcggaggagcctgcgctgggccggcggggggcgggcgcttggggagggcggagagagggcccgcccgccgggacctttgctcggtccgggcgccccagagccgcgggactggccgccggaggctgcgggaggggcccgggccagacctcccagaagccccagagagagccgcttcccctccttcgtgtgactctctgggagccgggttgctgacggcccagcgctcagccggagtccccgcgcgcttttcgggactcacccgggagatgtcggggcctctcgggaagagtgggctgcgcctgccttccgcggccgcctcgcctcttcgctgcgcgggaccgtggggtttgagagcggcgcctcctcgcggggccgaacccgccacccacagtggagtgtggactgacaccgcggcctcacggttcaaccaggaaagtccaaggcctgtccagcctgtgggagcccctaatgcccgtgcctggagtagtatctgggtgtgtggtgcgacagtgcccacacttaggcctgccgctaatcagtgattcattcctgtaaactccactctaagctccttgagggcaaaaccaggcgctctcacacactgggtgctcaacgaatactgaacgagggaatctcagcatagctggtgctcaaacattgctttctgatgaactgacttaaatattagctctttttgtaacattaggaccagctgaaaccgattaaccattacttaagttgttacagcgaggcagagccaaaatctcccgggcgtgtgcaagagggaaagctttctaattgtgaacaccgcgcgccccgcagaaggctgcattggcatcacctgggactggttagaaatgccaaaaacgcctgacccgctcccaggtccagaagacagatttaagctttgcctcttgtctccttgccagttgactggcaatagaagtttttcttttctcaaaagcctgtgccacagtttggtttctgtgtgcctcaggttacgagcccattgctcagtgacactttcagtcagtgtatcgtcttcactgtgcaatgctctctactaagctgagagcaaagagtaagagaaaatgaaatttctgccctgcgagagctcacacagtatggagttgtgtggctgtcttaaaggctgttcggggagggcaggtagagaagcccggcagcgctttcccttgggccccgctatgctttaaacatatctctagattgcaattatccacctcactgtaaagcctttcctgactatccaaattaaaagtgctgcccacccacccacgggaacacctcctagttcctcctctgctttatttttctctttgcactcaccaccatctgatagactgtgtgcctcttatttcatgtattatcctctcctgtaaaatgtcagcagcatgagggcagctggtctgttttgttccctatgcccagcacctagtttaggatttgacacatggtagctatccagtaaataattgttgaattaagaaatgaatccttttgtttgtttctccacctagactgtggggcagtacacatccttgcagtacccagcgcaaaataagtgcacaattagtggttattggatgaagaagtggttcgaaatggtccatggtggtaggcccctgatttgctaatgtgatgagatgttggacgaaagaaagaatcccagccctgtcaagagacttttcatgtatgctattggttctctatcattataaaattatacggtgatgattctggcttgttgccagagattattgcatcccccgctagggtactgaccttaagaatatcctcataaacagcatactcatcaggttcccaccccaaaaagccccagtcctctatctagatagttaccacttgtaattcagagtgggtgaactttttgatgcaacagttactaagtggcttcaaattctgtcacttttttttttgtcctgcctagtcttttaattaaatgcccgaggaagatagtaataatatcagctgctattatttatgtagcactttctgtctactgtcaccaagcatgcttctgagtacattacatgcaatgattggctcatttaatccttacaactatttgggggtttcaagttacaaatgagggaattgaggcacaaactggaatgctcatacaactgggaagagacagagccaagattttaacccaggttgttcagcaccatctgagttttaacccaccatagggtagactctccagaacagaaaataagaagtgcagaagtgcagtaggggtccccccacccaagcagtgtaggagcatggtctgtgttgggagagagggatgacttgtgttcaagatctcacctgaccccagtctgctgctctccctgtccaatggtggggggatgaaaaggttctggcacagccataacttttttaaaaaaataattgtgcttattattattgttaaatagactatttgaagatttcagatgaacatatacaacatggaaacttttagcccaattggaaaaaagtaaataaaaagaaaacgtggaactccaatcttcttattccatatag

SEQ ID NO: 586365 - DNA, 4001 bp, Homo sapiens
gtagagtgcagtggcacaatggctcactgcagcctcagcctcctgggctccagcaatcctctcacctcagcctgccaagtagctgggactacatgtgcatgccagcctgctgggctaattttttttttttccatagagacagggtctcactgttttgcccagtctagtcatgaactgctgggctcaagcaatccttctgcctacacctccaaaacctaaatgtaaatattcgtaatatgataaatgcatatattgtacattcagaggctctacacagttttgagtgtgagaaccataagttatgtcaaaatttccaaatatcatatattttgtaatcatatttttattattattgactcagtcaatagtcatagactttttttagttttttaaaatgcctatgaaattatagatttggaacttccttacaaatacccagcagcattctcataccctcattcaatccacagactaggaagcttctagaatacctttgaaactggtcttttcagataatatacatgaagcatttattagtgttcctggctcataatatgtactctataattaatgtgagtgatagtattcgctattaccatcacatctatcttcatgttctaagtccctatatgtgtttaacccttttctctgcttctactttataatatcatccaactaattcctgatacacatctcttatatcccacaacatctttctgcataagttgaccagatgccttaatttttacctcgttcactatcacgtgctgtttggttctttttctcctttccacttcttgcattttattctccctgtcaccatgttattctttccattcttatcattcttattgcattctctatatattgctttttctgtactcatcattttccaagtcttttggtgcctgctattaattagttgtttctttttctctcttcaacacctgacccaactgctgttcatatttatagttgaaagtcactttatgaaatagacatattcctgaaaatctagaataaaaacaaatttcttataaataaaatcttactctacatatgcaaagaaacaatattttctttttaaaacttacagtgaagtgaatgatcatagcctatcacttgtatcaatgcacacactaaaagagttgtgcggtcctaacttgaggtcctgacacctctttcttttacaacctctgattctaattccataatgtatctatgactccctgcttcctactctcttttaacacacacacacacacacacacacacacacacacacacacacacacctctcccttttccctccctcttgatatctatgagtcagaccatactgtctcaagcacagcattgcttttttctcctctttttccttccttctcactctctgcgcccgtttgtccttctccctgtctgttacagtattaccactctccattttgccaggctgtctcatcctctgctttatttctattacagctagagtgttttccaagcctaattgtgcacctaacattttagttcctttccttcaagatgtaatacttgatttaatttaccttttcctttctcttgtgtcaaaaaggtagtctcaagtcaacctgacttgtaaacacaaaaggcagagctggatctatccccatgaagaacaggatctatgatccattcttataaataaatgatactttgtctagcacaaatgtcaaataatctcataatatcaatatgaatacttacactcagcatatttctgaagttgggaaaattccgaagggctgaggtgggcccatttttcctggtttgtcatggtggtggtgagaagctctgtcacataccaggtaaaagattctttattcaggtgttgcgcagaggtctatgcttcaaagattccacatggcatgtttcatgataaaatacctcaggctttcaaaatatgcaatctgtccacatgaaactgctttggatgcttgtaatttcaataatgtgttaaagaactgcaaaaaaaaaaaacagatcaagatcaaaagattaacatgattgcacaaaggaaaaaaatgtcaaggtgttgaatgttaaatactttttaaatcatataaattaagagtacaaattgtgagaagaatcttataaagcacattttcataaatgtacatttttatgtctagttttacaaactccacattccacgagtagacagtggtatcatttttatcagtctgtaccaattttttaatatgtaaacattacatataaaatctagacctaaattatccaaggaggctaaaataagctctctagctccctatacatatgatttgctagtttacagtatagactgccaataattgcttggaatgttcatcagcactagcatatatatttccaatcatatgaattaattttggagaagtcatataatttgttctagcaatcaaataaagattaagttttagttttatgatttaaaaaaattcaaaagattggccaaattaaagcaattccaaatgtctgaaagacttgtgtaatgacagtagatgattctattgtgaatcacgctttaaaataaatctctaggttgtcatggacctacattcactggctatatctgtaaaggcaaacaaaatgaaaaaccatctggtttcaacatttttatcagagactataatcaattgctcaataatcagccagattggcactgtattctttacagaaaatgaagtatttagtaagagttacttttttgtaaaattgtaatcattgcaaggtttatttatacagatgtcattacttaaagtcaccttacttctacagacaagactcatttggtcttagtgccttgcctttcttcaacatctctttactgtcttccaatatcaaccccaggacctcactgtcaaatcctgtcatccttgtctttaaaaactgttctttttggtctcgtggggtcacgtccctgtactctgttttacaatatggtagtttaatatacaatggggaaatgatgatattgatgtgctcacagagaccaaactgctggatatcttttctcttttctctcccaagggcaaccatgggtttggggaagcaacacaagtgaaagagaatgggaatatgcaatgacaattgtggacatcttccacccagtttccttctgctgatttcatctttcacactaatttcatcctaactgtctgtctctctctggttacaggcagttttggtgggactgtgaaatgatgtgttctgtcctcctctaaccaaagggagacagatgattctgtcacattggcacattacacacctgtctcccagggctttaaatgttgagtggagtgattcaatgacagggtgaaaacagctgtacctaaatcataacagaaataattggatactcattcctgtctaaacctgactctccagctatcttgtcacttccagaagcttgtgatattcttttaataaaggattaaggccaggcaggtggctaatgcctataatcccagcacactgggaggctgaggcaggaggatggaatgagcccaggtgtttgagaccagcctggacaacataacgagaccccatctctacaaaaaaaacattagttggatgtagtggtgcacatctgtggtctcagctactcagggggaatagtgggggagctgaggtgggagaatcactggagcccaggaggctgaggctgcagtgagctgtgattatgctgctgtactccagcctgggcaacagagcaagattctgtcttaaaaaaaaaaaaaaggattaaatgtatacatataccaagacatcacactgcaccctataaatacatacaattattatttgttaattaaattttaataacttttttttttttttttttttttttttttttgagacggagtctcgctctgtcgcccaggccggactgcggactgcagtggcgcaatctcggctcactgcaagctccgcttcccgggttcacgccattctcctgcctc

SEQ ID NO: 586366 - DNA, 4001 bp, Homo sapiens
agcagcctacactgtgcttcatgtaatcaccacccccttccaactcacagctcctaaattaggctgaatgtagtccctgttcccccaggggccagacgggccatcataactaggaagtagaactgccagtgtcctagcatacctccctagagctaccccctccccaccatctgtctatttttagaaaccaaagtataaaaagaaagatccatttggacctgatctgtgtgagtaactaagagaacaactcaggtggggaactccctcagcgcacagcgaacaaaatgcatgggaggaacgcagaagcaacaacctcaccaggaaggcgttttaggagtcatcagaagtcaacacttagacacagagcacatgccctagtgactgtggcctccaggccaggcgatgtctatggggatcccaattattcacacacctgcccccataaataaaacacaccctcccaaacccacacacctctgtcatctgcgtttgcttacataacagcacatggtgtgacaggcttaatactttatatggtttttgggaagggaacactaactcagaaagagtagggttacaagaatgttttcactgaccccttttccagaaaccctctgagctccagcaagtgtacatctttgtaaacctatgcttgcatatcacctcgacctttaacatcgataagcagtagggttagtgtcaacaactctccaaacctgtcaatgtctttattcttgcctgcggaagggaggggtgagagagaccttaataaatcctaattcctcgttgttggattctaatacaatgtggggttatcttttatcctaatttaaaggccattgatcccacactgtccttgtcttacacatacactcatccttaggtgcaaatatggtccccactctcaccttcacccctagcttgccagcgggctccccacaccctcctccagccaggagagaggcaaggagcacgcaggcatggagcccccataaccagtggcgcatctacagacataaacccactcttccttcatgggggatttcgaggcaggtccaacttccataaggatttctcttcagtgtagtgctattcttttctgcctgtcggagtgatctcagctgtcaagttagtgccaaaggttcatccagcgaaatctggaaggtgggggaagggtggttgaagatgacacctgcttaggggcaactttgacgacttctcttaagaaaactaagcatcactgagtctgcaaccctttctctctctctctttctctctctctctctctctctctctctcacacacacacacacacacacacacacacacacacacacacagacaaaatttctgttgctctgaccttagggacccagtgcttctctcctgccacaggggaaagcaggcgttgctgccctccagcctggaatgataggatggggagaagacagacatccccgggaggagagggggaaagggggaaggagaggcgtggaaacagagaggtgcccaactccgcggaagcgccccttgctgggtagaagagtgggtctcccgccgcggcgcacctgtctcggctgccggctccccgcacctacctgtacgagacctgcttccggaaagttaagttcctcagcttctcctccagcgcttcgtccttctccttctggccggcggccgcgggctcgtccagggcagcggcccccgccgccgcggctgaccctgcgccccgcgggtccgcgccgccctcggcgcccaggcagcagctcccggcgccgcttccgctgctgctgctgccgcccgtcgcccctttctcctctcccgccgaggagctggggttcatggcgcccgctccggcggccgcggagggagcgcaggcggcgccgctgcaggggccgggcgggctggcggcggcggcggcggcggctgcaggagcgcgggcaggtccgcgcgccgctggcaggggcagcaaatggcagccccttcccgcagcatccatccgcggctgcaccgcaccggggcattgtgggaaactccgctcactcccccgccccggccaatcagaggccgccgctccccgcctcccgcgccctcccgcgccggcccgcaccctccagccccgccggcctcttcctaaatcccgagcgaaagcccaagctgaacatgaactctgcccggaggcgacgggctgcggcggagggggagagagaggaggacaggctgcgaccccgggctggggacgccagggcagggacagcgagcatcaggaaggagagcgtccggggaactcgagtggccgcgccctgggtcctgcaccgtgaggctggggggaccaggaccggcgggcgcccaccttggtcctgagcccagctgccgacgctgggccagcaccctctccaccgccgccctccagtgagcagagctgggctcaggcagcagcccctgggcgcgggaaggtagcgggagctgcatttaggggaggggggaggtagcaggagctccgccagtgggaaccttggagtgaattcgtcggcgggtgccaagtcgaagcgccgacctcctgtctctggactggggcccggacccctgcgtccccaaactgcgtccccgccttgctcgtcgcccggtgccttccttaggcgcagcagaccctcggtaaacagcggttaattcgatggaatcggatcacagggccctcggtgaagcagaaaggcggaggaaatccaggaggcagaagtgaggaccctggcgcctggcgccgctgcgttgttcgtataagaagaggcatcccggaaggggcttcaaaccacttaggaccgactgctgaaacgaatccaagcttgtggtgtctgcagaatttaactgtccgcctcaaccccagtttttgtttctaagattatcgaaaactgtgcggtttgagtgatgtgctacaaagtgtttaaaacagattgtttcccaaattaggggtttccacacaagaaatcgctgctgtcggcaaacacaggaactatctatggttaagacaaggtggtgttcgtaaccaaactataaacctacatatacgaggtggtaagagaaccagaccaatgaacagtttcaggctggcgtggtgtgcccgtgaacaaagaattgtaatactggcaaaaatctaaattgctttctttccctttattttctcatcactaaaattaggaaaatgaacagatatgtcaaatctcttctaacacccatgttctgtaactctcctcgtatgtaccttataataagacaaaggtaaagacatttccatgtgcagcgaggaaaagtaataataaaaattaaaacaactagcaagtatgaagccctctttttatacggtatgtgctgtataagcacttccctcatccacctctatgttttcacagcacctctcaagggcttggacacgtgcaaatgcaaactggcaaagccaggagtcaagccaggctgctcagtggcctttgtgcttcaccccagtttaatgcacccgtcttcagaagggacatcgtgtattaggtgcttcaacacaagatccacgaatatctcgtacatccctaaaatcaagcaaatgtcatctgaacccaattactgggacagccccctcattactcccacttacttttagccgtatcttccccaatccaatctcaagtgtgagccccaaaatacttctgatttttcacgcctccacttaaaaatcttttgattatgtcatattgccgttagggtaaagttcaaacaactcagctgattttgagggctacattggtgggtggtggagtactgcccgctttcccttcatactgtcatgacagtgaggttctgaactgttctttgtgcaaaccccacacgctctctgctctctccattcccatttttgcacgtgtgagtctgctgtctcctcttctttgcttctccttttcctaagatttgccaagccaactactctacacctccatcggattttagtttacatgtctctc

SEQ ID NO: 586367 - DNA, 4001 bp, Homo sapiens
gtatcaagcgaggattattagtgtatcttcttccattgccacacagaagctacagatcaatatcccctctttgacaataactaatcatttaaatttttcagcctcagcttgccacacccatctttttattatcaatagtcaacaaatcatctcatatttaacttaattttaaaaacgtattcaatggtatttttattcaattttcagaaaacatggctaattattagtgccagggatcattttaatgtcataaagctctgagccggccgtggtggctcacgcctgtaatgccaacactttgggaggctgaggtgggcggatcacctgaggtcaggagttcgagaccagcctggccaacatagtgaagccccgactctactaaaaatacaagaaaattagccgggtgtagtggtgggtgcctgtaatcccagctactcgggaggccaaggcaggagaatcacttgaacccgggaggcggaagttgcagtcagctgagatagtgccattgcactctagcctggatgtcagagtgagactccgtctcaaaataaataaataaataaataaataaataaagctctgaaagttctaacttaaatacttgaataatctatacatgataatctttttacctgtaatttttgtttcctaactctaagctagcgtgtatatacagtccgtatttacttagaacaatctatgaagatgttcctgagacatcaactaggaatagcaaattagacaaggtaacttaggaaaatgcaccaagtaatgtacttacgttctggtgctactacagtttgacaaattgcatcataatctccctaatctctatatgtggacggctaccatttcctaagggcaatgaggcagaaagcaagcaagcaaataacccctgctcacagcaggaaaatgggcggcagtgacaaaacctacactgatgtttcctattccaaggcaactcttaacatttgaggtcaggacagcaaacccaaaaagcagcagattgacaatcctgagtttcagtcccacctccgccgctccctaaaagcatgacttgcagaatgttacattaacttttgagaactcaggttcctcatctctgaaacaaaagggtttgatcgctatattatttttaaggtctccactaacatagtacccagccacggtgccacatacacacaatttggctgtatctggtaagcagattaaaaaggagagttgttctgataacctgctgcaattaaagatttaagcctccaggaagtcgtgagagatggcaatgaacaccagttgaaagctgccaacactgacaagaccttaggggaattccgagggctatctgttggagctgactggatctaaaccattcaagaagtgaccccagggttacctgcccactgcataaacttaggccactcagggatcagaattaggatgagaaaaaggcaaatggtataaaaagccagactatacgggacatgggtggcttacacttcctccaaggtagaggcctatgtgtgaccgggatggccctcggcccaggcttgggggtgtggcatgtgtgaccgccggccgtcacacaacccgaaaggactcgccacagcctgggcccagccccgtccctcgcctgctgcaggatgagcggccacctcggagcccagggccgggctgagccagtgcagaggcggggccaggggtggtgcggcccaggcgcccgcctccgccagcccaacacggttaagccgcgtaccggacccactgagcgggaccttccgtgcctctggctcaacacgacctcacctactcggccctcaccttggccaaggagcagtacacacgactccagctctgcatttttccgctgtattttcctttccgccaatactttcacctccgctgggcgcctccgccgctccgccaaggtctcccctccctgcgcatgcacaggcgcagcctacgtcatcacccgggagcagcgcgattggcccgcgcggttctaccgcacgaggcgttcctgtcaggctcggcgtcgtacgctgtcgtaaggagcgcagggctttgtcgcagcgggggtggtggtgggaatgctttaggggctggtgccaaaatgtcgagctacaatgtattcttatacttagaagatgaaataaacaaataaaactagcgtttgcttaatgcacattatcgacagtaaagcgtgacaagttcaacaagctcttggttgtgctaggcattcctcggcacttcctacagacatctcatttcatccttgcaacaaccatatggagtattattagtatttccatttcttggatgagacccagagaggttaaacagtgcccccaaggtctcacaaaggagagataactgcggccctgaggccaaaacctttggtattatctactgctttatactcgctcctctcaaatgccatataagggatggggctacagattttggcatcaccagcattctgctctaattagctaactgacaatacgtagagaacacactttcttctatttctttagttgagaaacacatctccctggtaaaaagagagtgggatggtggatgagattttaggttttgagagagaatctgttgaaaagggttgaaaaacattgtcttcaagattgagcacgaaagtctaaggtctcattcttgccttgcaataagtctatatagtgtgaataaacttaattctacatttattggaagtctaccacccaggccttgtgctgggctaaacactggttagaaattactgcctatgttcagatttagatatgaataattaaatttagtgtttgttatagagacggtattgctggcagctctgtcctgtgacagggtcccaggctccttttatctcgtgactctgccatcatcagagcttgccttgcatctttcattcaagatggctgctccagtttctacaatcatatcccctcattccatctgattacaaagccacacctagctgcaaggggatctgtgaaacatagtcctgtcagctgagtgcctaactgaaattgtattaataagcaagatgagatgaagcgaaattgggggacattgagcagcctccaccacacagatggggagaattgtctcctctccagcttcatggcagtctttgacatctggtctaggagttactgctccatatgcacaaaatctcacaattctttcctgaactttcttgggctttgttccctactcctttgtccaaaattacaatatcatatttttatttttaaaaaatgaaacacttccatcctttccagctgtcattcacaaagcctaggggctcaacccagtatgagaagtgaggcaggaaatagattccttactgcactcaccatatttctccacattcctcctcatctcttgtaccaactatacctcttctcctctcagctagaacaaaagccacaacgcatataaattaatgcgaacacacgggaggtggagggagcgatgtcaacaatggacagcccacactagcagtgtttatattccagctaaggaatataaccagaaattggaccacacttattttgctaacttgatttttttcacttaaaactatctcatgagcaactttccatattcatattgtgtccagaattggtgggttcttggtctcactgacttcaagaatgaagctgcggaccctcgcagtgagtgttacagttcttaaaggcggcgtgtccggagtttgttccttctgacgtttggatgtgttcggactttcttccttctggtgggttcgtggtctcgctagatcaggagtgaagctgcagacctttgcggtgagcgttacagctcttaaggcagcgcgtctggagttgttcattcctcctggtgggtttgtggtctcactggcttcaggagtgaagctgcaaaccttcgctgtgttacagctcataaaggcagtgtggacccaaagagtgagcagcagcaagatttattgcaaagagtgaaagaacaaa

SEQ ID NO: 586368 - DNA, 4001 bp, Homo sapiens
cagggaagacgctaaccgaggtctccaaagttcaaagacccacaagcaaactgctccttcacttcagcagcaagcggtcggggccgccgcagacagagggtcgattatgcaacccccataatctcgctgcagatctgcgagggcacagatgtgtctggtttcttttacaaatagacttaatatgttcttggcaaaaaaaaaaaaaaaaaaaagaaatcttccacttatgcacggaatacagagagagtgaaagaaacgtagacacctcaacccggggctctcttttaaagttcagcaagagtcacacactgagaaggaaccggtggtggggtgttttcgtaggaaaggggcggcaggtcaggatgagattctcactgtcatgagtatgggtttgggcgggagggggagggattgccaaacgcgtgttgtacaaacctgccctggggctacaactccccttcctcaaaactaccacccctctggaactgacggagaacctctccagggtgtgtgtgtgtgtgtgtgtgtgtgtgtgtgtgtgtgtcaagttccagggagaagtgtggaggatgagggctgtggtctcaattctgccagagtaggggatgctaatattagcaggattattaatgtgctggtgggaagagatcaaaccttaccaataaaacctctccgccgagcctcatgcctttctcttaccgcccaagctcactaaccctcttaaactctctaagtaagtttcaaagcggacgaaaaaggaggacggaaagacaaattgtgggcgcctatggagacagaaaaaaaaatctatcctacaacgtgacccctcagcaaccctcctccacctttaaatggctttttgtttttggaaatgcctggataaaccgcaaaactctcggcgcgctcttctctggctggctacaactccttaacccccccacccccacccagcgtgctcagggcacccgcaccgtgctagcttgtggcggctctcaaactaatcctgactgagtttttgaggcagccttctattcccactcgcaccaacccagcacgcttaccaaaattcccaagtaaccttctctttgttacgcaaacgccaggagctgcttgattctttcttctctccacccctatcccctttccagcctagccggcttcctggccgggcaagctgggaattcagcgactgaagggccttggaaggtgccggaggggagagacgctagttcgaacctccacagggctctcctactaaaaatccctaaaatgctggcccgagaaactctctttgttggagggtctgagtcctactcccttctgccgcgtgcgcccccactgccgtgaaccgctgtgacccccaatctaccaccccatctcgcgcccccagcgtcctagtcgccctgtatctgcccagccttccccctgtccatgtacctggctggttggtggcgcttgggacgcggttgtaggcgccgccgtactggtggtaggagctagcgtagctatagtcggcataagctttggctgggtagctcccggcggagccgttcacgccgtgatactgatactggtaggggttgagagctttgccataggaagccgaggtaggagagcagtagccgtgcggggctccccccgtagggctgtagtagtcagaatcggtagctgaagactcgggcaaagttggcgattcctgagacggatggtgcatagctgcggacgtctggaacggagcttggaagtcgccggatcggatgctggggacccttctgtcaaacactcctgtcatcgctcacgggcggcggcagcggctgtccttgctgttgtggcggcggcagctgccctagttggctgtggggctgctctggtctaagcagacatggctgtgggagcgagggaggaggaggaagaggaggaggagagaaggaggaggcggcggccgcggcgaggaggagactgggagtcgtgaagtctctgtctccggccggctgactgctggctgaggcgcagcacagccttggttaaatccttaattgcgcgcttacgcacagcggggtggatctggttctattggccagggcctcgggagcaacagtaacaccctaactcgtccaactagttttagcacaacaaagcattgcttaaaaagggggtggggggtactgagggggtgtgtgtgtttgtgtgtgtgcgcgcccgcgcgcttgtgtgtgtttttgcttgttgtggagtggggaggggtcttagtctatctgtttttagtaaattccaaagacatcgcagaagccacagcacaaggctctgtgatgtctggggacaatgtgttccaatcagaagcctcaaaagtgcacatgttttgggaatgaggtgggcgaccatctttccttgcttcccactaccccgcccccgtgggctgcaccaaaggcgagtgtagaattaaacactgatactgaaatagggagtcaaggtgcagggagtggggagcggggggatgtaggatggaggcaagaaggaagggaaacagcattttttttttttttagtggagtgttgggaagcaagttgtaacttacatgttttgaaaatttgctctttggggaaagaggcaacttcctttgcaggagatgagtatctcccggacgcgggctggacaggaatgcccaagaaggcacaatgtccattaagccggtgaatggcagggagagttcctgcagcccaaagtccttataatgacttttaaaaattactgtcttaaacacatataacttaaggaagcccaaatcctcgttgctggcttgcaaaaagagccaaacagctccacttctgtttaatattttcatctattttcaagacattggaataaaggctctttaactatgttcagtggccaaagactcccgcaaaggtgaatggatccatgtataacctgccatacctccaggaaagaatgggaaagtctcggaagtggggaaggagacaaggatcaaagcctttgcaaagtcagatgatgctcattgatttccccctcctggctccatgaatgtggcccagtctctccatttcccagacccgggtttctgtaccctctcccctttatttcctgctgcaaagacatcctacttagctcgtatgcaagggaagaaaggattcaagaatcattcagttgatacacgagatctaaactttgctcttcaggaggtgctatccttgttctagtcgtgattcagctgggagtttagaaattcagcataaaagtctctcccaatccccattgttactcccctcaaataggcaactccgcggactagatcctgatttggggccttcctacatcttcctttacggggtccaagaccggcaatctgggagttccacaggctatctagggttatctggcctcccctccgttttccctcctaccgaagaagaaagcgtctgtgttagttgtgtctagtattagtttagccttacttggagtgtggagccactcggcctaaaacaggccgacgggtagaggtagggtgtctggaactcagagcaagatacagccccgctcaggaactccaaagcagagctgccgtgcgtgcaccaactccctgcctttgcggtctggactgcaccagaaaaacacagctattgtcgcacttcctttcgggggaaacttcagcaccgggagactggcgcccagcagcattctccttctcccactggcccgagtcacgagctttgggcctgggctgccgcgggcttctctgagatagacttcggggtaaacagagctgcagctgccagccagccctgacttgacgctgtcgattaccgacaggctgttaaccgtctagatgtaggctgtgaggagctaaagaacaggagggaaacatgggtctgcggtcctgggctctgctctggagaagttatcggcgcccatcgagtcacctgatacacactgccatttaattacagaaatcgcttcctcagatcaatgccaaggacagttca

SEQ ID NO: 586369 - DNA, 4001 bp, Homo sapiens
aaagtgcataactggagcaaaaggcatttgtcattaagctccttccatccttggttgactaggccaacaattcctcctgatgtgctccctgcccgatctgcaagcggtaccagcatttcagggatacttgggcttctcgggaattacctgtgtttgtgtcagtcctaaggaagctgccagttcggctctctctggaagggccagatactgtgtctgctgaaagcgatggtttaaagcctggagctgcaggctggaataaatggtccgaggcttccgaatctttttcccttttccattgaacctgatttccccgttttcaatcactgtagttttttgttgatctgtaagcaaataatacagaggagcggtcacccgggaggctactgctgccatctccctgctcctggcgtggcatgcaacgagtctccccaaagcccaataagggttacctcgaaaaatccctatgatgccccgacctctcttggtccactctgcccgtgtgctcccagcgtctgcgtaatctccttgacccagtccctggcccgaacaatgtgcagcgtctgggccaagggagcgccagaggccctcagacaaacagcccgctttgccgcagcggaggcggtgccggaggctctctggggtgcgcagcgcagcaaggcggcagctgtccgggcggagcggggcccctgtgcccggcttaacagtacctgaagctgtgcttgagccacccaggtgtttacgcggccagttgacttgatgtcaccagctccaagctcagtgcatcaagcatcctcggcatgttttgaaatgactctcctgaggaggaccaaatcctcaaacaaaacacaaccaacagctcagaccagcccacgagcaggctgcgcctctcacggcaactttgtccccctcgggtgctgagaaccatcagcccgaggttctttgcttcccctccacgaacaaaggagcagccaacactgtagcgaaaagctagatagggggcccggtcagggatgaaggtgagggacactttaaagcccactggaaagagcctgactgttactagtttaaccagagcgaaagccaggccagcttccctccgagtcactgaggagcacggggcgccccacgcaaagtaggccactgcctgcccagcgtgggctgggaagcaaaacacgctccccagttccggcccagaaatgtccccagccgggtcaaacgtgggttacagcctggagggaaggagcaaggaaaagggcgcacagacccaggaggctggagagcgcagtgtggactaactcgtcgaacgaagcctgcgccgggcccgggactcagcccgaactgcgcgtcggaagctgagggtccgcggcggcgggaaggggcccggctgggagaggccggcaggcaggcgccaggcgagcgggcgcgcacggggcccggccaagggcgcgcggggccgcctgggggagggggccggcggaggcccgggcgtcgaggaagtgagcgggcgggcggggtagggggcagtcgggaggcgggagaagcgagctgccccagcggcctctcacctgtgtcgtcccctcgcgtctgggcggctgcgctgctgttgtggtaggactggaggtaagggctgtgctgcgagtggctcatgtaggggtaggcggcgagcgagcggtggttgtaggagttccctccgcccgacgcgtagggcgagccgtggtggtggtgctggtggtggtggtggtggtgcgagccggccgctgccgccgccgccgccgagtgcaggcagtgcagagggtagtgcgcgcctgccatggccggggagctctgctgcgagtgcggctgcggcggcggcggcggcggcggcggcggctgttgctgttgctgctgctgctgctgctgctgttgctgctgctgctgctgctgctgcccgaactccatgaaggcggatttggacgagtcctggccttccaagccgtcagccatcgtagtcatggtcatcatcaaaaactttgggggctggagaaagccttctcccgggtttcctccaccctcccccacttggctcgcgccgctctcccctctgcagccaccttagctctttggatccttgcaaaaaaaaaaaaaaaaaaaaaaaagaatttaaagaggggggtggaggtggttctccctctccctcgctcttctctaatatatatatatatttaatataaagagatatagtgagcggggccttgttaactcaaagggaggaggaaggaggagggatgggagaggagagggggaggggggaatctgctctccccccgcctgctttccccccttggattttttgggggctggtgcagtttaaggcagagattttaaggtggattctgcgaaagttgcgcgtctgctttcagacttgatgcagacgccacgagtcgaatggtttgtctccaaagggcagtgcctccccattggtcagtcgccccctgacgtcacaggcgcacggcttctactggcgtgtgcgcgacttgcagagttcttcgcctaccttccgcagttccaatcccagccggagctgcagccgggggccgcgctgtgtggcgcccggggccgttggggagggaggcgcctctgcccggccggccgccgatgcttcccgccgcagctcgtgccccaaatcccggagccccagttgccaatatctcagccttgaaacagccaactgggggctgctctctttcaatccctttgcacccttgtaggttgcctgtgcttagaagcagtgaccccacccccgcattaaatccaggcccccctttcttgacgtccctgccactctggtcctactacactcttgtgggagctccttgtcaccgtggatttttctagacgtattttattgaaaccacagaaggaagacgaaccctcacacctgggctccaccccactggggggtggtacagaaaaagaaaaatcagaccctgttctggctcggtccctgccgtttcaggccgtatttcttatatattgtacaaaaggttgtggggggggggggcgtcttttttttcttttcagaacgcagcagcgtgttctgaaaacgaatcgttggaggactgacagtaatgcattttttcctattgaaaacagaagctactgtaatgctttcaaatatatgcaaatgatacatgcggttagtggtttggcaaatcttgattacaatataaactacccaagtaaaagtgccttcgtcctaaatttgtctctcgattacaattccaattgattttattttattgtcaacattgttaatgataaaaatagagtcgttttacagttatttttactttctggaaggaggcaattagagttctaatcaggaatacacaaaaatctcccatgattaactgcagtactttgttcaaattgctgctataaaattcagaacaatttgcctgtaatgattatggactgggtttattttgggaggtggaataaaagtggatatagcataaattatcctctaattatacaccagtgtcgcctcaattatcctcttatcaaaatggttgtctaactgccgcatttagtttcaattctctcctttttttctataaaaagaacttcataccttgttattattaatccatttattatttgcaaggggatttatatccgcacatccaggtggtagaaccacttctctttcaaagatggactggggaaagacattaagttcggagcagcccaaggctgcggatctagcctttctccctccggtctccagacccacgcaggttaaggcagccaagcagagacagcggagccccggtgcgtggttcaggcctggtcaacaggtaggagggccagactgggggccaggcacagaggagggcaggcccgcccgcaccggcgtccagggtcccgggttccgggtcccgggactggaggaggtcgccggcagcccgcccttccagaggcttgagattgggtggacgagacctgaagatcctctcggt

SEQ ID NO: 586370 - DNA, 4001 bp, Homo sapiens
gtttggtggcatacagaagcacctagtatcgagagttaaaatgagataaaaatcaccacaatcatgaaatgtatttttcacacctgtaacataatggttttttccagatacaatcaggctggtttttgtgctttctgtatggaagaaaaaaattattctcacaccaaattggattctctcagcatgacaatttttgtaacgttaaggaatgtagctttaaccttttttctctaaatcttaacagaatttctaaatcctaaccaaatacatgaaatcctgtctctaagtacaccataagagcaaaaagataagattttggtgtatcgccatagtcattctttaaatgttaaagtgatggcaaattattcaagttattaaaagacagtaatcctcagaaagctatttgaaatataatttcaaaaccagcttaaagaaatttgaagtaatgaaaaaacatgaaaacccttaactgaaaaaaacagattttgcaatactttcaacatagtggaagaatattttcgtatttggagcttaaaagctacaaatggttttctcccacgaattaaaaatacaggtataatttaaaattttccaaatggcgtcactttaagcttaagacatgtcatattaaaaaataattccacagaatatgcattttgtaggacgtcccaacatgcagcctcgactgtcagaaaggaggcacacataatcaaatccatgtacattaaaaagaggtacacaaagatgaatgagttgcgaaaaaagcaactacacaaattcaatgagagaaagggaggagtcctgactcatactgtatactattatccttttccttatctacaccgagtattttatataaagacatatgctctatcattcaattgcacaaaagggcacttggccacttctactctcaaatctgctctggagattgtggtaaaacattctacatacctccctgaagaaattctcaaagcgaagtacattttagagaacaaagtggacttaacaattttaagaactttctcggaactcggcacaatagggtaattacaactttacagccgcattttccgtgctccaccaggactgtccccgcgccccagcccacatcccttctttaaagagagtcagactgagagagacggttcggccagctatcccgattctctatgtctgggccgtgaatcgccgagcaaggctgaacccccgcaaaattacagaagaatctaaagcgcaaacgagggaaaagaacaaaaaagcaaagggggggaagttgggtcgagacccacccccactctctcgaccccacccaagcctacctctcctacgctggaccataaaacaaaaccgaaaacgtaacaaaaataaaaactaaaaatagaacaccacgagaaaacaagtagggcttccttactgtctccactccttctggcccagttctctactcaacctcccggcccaccccaccccccaggggtcccggcgccatttagctcctccgaagccgccgccattttccgcccccgccggatcgccgctgtgcctcggcagccgctcgcttccctactctgcagcctgagccacgggcaccgcccggccctaagagggaggccctggccggaacgtgcggggacggcagctgcaacgtcaggaaggccaggctccgaccccgcccgcagtgccccggcgccgacagcttgcgccagccggcgggagctagcgggcagcaagggggccggacaggctccactgggcggagcggccctggcggcggttggaacctgaaggttccatcgcacttacttcctgttttgggtccgggcactttggaagaaccaggatggaagctccaaaaaataccaggatggaggaagcagccacgggcgagagtggctgcagctggagtgagcgagcgcgacgagccaccggaaacggagctgcggccgcgccccgcccccagctccccgcacgctgcccctcccgctcgtctgtcccgctggcggcccagcgtgctggctgtacgcgtcacttccggctgtgtcggcgcgcgaaaaaaggtcctgggttggaatgtttgtactggtctgtggcggtggttgtcggctgtcctgccaggaaaactcggcactgactatcccactgctgatgctgtaaaagaggtccttctgctatgacgcaactgtggttcctctggttctggggacacttaggcctcgcgtgccgattttcatagttccctgtggctccgagccgagggagccgcggtgtggaacggagggaaccagtgatctcagtgctgaagaaaacagggagtgtgtgtcttcatacttgatttgccttaccgcaggggcataatatgagatatctgggcgtgttaagtcgttcttgatgaaatgtgtcctctgtgaatgtagtctcactgttagactaggaagatgctgttttgctgtgcccagttcctcttaaaagtacagatgctccttgggttgcagccgtataaacccatcctaaatagaaaacgcgttttaatacccttataaacgaaaaggataaataagcctttgggttctgtaatgtgagccagcattctttgagtgcgtatgtgacaggtaaatgttttacgtatattaaactcatttaatgttcataagttctaagtgcatcgctacaattattacaaatgaatcccattttacacaggaaccaaagagaagtgaaggaatgtgtccaagggctcccaagttggcggtggaattagaattgaagcctcagctccaaagcctgtgttctgaactacccggttgcagttcacaaaatacactttggcagtactttcataacgaaaacaaatgattacaaccagtttacaaatgctttgctttactggaggatcgacatgtttgactaattttcaaaaataaatctcagaagcagcattttcttgtgttgataactttattactaatttgtggcactctgcattctgttggagttaagccgtgtatcattccattttttaataagtacataataatgtttatgtaagcaaaactatgaggcagaatagtatcgtggtatggactcaggcagtcagacctgagtgtgaatcttggctccatttcttagtagtggatatggcacttcacctcttttagctttgtttactttaggagtaataagatgtaccttccagaatattgtagacagcgtagtttgcatggaatctgacgtgtattaagcattaaaaatggtaactaataaaccttaaagccaggaaagcaatacaactactcaaagagcagttctaataaaataataattacatatgcaaaattgttgacattaacattgataaggtggttcctaatgagccatatttttcataagacataaccatataggattatttttgctaaggcacaaaatagtgatatataaattatagtcgggctatccattctcctctgctaaattttaggtcagcctgcacgctgctaactccccgcaaaaagtcaagtgcatcctcataactaaattctccctttctggttgagtttcttttataactaccttttcccaagtcaattggtatttatttggggatgacaaatgtattttaatattagcttaatgcataatttaaaaaaatataataacgtctctatccctttagcttgaataatcaatgtaaagactatccataacacaacttgattcctagagcaattttctgcagttatacttctatgttatccgtacctcattatttagtcaatgtgtacctagggaatggatgaggttttaaatattatccaaggatttacctatttaggaattaaatgttttgtagaaaaatcattagaagtatttctatcctaaacaataattattaaagtatttatagcttagctatggtatttactgcatttgctagttaaaattgactttgttggactccaggtgtctataacacttttgtgaacctcatcagtgattga

SEQ ID NO: 586371 - DNA, 4001 bp, Homo sapiens
agaaagatgcaatgcccagtacttactgattaaatgttgatgaagacagggcaatagcattttggctccaccattagctcaactgcaaccaattaaagagattcacgcagaatatgcaggtgctaaatcagtccccaaaagcatattttggggtgagcctatcaactaaaatagtaagaaaaaaaattagcttgtttggtggcatacagaagcacctagtatcgagagttaaaatgagataaaaatcaccacaatcatgaaatgtatttttcacacctgtaacataatggttttttccagatacaatcaggctggtttttgtgctttctgtatggaagaaaaaaattattctcacaccaaattggattctctcagcatgacaatttttgtaacgttaaggaatgtagctttaaccttttttctctaaatcttaacagaatttctaaatcctaaccaaatacatgaaatcctgtctctaagtacaccataagagcaaaaagataagattttggtgtatcgccatagtcattctttaaatgttaaagtgatggcaaattattcaagttattaaaagacagtaatcctcagaaagctatttgaaatataatttcaaaaccagcttaaagaaatttgaagtaatgaaaaaacatgaaaacccttaactgaaaaaaacagattttgcaatactttcaacatagtggaagaatattttcgtatttggagcttaaaagctacaaatggttttctcccacgaattaaaaatacaggtataatttaaaattttccaaatggcgtcactttaagcttaagacatgtcatattaaaaaataattccacagaatatgcattttgtaggacgtcccaacatgcagcctcgactgtcagaaaggaggcacacataatcaaatccatgtacattaaaaagaggtacacaaagatgaatgagttgcgaaaaaagcaactacacaaattcaatgagagaaagggaggagtcctgactcatactgtatactattatccttttccttatctacaccgagtattttatataaagacatatgctctatcattcaattgcacaaaagggcacttggccacttctactctcaaatctgctctggagattgtggtaaaacattctacatacctccctgaagaaattctcaaagcgaagtacattttagagaacaaagtggacttaacaattttaagaactttctcggaactcggcacaatagggtaattacaactttacagccgcattttccgtgctccaccaggactgtccccgcgccccagcccacatcccttctttaaagagagtcagactgagagagacggttcggccagctatcccgattctctatgtctgggccgtgaatcgccgagcaaggctgaacccccgcaaaattacagaagaatctaaagcgcaaacgagggaaaagaacaaaaaagcaaagggggggaagttgggtcgagacccacccccactctctcgaccccacccaagcctacctctcctacgctggaccataaaacaaaaccgaaaacgtaacaaaaataaaaactaaaaatagaacaccacgagaaaacaagtagggcttccttactgtctccactccttctggcccagttctctactcaacctcccggcccaccccaccccccaggggtcccggcgccatttagctcctccgaagccgccgccattttccgcccccgccggatcgccgctgtgcctcggcagccgctcgcttccctactctgcagcctgagccacgggcaccgcccggccctaagagggaggccctggccggaacgtgcggggacggcagctgcaacgtcaggaaggccaggctccgaccccgcccgcagtgccccggcgccgacagcttgcgccagccggcgggagctagcgggcagcaagggggccggacaggctccactgggcggagcggccctggcggcggttggaacctgaaggttccatcgcacttacttcctgttttgggtccgggcactttggaagaaccaggatggaagctccaaaaaataccaggatggaggaagcagccacgggcgagagtggctgcagctggagtgagcgagcgcgacgagccaccggaaacggagctgcggccgcgccccgcccccagctccccgcacgctgcccctcccgctcgtctgtcccgctggcggcccagcgtgctggctgtacgcgtcacttccggctgtgtcggcgcgcgaaaaaaggtcctgggttggaatgtttgtactggtctgtggcggtggttgtcggctgtcctgccaggaaaactcggcactgactatcccactgctgatgctgtaaaagaggtccttctgctatgacgcaactgtggttcctctggttctggggacacttaggcctcgcgtgccgattttcatagttccctgtggctccgagccgagggagccgcggtgtggaacggagggaaccagtgatctcagtgctgaagaaaacagggagtgtgtgtcttcatacttgatttgccttaccgcaggggcataatatgagatatctgggcgtgttaagtcgttcttgatgaaatgtgtcctctgtgaatgtagtctcactgttagactaggaagatgctgttttgctgtgcccagttcctcttaaaagtacagatgctccttgggttgcagccgtataaacccatcctaaatagaaaacgcgttttaatacccttataaacgaaaaggataaataagcctttgggttctgtaatgtgagccagcattctttgagtgcgtatgtgacaggtaaatgttttacgtatattaaactcatttaatgttcataagttctaagtgcatcgctacaattattacaaatgaatcccattttacacaggaaccaaagagaagtgaaggaatgtgtccaagggctcccaagttggcggtggaattagaattgaagcctcagctccaaagcctgtgttctgaactacccggttgcagttcacaaaatacactttggcagtactttcataacgaaaacaaatgattacaaccagtttacaaatgctttgctttactggaggatcgacatgtttgactaattttcaaaaataaatctcagaagcagcattttcttgtgttgataactttattactaatttgtggcactctgcattctgttggagttaagccgtgtatcattccattttttaataagtacataataatgtttatgtaagcaaaactatgaggcagaatagtatcgtggtatggactcaggcagtcagacctgagtgtgaatcttggctccatttcttagtagtggatatggcacttcacctcttttagctttgtttactttaggagtaataagatgtaccttccagaatattgtagacagcgtagtttgcatggaatctgacgtgtattaagcattaaaaatggtaactaataaaccttaaagccaggaaagcaatacaactactcaaagagcagttctaataaaataataattacatatgcaaaattgttgacattaacattgataaggtggttcctaatgagccatatttttcataagacataaccatataggattatttttgctaaggcacaaaatagtgatatataaattatagtcgggctatccattctcctctgctaaattttaggtcagcctgcacgctgctaactccccgcaaaaagtcaagtgcatcctcataactaaattctccctttctggttgagtttcttttataactaccttttcccaagtcaattggtatttatttggggatgacaaatgtattttaatattagcttaatgcataatttaaaaaaatataataacgtctctatccctttagcttgaataatcaatgtaaagactatccataacacaacttgattcctagagcaattttctgcagttatacttctatgttatccgtacctcattatttagtcaatgtgtacctagggaatggatgaggttttaa

SEQ ID NO: 586372 - DNA, 4001 bp, Homo sapiens
cagtgctgtcctgtggaacctacggtccagggagggagctcgtggggctgatgtacagactgggtagggaagtggttgaggatgaagaagaaatacattaaatgccaggaattctcaatggccatgtccatccagcccaaggttcttccccaagctccacaggagttctggaccatgtgaaatccaaagttaaccaacgtggaaatctcggcatttccccaagtccagctcttcctctacttctggaatctattctccacgcagctgcagtgatcttttaacaacctgaactcgggtctatcacttctattgacaccccctgcacttcccactacattcagaccatcactgggacatcactgggacggcctgagctggccagatccctcactgctttcctgctccctaccgcccacggatttatagcatcagtgttccctccttcggaaagccttcccgccagcaggaagcaggcgcctgctatcattccacatcccagccaggggagggaaagggcaagaccctgcaggaatggccagctaaggaaagggaacgaccggatcagatcagagctctaaaaaagatggggaacgttataaagtggaggggagaagcggcctccttccacttaggacagtggtccaagccagagcggaaaggcaggggagtaggatgaatgggacagaaagtgaaatgaccagagcagagtctcaaagcgcgtgccctcaaccaggtgcaagtcctgcaagcccccgagggaaggaaagggggcagctatcagggcacaccccaccccaaaccgcctaacaggaatttctgcggtggtttccaggtatctggacagaagcgctggctcgtgggcccgggtggggtggagggggctcaggcagggaggagggtgggaggtgagggtcgcgggagggcggcgtgcaaggaggaggatggcacaggataggcaggtggagggggcacagggagcaggcaggtggggggcggggcttggggcgtggagggtggaggcggggagcaaggggacaggggagtgaggtgagtgagggccaagcaggaacaggggtcacggggcaaggagcacgtggcagcgcaggaaacaggtacatgggggtagaggacaagggagcagctgaagggcgcgttggtggcgggacgtgaggcaggggaagcagtggtggtgggaggagggggccgggcggggtgctttggggcaggcgggtgggggaagcggcgcatggggggtccgggatgttggggggtgcgggcgtggaggggggcggggccgagccgcgggggttgtgagaggggccgcggaggtggaggtgggggtgagagtgtggggtggcgtgtgggagcggggcccggggtgctcaccgggcgtggcctgcgccagggcggcggcgcagctgcagctctcgcggcgcacggcggcgaaggggtcgagcagggagcagcgcagcgcgcgcagagcgtcgtccaggtggggcgcgagcgcggcgccgcacaggtccacggccaggcccagcagctgcacaagcgccaggcgcagctcctcacaggcctcgggcgggcggcgcgcgggcacggggccggccaagcgcgcggcgagcgcgggcagcaggcgcggcagggcatcgcggggccgcgcggcgcggcgcaggcccagatccagcaggtgcactgccagcgcgcggcagccctcggcggggtcgctcaggcagcgcagcaagcgcggcagcagtaggcgcgcccaggggccctggaaagcggtggggtcggcggcagggcctggctcctccagcgcgcgccgcagggcctccaaggcgcgccgccggcccggcttgctgtcggcctccagccccggcagcaggcggctcagggcgcggctcagctccaccgcctcagccgtctcggccccctcagccgggtgtggggccgccacggcctccgccacccccagcgccgccatcttgcccgcgtcgccggtcactaaggggaacagcgctttcgcgactctcagcgcagattacggcagcacttccggtccgcgctgcgggcggggcgccgggctacttcctccccgccggtgcgcacgtgggcctgtgctcttgtcgtgctcgcccgctgtccccctctgtcgccggaacccccgccagcctgcctgctgggccttgtcctgtccccattgtacagatggggaaggtctcgggagggtgcagctcgcccgggatgcgggtcccgggctataggcctgggcctgcccctagggaagcctgccctgcagcctagggggcttggagaaggaacctgagtggtcccgcctgggaccagggtagccgggaagcccctgtttgagccgcctagagcccctctggctttgggaaggtccgttccaggagggaaggacgctggttctgtggactggatccccctgtggtgtaagacaggtgcctggtctgggcttcacgtgcagcctgtcattagatctcaggcgtagccgcccaataggttcgccttactcgctgcccaggtagagccaatttatcaagacaggggaattgcaatagagagtttaatgcatgcagaaactggctgcatgcagaaactggctgcatgcagaaactggctaaaggacactggagctttattgctcaaaccaggttctgaaaatcctgagatgggtcatctaaggataattaggcaggtagggggccagggagagggcagtgcttattggtcgggttggagatgaaaccatggagagtcaaagttgattctcttgctgtcttctgttcctgggtgggatcacagaactggttgagccagattagtggtgtgggtggtggcacctggtgcatcagaatgcagagcctgaaaaatatcttgagcaccaatcttagagttgatgatagtggtgttatcctaaggagcaactggggaggtttggaatcttgtggcctctagctgcatgactcaaaccacaatttctaatcttgtggctcatgtgttagtcttacaaaagcattctggtccccaggcaagaaggaggttggcttcaggaaagggctgttatcatctttgtttcaaagttaaactataaactaagttcctcctaaagttagcttggcctactcccaagaaataacaaggcagcttggaaattaaaagcaagacagtgtttcacagtagtgaccttgactgtggacttgagtggagacagaggcgcctaaacagcttggagtcggagttgctgtgagcccagcctagaacgcgagtttgacagcactcactgcaaaccaggagtccccaagtctggttagccaggcacttctcatctgtgaccatgcactgagttttctaaaggcagaatgtgtgtaattttaggacagaacttcaagtttgaccttcttttttgttgttgatcttcgtgttgcaaaatggtggtgtttgtcggtacgtcttttttttttttttttgagatggaatcttgctctgtcgcccagcctggagtgcagtggcgcgatctccgctcactgcagactctgcctcccaggttcatgccattctcctgcctcagcctcccaagtagctgggactgcaggtgcccacgaccacgcccagctaattttttgtatttttagtagagacggggtttcactgtgttagccaggatggtctcgatgtcctgacctcgtgatccgcccgcctcagcctcccagagtgctgggattacaggcgtgagccaccacgcccggcccatcagtacttctgaaaagttgttatgtagcatattcagtaaccttcattcattgtttcctccaacaggcatttgtttgaccaggcactgtctgcaacatgtgggacaggatgacaatgatgtagaaactggccatggtccctgctctcccagatcttagggtcttgcaggatgagatagcccttaatggaaggataaattagtatgtgtttaaccgtggtggtcctgagag

SEQ ID NO: 586373 - DNA, 4001 bp, Homo sapiens
gtcctaaataatttcaaatgtcatggagataagtgaaagctttaaatattaaagacagaccagtacctcatcaaggaaagcagatacatgtccaagagacaacgcaggtaactctccaaataaaaccacttgagaaaagtcatttactccaatgctttcagtaatcttcttggaaataaaaacaagtttatggtttgcatctcttggaatctaaaacaagagcaagataattagttcaagtagttttcttgttaacaagcaggatttactatatccaacttgtagctgtattgctagcagaagaaacaaaacctggcatcttgcctgccctataaacaaggtccttctacggctcttccctagtatgcagcgagtatacagttttctttgttcttttataatgctaatttcacagcattactggtgtggaaatatcaccttttaaaggcatgccaattataccagttcattatacaccaaaaaaaaaatcttataactaaaaacaaataaggagcacgtaggcatgtagaaatgtttcaatcctaaagggttattttttatactcttctctggtttggaaataagccaaactgagataaagacaagcccaagaggttaatttgtatttctatcaaagaatagaaccgtataaccaaaacatgctaacatttccacaactactgagtcattccattgaacattataataactatttaacttaggtaatactagagttgtgttctatcgccttgtctactgacaaacttattttttttaaagttacaattaggagagtcctaaaacaaaagaattcaaaattcacaataccataaggcagccttcctattactctttcttctctgagatcctatttcccaactattacaatgaccacacctagtgataaaacgacataacatgttaaactgagcattgcgctacttaaaaattgtgaatcttgctccaaactcatcatacttgaaaaatactaaatacaagtgctgtacgttaggtgatacgttaaccttttagtggacaaatcatcgaaattcaaaaagaaaaggaagaaaaagaagaaaggagggaactgttccctctaaatgttcagtaaacacccatgtgtgcggagattgcaggggccttcctttttaaggacttaatgtttttgcctggggtgaagtgttgttggcacgtaatcaaaatacgtgacgagttacatgcgctctgccaaacaccccattttttaaaggatgtgactccagagtgacccaagagcaactgaaacgcaagttttttggcacagaaagcccacctggcgcctaacacccaagcagctaaagaaagcgctggtgttcttgggttatcctggtcgaacaggctcaacgcgggattctcggtcagatacaaactgctgacttaggaaactaacctgcagctgctgaactgcagagtgggtgcacgtggggaggagtcctgcgggcctcaggatggggacttcaagccaagtttgttaaagtgcccgagtgagcgccccgcgggaatccaaaggggagcgactgggctgtctcccctgggtagttttgttggatgggcaggtccccttgcccgtcgcctcttacctcctgggaagccgcaaggcgccccgaggcggcgaagctaaacacaaggcaagccgggctggtgctttccagaaactccccaagaacctgccggttgtcctcgctttccaaatactggctccatttctcctccgtgaaccccagcatcatcgccaggcggccgccgaggaagcgcacccgcgcgtcttgggcgaaactccgcgctctcctggccgccgcctcctcctcgttctcctcctcctcctcgagctccacagcgcccactgcctccaggccggcccccgaggttaggcgaagggtcggggcttctctgaagtctcgcgcctcccgggctgccacctgggctgccattgggcaaccgtccgagggaacgcgaggccggctggctcctcacccgagactctgggccccccgaagtgagcgaggacacctccgcaggcgcccaccctcctccgcggtcgccgcgagcgcagaccctagtctcccacctgctgctacttagcagccgcgccactgcgcacagctgtagcctcgcaggccgaagcgaaggcctgggacaagcagcgcgtcccgtttcccgggggacggtgtccccgccccagcccgctgggggcggagtgagcgcaccgcgccaccgcccagtatacgccaaggccaaggccgaggggagaggccctcgggctctaggtcccgaacacggccgagaagccgcgtgtccggggtgggtctgagcccccagtgcgctcgctccactgccctccggctccttcgcctactggacacttggtggagatcccagcattggttaagtgctctggatgaagcaatgctctcttgtgccaaggtccgtgctaatctcttaccttgactagttgacataatccgtagaaagccaagtctctgactggtcagtctttgttttatgggcaaggaactaagttacaaaaataagtaacagagaagtttcggggcccaagttgaaggctgttattcacctttcccaaggtgtccaaatattaccagaagagagccagtcctgcaattcaactttcctagttgtgggaatccaagatctaagtattcgaagtcctcctgattgccatcctcaacctgaaacttactggaacttcagtacacccagtaagagaacgcacagtgccctttcgtgatctccaaaatgttccgaaaatctatagatttatcatttaattcaagagtaaaaaggtcaaagagaaaaagcttcagattaaaaacagtttcatgatactgaaataggatttcactgcggtccattagtggctttcgttgagactcttatggaaattctaattattaaagcaaccagaattttgaggaggagtcctcaactaaacttttaagtctcctttgttaattgtttatttcaaactaaagtcttcaatccccaccccttccatgggggctactgaaggactgttgcccacaataatccatttaatacctgaatgttgacagacatttccagaagatgaggcttcaacaatttttttctttgcaggatattaactgcccctgaaaaccatcgacaagtttccagttatgtgatcagaatcttgaaataacacagggccttggaaaactttgataatgacttctaacctgtcaaggctgctttatattgtccataataatctttggggctcccagttgctggtatacaaggctggcaatcaccagttccttctctcccctcttatattccagcttcacatccctgtaacctagaaaaccgggaattctgtaaataatagttgaattaaattgaaagtgaataaccactttcaaatctagcaggaaaattttttaaatgatgctaactttaaagtgcaatttccaaaaagttaactatgtaactcgaaatataagatgaagatatgtcaaagattgatttaactcataaatgaggaaagcaacaaaatgatgtaagttccaaggacagttcgagaaagaaatttagcagcattggaggaagacaggatgagtcagcttgctaggttcaaaacaacactcactaatgtcatacagggcaaaataatcctttgttttttaaaaaataatttgtttttccaaaataaattacatctgtattgaacaaaaatctgtaaataaaaacgtaacttcagagtttgagacttcgatcagtagtagttaatgagtccaaaaaagatacttttccctaaataattaataatcctttcattggccggtgaagcagtgtttcaatgtgacagtgaatgaacatggctttaccttgttcccaagttttatgtattttttctcaataataatagctaacattgatcaagtaccaattatgtgccatgtgctgtgctgagttcattc

SEQ ID NO: 586374 - DNA, 4001 bp, Homo sapiens
acctaacactttcatatccagaagaaaataaattttaaaacactgttttgaagagagtgctgaactcatctcaaattctttaagagctctgccctctggaattcccaactttctcaccttccacagcacagatgaagcctggacactttccaaaagcttcccaacccctttgttctcccacttcctgtcaaatctccacatctaccaacttaaggcaacttacttcccaaatttcacagcctgcgtaatccacaaaaacccgcagctcgctgaagcgtgcataaaaactattcatccctttatcacggaaggcagaaagaaatgtgaaagcacaaactccaagggagcttaaggccctcaggagtggaaacaagtctggagtcggcgaggcgcggtggctcgcgcctctaatcccaacactttgggaggccgaggcaggcgatcactttaggtcataagttcgagaccagcctgaccaacacggtgaaacccccgtctctactaaaaatacaaaaattagtcggacatggtggcgagcacccgtaaccccagctactcaggaggctgaggcaggagactcgcttgaacctgggagctggaagttgcagtgagtggagatcgcgccactgcactctggcctgggcaacagaacagactccgtctcaggaaaaaaaaaaaaaggaagtctggagtaaacccagagagaacgcgggacgggtggactggcggaggagtaaggcggctgcatataattcctttcagaaatcatgaatcgttctgatacgcaacactatttggaaaagtgcggttaaacacgaagcagcagcaatcaagctttaatggttaacgtctgtttcctttcttcggtcttcactctaacttttctactaaatcaataatttggcttaaattgtagcgacaaatccttactaaaattcgcaactcaataaaaacgttgaaaactacaaagagcgccgctcagcctactcttcccaaacaggctgaagcctccgagctcgcaggcggcaccccttcggtggtggcacgatcgttctacttgcgctgtttcctgccccgtttacgtgagaagttagcacagaagtttacgtctgactagcaaacccatcctttaaaaaattcgctagtgccaaaacctttctcgagccaatatatgatttgcagtttacactgcgtgtgtcactgaccttccttaggtaagagttaatgtaaacttcttatataaacttcagttgcatcaactacggtgcagattctttaacgcaaagcaaagcagacaaacattctgagtgagaaaggcagcctgctcttccacaaacttctgaacaatccgtccggagttctagaaacagggctttgcggtcccccacctgcttcttctccctccgaacttggcggcacggctgcggcattcctgctccgcaagccactcccgtttctggtttcagacgcgagtgcgggagccttagaaaaagaaggcgctccacgcctcccacgctgccggccccgccgagccccagccgagccccagccggccgctcccaggccgggccccacccccaaccgccgccgcggaggctgggccgcgttccggcaaggacgccgggcggggaggacgcggccgggcggccccagaccccagccccggccccggccccagacctgacccagaggaccccgcccacccttcgccccgcaaccccggccacggcccccgccccgtccagtcctttccccggccggcgaccccggtcaccccccgcgctgttgccaggcgccgggtgaggtccgccgtctgccgggcgcgcgcggggccctaggcgacctcccccgaccctcggaacagaccctcaccgaggacagaagcggccggtggcgggacgcaggggaggcagggtgacggcccgaatctcctcacagctccaggactgctgcgctggtggtggcggcggctcctcgcgctttcctttctctcctttctccaacaacaaacaggaaatgcgtcacgcggcggcggcacggcggcgtcaacttccgcccgaccctgacgccgcgcatgcgcagtttccactgcccataccgcgggcccaacctcgggggcgcccgccccaccttcgcgaaggttctcggctcttccgccgccccgaagagcccaggagactgggggcgagggggcggggaagcccagggcgagggggcggagctcggggccgggtctacggtaccggggagcccagacgcgcggaaggcacagagaaggccgagaagattccaaatggcacttattgttgggccagaaggagcccattctggaaaccgcgaagtcgtcgcgcccttcatcttcctcttgaccggcggcccccggagcgcgtctgccgcctctcgctccgcggtcctgcggtggagctgggtggcatctccgcacagcgggacgaaagctggggcgcgggcgcgggcgcgggcggagaagtccccgaaggagaagaagaacaaaccaagcggcggccagcgaaggcgggcgaaggcgccggcccccgcttgtcaatttagggaagcccggataccctaagttccccggcgaacgggagcgcgtggagacttcgccagggaatagtgactgaaggaaacggaagcaaactgtggcagaaaatacagatgaagctttttaggttaaatcgtggcagtagtttttctgaaaacgcggcgcattttgatagctggactttaggtcatccccaggcttcctagcctttcccgcgtcctcaggggttctggttctaaccctggagaccaacaccacatgcgtgtagatggtgaccagcaggagcagggagtctcagacccagtgcagtcagacaggctcccattcccagtagcgaaagggtcccgcagacccaaagcctaaggagccaacaagcagttcgtccatggagcctggcctggatctcccactgtcttcctctccagcattcagccagatgtttgctactgtgttgtcttagtcctggcccaccttatcctttcctttaagaaataaaaatctcaactgggtgcggtggctcacgcctgtaatcccaacactttgggaggccaaggcgggcggatcacctgaggttgggagttcgagaccagcctgacacatggagaaaccccgtctctactaaaaatgcaaaaaaaattagccaggtgtggtggtgcatgcctgtaatcccatctactgcagaggctgaggcagaataatcgcttgaacccaggaggaggaggttgcagtgagcggagatcacaccattgcactccagcctgggcaacaagagcgaaactctgtctcaagaaaaaagaaaaatccctttttgttacacctttcctgaacttcagatcctgtggcatgctgacactgaattccgggggcctgctcagccaccttctgaactaacaacgcttatgaattcgtgatcgtttaagcctgggagatattcaagtaaaaggcactttaacacttgaatcacttttggtttaaaatagctcgttagtaatgaaagagttggagaaatgccaccctgaattatgccatattaggatactgattactaactagttcactgattaccacattagtatgccctcaaactgagggcacatggggacctgccaatgcagggaggggcattctgtgaatcccccattatttacataaagacagatcatcccaaagggactcaattgtcttgaccccctccctggaagtctcatccagggaagaatgagccaggatcacgggagaagagcttcaagggacgtcagctgcacacccagacagattttgccacaggccaccacctattctgaaggcaaaaaatcattttctctcccctgagctgcctgcatctgcctcccctctcttctatgaaggggctgtataagcttccagatctcactggattctgggatgccctagtacatgttatagatttgtatactttttc

SEQ ID NO: 586375 - DNA, 4001 bp, Homo sapiens
aacctaacactttcatatccagaagaaaataaattttaaaacactgttttgaagagagtgctgaactcatctcaaattctttaagagctctgccctctggaattcccaactttctcaccttccacagcacagatgaagcctggacactttccaaaagcttcccaacccctttgttctcccacttcctgtcaaatctccacatctaccaacttaaggcaacttacttcccaaatttcacagcctgcgtaatccacaaaaacccgcagctcgctgaagcgtgcataaaaactattcatccctttatcacggaaggcagaaagaaatgtgaaagcacaaactccaagggagcttaaggccctcaggagtggaaacaagtctggagtcggcgaggcgcggtggctcgcgcctctaatcccaacactttgggaggccgaggcaggcgatcactttaggtcataagttcgagaccagcctgaccaacacggtgaaacccccgtctctactaaaaatacaaaaattagtcggacatggtggcgagcacccgtaaccccagctactcaggaggctgaggcaggagactcgcttgaacctgggagctggaagttgcagtgagtggagatcgcgccactgcactctggcctgggcaacagaacagactccgtctcaggaaaaaaaaaaaaaggaagtctggagtaaacccagagagaacgcgggacgggtggactggcggaggagtaaggcggctgcatataattcctttcagaaatcatgaatcgttctgatacgcaacactatttggaaaagtgcggttaaacacgaagcagcagcaatcaagctttaatggttaacgtctgtttcctttcttcggtcttcactctaacttttctactaaatcaataatttggcttaaattgtagcgacaaatccttactaaaattcgcaactcaataaaaacgttgaaaactacaaagagcgccgctcagcctactcttcccaaacaggctgaagcctccgagctcgcaggcggcaccccttcggtggtggcacgatcgttctacttgcgctgtttcctgccccgtttacgtgagaagttagcacagaagtttacgtctgactagcaaacccatcctttaaaaaattcgctagtgccaaaacctttctcgagccaatatatgatttgcagtttacactgcgtgtgtcactgaccttccttaggtaagagttaatgtaaacttcttatataaacttcagttgcatcaactacggtgcagattctttaacgcaaagcaaagcagacaaacattctgagtgagaaaggcagcctgctcttccacaaacttctgaacaatccgtccggagttctagaaacagggctttgcggtcccccacctgcttcttctccctccgaacttggcggcacggctgcggcattcctgctccgcaagccactcccgtttctggtttcagacgcgagtgcgggagccttagaaaaagaaggcgctccacgcctcccacgctgccggccccgccgagccccagccgagccccagccggccgctcccaggccgggccccacccccaaccgccgccgcggaggctgggccgcgttccggcaaggacgccgggcggggaggacgcggccgggcggccccagaccccagccccggccccggccccagacctgacccagaggaccccgcccacccttcgccccgcaaccccggccacggcccccgccccgtccagtcctttccccggccggcgaccccggtcaccccccgcgctgttgccaggcgccgggtgaggtccgccgtctgccgggcgcgcgcggggccctaggcgacctcccccgaccctcggaacagaccctcaccgaggacagaagcggccggtggcgggacgcaggggaggcagggtgacggcccgaatctcctcacagctccaggactgctgcgctggtggtggcggcggctcctcgcgctttcctttctctcctttctccaacaacaaacaggaaatgcgtcacgcggcggcggcacggcggcgtcaacttccgcccgaccctgacgccgcgcatgcgcagtttccactgcccataccgcgggcccaacctcgggggcgcccgccccaccttcgcgaaggttctcggctcttccgccgccccgaagagcccaggagactgggggcgagggggcggggaagcccagggcgagggggcggagctcggggccgggtctacggtaccggggagcccagacgcgcggaaggcacagagaaggccgagaagattccaaatggcacttattgttgggccagaaggagcccattctggaaaccgcgaagtcgtcgcgcccttcatcttcctcttgaccggcggcccccggagcgcgtctgccgcctctcgctccgcggtcctgcggtggagctgggtggcatctccgcacagcgggacgaaagctggggcgcgggcgcgggcgcgggcggagaagtccccgaaggagaagaagaacaaaccaagcggcggccagcgaaggcgggcgaaggcgccggcccccgcttgtcaatttagggaagcccggataccctaagttccccggcgaacgggagcgcgtggagacttcgccagggaatagtgactgaaggaaacggaagcaaactgtggcagaaaatacagatgaagctttttaggttaaatcgtggcagtagtttttctgaaaacgcggcgcattttgatagctggactttaggtcatccccaggcttcctagcctttcccgcgtcctcaggggttctggttctaaccctggagaccaacaccacatgcgtgtagatggtgaccagcaggagcagggagtctcagacccagtgcagtcagacaggctcccattcccagtagcgaaagggtcccgcagacccaaagcctaaggagccaacaagcagttcgtccatggagcctggcctggatctcccactgtcttcctctccagcattcagccagatgtttgctactgtgttgtcttagtcctggcccaccttatcctttcctttaagaaataaaaatctcaactgggtgcggtggctcacgcctgtaatcccaacactttgggaggccaaggcgggcggatcacctgaggttgggagttcgagaccagcctgacacatggagaaaccccgtctctactaaaaatgcaaaaaaaattagccaggtgtggtggtgcatgcctgtaatcccatctactgcagaggctgaggcagaataatcgcttgaacccaggaggaggaggttgcagtgagcggagatcacaccattgcactccagcctgggcaacaagagcgaaactctgtctcaagaaaaaagaaaaatccctttttgttacacctttcctgaacttcagatcctgtggcatgctgacactgaattccgggggcctgctcagccaccttctgaactaacaacgcttatgaattcgtgatcgtttaagcctgggagatattcaagtaaaaggcactttaacacttgaatcacttttggtttaaaatagctcgttagtaatgaaagagttggagaaatgccaccctgaattatgccatattaggatactgattactaactagttcactgattaccacattagtatgccctcaaactgagggcacatggggacctgccaatgcagggaggggcattctgtgaatcccccattatttacataaagacagatcatcccaaagggactcaattgtcttgaccccctccctggaagtctcatccagggaagaatgagccaggatcacgggagaagagcttcaagggacgtcagctgcacacccagacagattttgccacaggccaccacctattctgaaggcaaaaaatcattttctctcccctgagctgcctgcatctgcctcccctctcttctatgaaggggctgtataagcttccagatctcactggattctgggatgccctagtacatgttatagatttgtatacttttt

SEQ ID NO: 586376 - DNA, 4001 bp, Homo sapiens
ttgactggggagtagccatttctaatatcctaaaacagaaaagaaaaaaaaatgttatggatggagctaatcttaaaacgtttttcttttaaaagaaatccaacacaaggtaaacctaatgcagtatcaaaatagtaagcatacagtatctattacctgtccacatgtaatttcacttttagttttataactctcaaactggcttaaccttattgagaacaaaaataattcttggctttgtctgtctactaatactctggccatacacagaggagatagaaaattatcaataactgacttttaaccagtttatattgaagattcatcatatgcaagcattgtaagaaaaaaaaagaaaaccaaataatataagatcccaactttcctttcaagacttcatatcctgaaagtaataatgtatttaacttcacagaaaaaaaaaacattaaaaaaaaaaggtggcgcaccaaggtaaatagcccagtatatctaaattagtattattaatctcgctccaaaaattcagctttcatttcagcaggtgagccaaggactgcaaatagagaatcttaatatcacaatactaatactgacaatacaatagaatgttgtctttttcccaaatgtaagatcccaaatgtttaaccaggaagcatggctaaatattgtttaaaactcatgatgaacagaatttaagatttctgctaaagctgccagaaaaatgaactttgatagtttgtactgtggttaaggcagattcttactttcacaaactcagtagttaaaatatttcttttacctttaaaccattaaagaaatgttaacttagaattcttgacaatatgtattcaatgacttgagattcaaaacgaagggatggatcctgttttttgaatacgggaccaccagagtccttagtaacctataatgccataataaggctgacgaaaaacactacggtttgtggaaattgcctggcttcctctccagcggcctttcctgagagtaattagcaggcaggtagattacttatttccagagagttactcgtagtcacgggtaccaagaatcaagaaccacttctcggtttaaggaacacaacagtgtgtcccatggacgctgcgtcaactgcaggttgctccctagtcaaagggcggatctaaaactgacagggaggcgcctcactggttcagcagacgttattccacggtctcaaggtggacatctaatgatttttttttagcagactagttttgtattgtacagacttctcatccccaagacggccccgccagccagcagcccgtgccttattccccagcctcggtgggcggctgggctagaccctccaaccttcacctaaaggcgactggcactttccctgcccgcccaggccccgccgcagaagctgcccgagacccgggctctaatccggcgcccgtgaaagccggcgccacaacccaaaacacgattctgtgatgcggctgtctccgttcttccattctctcggccaaaaacatgcagcccattgtccctgcggcgaccgtggcggacaccgaggccaagtcagctcacaaagacaggcctgggctacggggaccctccgaactcccctccccacgaccccggcctcgtccctcacctgcaccctccgactactgctgctcctccacagagctgaggcgctggcgaccctgacgatcggctcgggtcggcagcttgggcccggcccctcaccgcggcctcccggagctggcacgcaccctaatctcggtcgtacaccgacctagcgctcctccttccccgccggcgcccagtcccctctcagccagctcctcacaggcaggaggtagccgctggcgccaccacctcagaagacctacacgaaacgcttccccattggcttctgcctccccacgtgatcccggcgccctacgcgcacgtggaaaactgttgttgctgctagggctgtgcgccacttccggcttcaacccccgaaaaggcggtgcttaaaccggaggaggcggaagtgagtcgacagacgaggcggctttcccggcagaatgctagcgcaggcgcaggggctcgagaggcctggacctgtggcgcatcctcagtgaggagggccgccctgcatccgtcgccggccccggtctccaggggcctcacccgagtcatgccccgctattgcgcagcgatttgttgtaagaaccgccggggacgaaacaataaagaccggaagctgagtttttatccgtaagttgtttctggagcagaagcgtcagcctcgccgtgaggccttggacctgtggcctttgggcttgggtgtctcctgtccgctctgccagtgagtcctcagctctccgtacgtggcccgtcgcccgcggcaagacggagggaaggcgctagttcagtttagctagcaatgcccttcttgcgcgaggactgctggctggtggcgaggcccaggagcctgtttgggtgttaacagttaaaacagtaaagtttgcgcgggcttctgtggttttcagtcttttccccacttcacgtgatctcatttcattgaacaacattaaccaccatttaagatacgtgaaacctgcgaagtggaaaggtgcacgcaaagttaatttacaccccccgcgaggtaggtcgcataggtataatttcatcccacttttctcctgaggaaactgaggcccggaatgattaggtaaccgaccttgaaagtttagtgtcagagccagaattataaactagtcttctgcttagggctgtagatactctgcggagaacaaggttttattctgttactctgaattactagagccacgatatatttccatcaaactactgaagcactgatttttattcagaagtacagacaagcagtgtcgtataataattaggggtccaggcttcaatgctagatcctggttccactattctgtagcttaatgacctcttggaaagtatttaagctttggtgtctcacatatctcatctgtaacatggagatgttaatagtactcacatgattaataacacatgaaaagcaacatatttaaaatactgcatttccattttttcttgtatttaaaaacaattcatttagatctaacctggttcagattttcagcagttgttttgtgctcattttactttagacctgaaggacttattcattaatgattcggctgctttccagtattttaattaatggaaaaaaaattgataaccccaccaggcgcggtggctcacgcctgtaatcccagcactttgggaggctgaggcgggcagatcacctgaggtcggcagtctgagaccagcctgaccaacatggagaaaccccgtctgtactaaaaatacaaaattagctgcgcgtggcggcgcatgcctgtgatctcagctgctcgggaggctgaggcaggtgaatcgcttgaacctgggaggtggaggttgaggtgagccgagatcacaccattgcaccacagcctgagcaacaagagcgaaactccgtctcaaaagaaaaaaaaactgataaccccaagtaattcacaatccatggcaatatttccaggattgtctcccttgaagcccagcctcaagatgcaaagagatgtttgggggaggaaaacaatctaatccactttcagtttatagggaaatactactgtactaatggctctatctctgagaatgtttgtagcaaaagatcatgttgaacttgatttaaccccgtatttcccagatttatttggcctttgatattggagatggggtataaccccacactgaaatttttaactaaactttgtggaccttacagtaactttttaggaaggaaaaaataatgcaagtgaattgtaaagatttttttcactgaaaatgtgaatttagtaaaagttgtattatttctagggtttttaaaaaattttcttgtgtaatccacaaaataaaaattgaattagttttattctccagtagcgtcaaacttgaat

SEQ ID NO: 586377 - DNA, 4001 bp, Homo sapiens
ctgggattacaggcgtgagccaccgcgcccggcctagacaaataattttaataaagtaataaatagtgataaattgtcacgaagagctagcctcaccaaaaataaaaaatctaaaaacaactcaaactatctttttattttttgagacggagttttgctcttgttgtccaggctgtagtgcaatagcgcaatctcggctcactgcaacctccgcctcccgggttcaaacgattcttctgcctcagcctcccaagttgctgggattataggcgcccgccaccacgcccagctacttttttgtatttttagtagagacagggtttcaccctgttagccaggctggtctcgaactgctgacctcaggtgatccacctgcctcggcctcccaaagtgctgggattatagacgtgagccaccgcacccagacaactcaaactgtcttaattattaaaatcttgaatatagctcttaaaaattttaagaattcactaacaagaatttgtcctgaaagcaattttccaagcagcaaatgggaatttactaatgcagctaagctgtagtggaacaagctctcaatctgaaaccagacactctgggttttagactaggtctgacagtggctatgtgacctgaaatgaatcaggatgtcttcacctgtaaaatgggaacaatacctatttatctcattcagttcctaggaagcttgaatgagaccacagaaactctctgaaattacaaacttgtagtaaaggtatcatctattcctgggaagtgggggtaaatcactgtacatgtgtatactagcaattcaaaaaaggaaaatccctgaacaacttattttaagatttcctccaccttacacaggagaggattaaaacactgtcaaaaaggtactacctgtgtagtatgggtgtgtggcttttaagaacactgccttttaagccttttgctctagttgtaagaggcacacggagacacataaatgcaacacgtgccatgggttatgttcaaaatcacattcaacaagcgcctatgtgactggctatgggaattactgtagatcactggacctgaagactcttaagtttacaatactcatgactgtcctgggccataaaactaaaacctacagcagcaggacaagtttcacttgtaataactgcctttcaaagtctacgcggatcttttcagcagcacagtctttgaacaccgagtatgaggagcggtgtctgagttgtgacatttaaaaaacaaggccggagcaaacgtagagagggagaaagttgtttaagagagcgccagtagcaaagctttgtacgaccccaggcacgtggggtgctcgctgcgcgtagtctttccaccgtaggcaaggagatgcttatgagaacctttctggggtgctggggggttccgtcccgaaatgctcagcccaatccatgagtcagcagcggcgagaggaggaagcaacggtaggagcaaaaggaaggcacccctcaccctccttccttctaatctagggtaggattactttaaaacacggagcaaaaaggcactcgtcacggccccatacggccccggggctagtcgccagggtcaagggtagagagagcccagggttgccgaggcggaggactgaggcaggggcagctgaggtgagaaggaaccgaggttgggtgggcacttaccagaggtcagagcgtgggtgatggcggtgccccggccgtccgcggcgcttggcagaagcagcatgatggcgccgggtctagcccggtgggcgcagcggctcacgtcccgggcggagggcgcttagggtcccctccagctctacctctcactccgagcctcgcgccttggctctaagacgcccaggaaccggcgcatggagacgaccagtaagcacttccgggatggatctttcgtggtgtggaggccagtctcacaccctcccacccccgccaacgtgtgcggtaacctagttctatactgactgagatccggctggagaccaagtcgcacgagagaatggttcctaggcgcatcagttttcctgtaaaaaggattatattccacgtcccagtgcaatacatagaacataacctttaaaagcagttctttttatattatctttaagttcttactgctttatgtattaatctgaacctaatcagtgattttcccaggagcgctatacttttaagtaaaaaatgaaaatacctgtatgaaccagtatcgacgactagtatatacatttgcggagaattacgtacgtgtatttgtgatacatttgtgtttaacttgatgatgataatagcagctaatatttgtcgtgctattactaatttacctgcattatatcttttaatactcgcttggagaagaaacctctctctagtgtgttagattgtattccaaggccagcaatatttttaccttgttctaatgaagtttttattcaagatattcccaattataggactctgggacttaattttttaatgtataataaaatcaattgtattcctactatatgcttccttctaagactgcagtcaaaagcaaaaactagcaaaaacaaacagtgggtaaaggctcacccccaacagcagtatctgaaacaggttcaataaaataaacttgatatgccactctttagcaaggaccaccagaaattagtaaattagaaaataacttactaatttcattatattttcacaattaaagtttttaaatatattatatatatatatatgtatatttttttttgtagagacagggtctcactatgttgcccaaggtggtcttgaactcctggcctcaagggatcctcctgcctcagtctcccaaaactctgggattagaggcgtgagtcactgtgccaggccaattaaatacatttaattggtctgtatatctgctgcatgataaaattgtcacttcaaaactgacttttcaaaaattgaactaagggaggctgaggtgggaagatcgttgaggccgggaggtggaggttgcagtgagctgagatcacaccattgcgctccagcctgggtaacagtgagaccccgtctttaaaaaaaaaaaaattgaactaatcttctgccccaaaacctcttcctgatccctactaatgcaaccactgttaaaacatgctccaaggtgcaaagtaacctgactccactttcttcatattaatatatttttttcctcacacctcctcccattcaattttaccattaactctaacatgggtttttgtttttttgttgttttcttttctgagacagaggcttgctctgtcgcccaggctggagtgcagtggcctgatttcggctcactgcaatctctgcctcccaggttcaagcgattctcctgcctcagcctcccgagtagctgggattacaggtgcgtgccaccacgcccagctaatttctgtatttgtagtagagacggggtttagccatgttggccaggctggtctccaactcctgacctcatgatctgcctgcttcagcctcccaaagtgctggaattacaggggtgagccacggtgcccggtcgggggttttgttttttaaaaaaattgtgctaaaacacacataacatgaaatttacgatcttcaccgtttttaagtttacagtaatgttaagtacattcacattattgtgtaaccaccctacaaaactatttttatcttacaaaactgaaactctatacccatttaatctcttacaaaactgaaactatgccagtggaaaaaactgtccactggaaaccatccttctactttgtctttaggaatttgacacctctaggtacttcatatttgtggaatcatatagtatttgtcttttttgtgactgacttattcacttagcataatgtcttcaaggttcatctgtgttgtagcttatactagaatttcattcctttttaaggctgaataatgtgtgtgtgtgtgtgtgtgtgtgtgtgtgtgtgtgagcgcgcatgcgtgtatcac

SEQ ID NO: 586378 - DNA, 4001 bp, Homo sapiens
aaggaagggcctgtgataagcactgcaagttaaacagaaacaggggacttaagtgcagagtttgtcactctatttctgggaggggatgggctgcacagtgtgcaatggggctggctggtaaagggaggaccaggtgacagccagccacactgtctcaaggatgaacctggccctgctagcattatgctgtaatccctgtggattagaactatggataatagggccgggagcagtggctcatgcctgcaatcccagcactttgggaggctggacgggcagacagcctgaggtcggcagttcgagacctcagtctggccagcatggtgaaaccccgtatctactaaaaatacaaaacactagccaggtgtggtgggagcctgtaatcccagttacacaggaggctgaggcaggagaatcgcttgaacccgggaggtggaggttgcagtgagctaagatcgcaccactgcactccagcctgggcaacagagcgcaagactccatctcaaaaacaaaacaaaacaaaaaaccccccaaaaactatggataataaagcatgacagacctcaagatgccaaatgattttctcctctgctgtcatgcctacagagtaacttctccaaggtcacacattaaatatgggcacaggaacactcattccttatgctcaatgactttttctcactcctacatgctatcaacataaggaggagtgccccagggggctgaccttagcgggaggaacgacaggctctccaccgatcccattcttaccctggaccaggtctcacctgcggcttggggaagtcacagaaagacaagtttcgtacaaccccagaccttttcttttggtagtcaacaattggtcacattgcacatttcaaggttacagaggcccaccatacacatgcggggcaggaggagataaatcttgcttggggctaaacaataaagctacagcgagtgttccagaagttgaccacatctggaagcaagaagacagactctggaagaagcaccctagagactccaggaacccccttcactcctgggctttcgggactctacagcgtggggcctctttctcagacatcgaaaggcctccttttctggaccacagtggagcgatgtgcaggtcatcggctaagctgggcgggtcggggagggcagggggagtacagttccttcggatcccagcaaaggtagactatcaatggccaagggttcagaggcaggaaaaaaggccgtttctggggggttggctggggacactccccttcccttctctctccgattaaatataaaagccgatgatgatgaagattgaaaagatgaggaaaatggcagccgtgtctcgggtatcctcccagcggaggcctttcatggaccgatactcctgccgtttgcgaagggcctcccgccgggccctcaggcgccgttcccgctccagttgttccccgtagtgggcctggtagaaggcgtcaaagttgaacatcgtgcggttggcgccgggggaggcccgagaaccgtcgtgggtccgagaggtgggcggcggggtacgcggcgagccggggtcgggtgcgggcgtcctggagggccggacgccaggtccgcgcaggtcctcgtcgctgagtaggccgcgatcatacttgcgacggagggtggcactgcccagcaccacgtaggcctgggagatgcgcgtgaagcgctcggcggcctccgcgctcccggagttgcggtccgggtggtagagaaagcactgacggtagtaagccgccttgatttgggcctgcgtggctgtggaggggacgccgagcagatcatacagcgccgtgcgcgaatacgagcagtcgccctgggaataagtcctcgctcctaggcccaggctgggtgcagaattttgtggaaagccacgggcctgcagcaacctccaaggtaacagccgctgccaccatcgccagcgcatggctgccatgttgaattgattcggcaggcggtgcaagagaaaccggccaatgagaggagtcggttggtcgccctgtggccagtcacgtaaaggggggggcggggcggtcgtgggggtggaacatgcgtattactaagcggtcgccgggctgatgacataaaaaccgggtgccggcaggcgccagtcgcaggtgtgctgctgaggcgtgagaatggcgtcccgcggccggcgtccggagcatggcggacccccagagctggtaagtcccggggcccgcggacacccctctccccacttctgcggccaccgcgtctgaattattcctctacatgccattttctctttttcgcagttttatgacgagacagaagcccggaaatacgttcgcaagtgaggggagcctgaatactgcggggcgtccgggggtcgggaagcggcaagttgcccctgttgctggcgttgcccggaaaggccgtagaatttgggggtgcgggaagggaaggacccgggtgggtgccgatttctgtctctggtaaatcaactttaagttgccgacctctctgggcctcggtacctcagcgttgaggtaggggtgatcgcgcttgctttccgtgggtggttttcaaagtcgaatgtgacaatttgtcctaaacatgtggtaaaagaggcgctgggcggtgggtacgggcgaggggtcagtcctggtggggggaaggaagtaatggccgtaggatgcttatcgtggcgccttgttgccaataaatctccaagacagcagttggtgtattattgtctgaatttcatagagggtagtttgtataactactgagttgtagccaggtgggagtggctcacgcgtgtaatctcagcaatcgcagcactttgggaggctgaggcgggaggatcgcttgagctcaggggttcgagaccagcctgggcaacgtagcgagcccccgtctccgcaagtaataaaaaaattagccgggtgtggtggctcccctctgcctctccagtagttgggaccacaggcgcgcgccactacgcctggcttttttttgtaaatttttgttgcgatggggtctcgctgtgttgcccaaggtggcccaagcccagggctcaagcgatcctcccgccttcgtctcccgaactgttgggattgcaggcgtgagccagcgcacctcgagtcgttaaaaaaaaaaaaaagggggggggatgggggcggggggaagctggcgcggtgtctcacgcctgtaatcgcaacactttgggaggctgaggcagacggatcacctgaggtcaggagttcgagaccagcctggccaacatggcgaaactccagctctactaaaaatggaaaaaattagccgggcgcgatggcgggtttctgtaaccccagctactcgggaggctgaggcaggagaatagcttgaacccgggagggggaggttgcagtgagccgacatcacggcactgcactccagcctgggcgacagagcaagactttgtttcaaaaaaaaaaaaaaaaaaaaaaaaaaaaaaaaaaaagatactttgtggtttttccgtgctctctcactgagagactagccctatttcagtaaatggttactggccgggcgctatggctcataccagtaatcccagccctgtgggaggcggaggtggacggatcacctgaggtcaggaattccgagaccaacctggccagcatggtgaaatcccgtctctactgaaaatacagatattagccgggcctacgggaggctgaggcaggagaatcacttgaacctgagaggcagaggttgcagtgagctgcgatcgcaccactgcactccagccttggcgacagagtgagaccctgactcaataaataaataaatagctattggatactgtttcttttttttagggacagggtctctctattgcccaggctggagtgccatggcatgatccctgccgactgcagcctcaagccatcctccccagcagccggaactagaggcactcgccaccacaccggctgaaatagcttgat

SEQ ID NO: 586379 - DNA, 4001 bp, Homo sapiens
gatgccctcgggtccctcaccagtccagcaaagggactatctttttccctagcaagggttaatctacctcccaaaaaagagaagagtgaggagaacgaaaataacaactactaacatctactccttgccagtaaagaggctggcaaagactcctctgacactttgaaggagggaaagctggaaacctttcccaaaggtgggttcaggtcaaactattgtcttggtaattagtcacaatccagaatggaagctaacgtgaaatgtgggaatgattttgttgaatcctacagtcctttcaatggaccccaaagtcctatccccaggcaaagttgggaaaaaaaaaaacaaaaatcccctcggactacgactccctgggaaggctttccagatgttttaaattgcaggaaaatgaatttagaacataagcagatatctacacatcacctaaatcactagacctgtcctcaattttaaaacacacacacacacacacacacacacaaagtacaccagtcggcagaacagggcattataggaaataaagagtgttagtaaaatccataatgctttctgttagaccttctgggaggttataattgcatttggccggctgcagccttgtcggagagcctggcttcttaatagtctcaaccctaaaaggagtaactgtcaaggggcgacccagctgaaatcaaacaacaaaaacgggaactgtaacccgcctgaaatgggaggaggaaaaggaagggagactcctgtattcatcagtcaacattaatgtcctttgttgttcacctttacacagaacagcgagagctatcctgttcctttttctccgaacgccagtgtcagggtatgctttcctaaaagctatctccctgcccccaagaaccaggctttccgatccccctccccatttatcactcagcagccctgtaccgccacaccgcccccactgcgctcacccggggtcgagagggtggccagaagtaaaaacactgctgaaatacccgttcttctccaaagaccaaagaaccgagcggcgcagatgttgaaatttaccaatgcccccgccccgcaacatacacaccccataaatccgggatcgcagagagggaggagggtcagagagggctcagcttgtcagagcggctctctccaggaccctgccacattccacactccgggaatgtcgatccgagccagagggaagggtttgcgcctccctactgttttgggggtgttctctctgcccgagtgttgttgtctccctctccacccagaggaaccgttgcagctccctgtcgctttggggaagaagggtaaggaaggagagaaaccccattcgcctcctcttccaacttgacacacacacacacacacacacacacgcccagtcgccactccaaactccgcaggcagagcccgaagctagcgggccggccgcgcgctcccccaagctgtcccggcgcttcgggaaccagtgcggggcgcgccgagcaggcggtgcggggcgagagcctggtgcgcagccctctgcctggagctggctcggcaaagccccgtaccagctgcgcgatgccaggattaggcattttcaaccgggcggagcgagaggggcgcgggggcaaggacgagaaatgcgcactcgctcgggccagagcagaataaaagttcgccccgcggagactcacccacgccgtatttctcgtgctccgtaggtatccacatggctaaaggggctccggggtcttcaggctttgtaatccccgcgccccttctccggctcacaacaatgcacagtccccgagcagcgctgcagtgccggagcccagcggcttcgcgcgggctgcgggcgctgggcaggatctgcgctggaggctcccgagcccagcgttgacactgcgccgcccgcagctctcccggcggcggctgctcacagtcctccgacgcgctcccgggtacccggcggcgcagtcattgttctgattcactgaactaagcgaacacgccggggcactctccggcgcacccccgcccgccagcgcctagtccagccctcccgtcccagggccccgcagcacgctgggaattgtagttcttggcctccccatcccggaagtgggcgcggcaaatgtggttcggggcggggattcagttttactgattgcgtcctattggtccagagcgcggcgtaggtgtggagaaaacattacgtcgacggggagttcgcctccagtagcgtttctactggtgccaccccgcctccgacccgccctgcggccctcccttttcttttctgccgggtaatggctgcttccaagacccagggggctgtcgcccgaatgcaggaagaccgtgatgggagctgcagcacagtcgggggtgtaggttatgggggtgagtacggtgccccggaggcgcggctgatgtgtcttcctttctctatgaccgggtgtgcaacggacctctggtctgaccctaggagcccttcagctctggggccacctgggttcgactgggccccacgggtggtggcccagcgggatgggttggagccggtggcggctacttggttggggctgcccggggatggcggagaaaatgccatgggatggcggagaaaatgccatggaatggccttcccctccgccggggaagctccctgagcgtttgtcttctggtttggagctcccagctttgagctagctgctgagtgggtttggttcagatctggttcgcgcgcgtgtgtttataattttgggattagcagctctttctcctcaccagtacactgccttggtttgcttggtttgacctcgcaggtgtgttttatttagcttccggagtatttccagtcgcagactggtggtcactgctctccactctacagatttgcccagtttgtggctgaggtgacctctgaagggaaagtgtgtgtatctcacaacctccctgtagatggttaactgctctgggtgttcttcagatttgtatgtggagcctgagagatcttcccagtctctgggtccttagagaaagaaaaggaaagtgatagataatttgcactcgtggcttcaaagaacatttgaaaagagttttgaaaaccatcacaactttggctgtacctgactttcaggttgtcctctgatccactgtaggaataaaaaaccaaattttgaaagctgcaggtggattgtgtttaggactcttttacctttagtctatccctcccccattccccccaccccatttttgtcttgatgtgtaatttagcacaagttgtctttttctgatgaacatggtttggggcttaaatatagttctcagactgttgcgactttgtttttcgatttatttgtttttgctttcacagttaaattgatatcatcttaagtatttacctcagcggcacagagttgaagtgcagttttttcccacttcccaacagtggaactccctactctgaaattattttagtacctctaccaaacaaatctttggtagtctcctgagttaaatattgaatttaacaccctaatggtttatttttgggttggttatatattgggctatctgatggtaacagactattacggtttcctagattttcaaagttccagagggctaccagtttaagatctaaactggtgaatttatctcacagtctaacttattttaaaaaatggccgggcacggtggctcacccctgtaataccagcactttgggaggccgaggcgagtggatcacaaggtcaggagttcgagaccagcctggccaatatggtgaaaccccgtctctactaaaaatacaaaaattagccgggcgtggtggcggatgcctgtagtcccagctactcgggaggccgaggcaggagaatcccttgagcccgggaggcggaggttgtggtgagccatgatccaccactgcactccagcctgggaggcagagcaagactctgtatcaaaaacaaaacaaaaaaaaaggatatgcctttcaa

SEQ ID NO: 586380 - DNA, 4001 bp, Homo sapiens
ttgaacccagagactcacacctccgtccagagtcaagttctgaacccacggcgcttctctctgccaggcaacaggtgtctgccgtgggtgtggttaagccagctgggtatttgttcaattaatgtagaatttttcacttattgcctgttttgcttaaagcgagatctcaaaatgcaccactgcctgggttcccgcaaaggtgcctctgcacccccatcacttggacccaacccacttctgtaaacaactctggaccttgcccctgaaagaatttcttcaattcttacggaaccctcaaaagtagcatctgcaaatctgcagaaccttcaaaagtagcaaggcaatccccatctccttgtctgtcgccaaaaaaaaaaaaaaaaaaaaaaaaagtgccagccagcaacttaaaataagggaccgtcagaggattcttctcagaccatgacctaatgggttaaaataaacacacgaaggcacacaaacaatttcaacagaacaagatggcaactctctcgtcctcgccagagactccagcgccctgacccctcggccccgtgccccggactaacgtgagcccgagagcaggcgcgcccaggccgcgcgggtcagcggggagcggcgaggcgggtgggctcgctggggaggcggatcgccgggtcctccacttagaaagttatccgtgcagaactgtcccctggccagctgcccggagccttccgcggaccagccgcgtttccaggcacgcggccctcctgggggacgaagtgcccctgacctcctccggcacagtcaagcttttgggggagtcagcgtccccaatccagggagcagggtcccgcccggcggcggcgtctggaacggagcggagcgactggcgcctgccccgagagcaccgaaggctccgcagacccaacaggtctcgagttccggggactcggagcaccgaggccggcgcgggcgccagggcccagtggcccttccctggccgaagtgaccacctctccccgcgtttccccagaagagccctgggggtctgcttggggctcggaccgacccgcggtcagcgagggctccccgcagccccttcctcccatcccgcgcccaaaacacaaagccacatgcccgaaggagaggggccgcggagccgcaaagttgcaatttgcaaagaaatgcctgctcctccgcatccccctgccgctgggtgggctcgggtgggaagtgggagaagcgccgccgcgcgcgggcatggggtcgctgtccttccagggaggttcgggactgagaaggacagacctcccccagcatcgctcctcacggtgggtccccccgacccagcgcgcgccctgtccgtggcactcaccatcacgttcccctgcatcttagcggtcttgatcatggccttttccttcattttgccccaagtccgaacccgacttctggtccagggaagagaaacttaatccattgtcctggtgaggattaaagtagactggactggctgaagactggatggaaacgggtttttgaaggaaaaaaaaatcttccaggtcttcagttttctcacctccgcgcacccctgcccgtgtctttactcagcggatcccaatagcaatcaactctttttggccgctaccaataaagaaagaaagaaaaaaagcctggatggagggtgggtgttgctttaaacaaaaagccaggagccagggagggaggaagaggctgcgagcccagctagcgagggcgagaggcagctctgactgcgcgcgtgtccaccgagctcggcgccagcacactgcgagcaacagcgcggcggcacgcacagggggcgcactcggggacgccggcggctcggccccggctccgggggctcctccagcaggcggtgcggggtgcagcggtcgccgctctggtccctaagggcagggacccggccgggcggcgacgccaggggaggcgtgtgtgtgtgcgcgcgcgcgcgccaggttttctgtctgaactgagctggactgggaagcctcgagctgcatcaaggttaagcgagcgcaaactgtttgggtaacgagggcagcccctccccagacacccctcctcgggtagacgcccactccgcgctggactgggtgcgcgcgcggcgcacgcacgctcggcttccacaaacaagcactacggtgattgccgcggatggagccgccgtccgcagccgggtgttaactattgatcggctgcgcccgcgagagaagggagaggccgggaagagccagacgcggctgtgcccgtcgcccgcaagtctggcgagggagcggaggggaagcgggggaaggctagggatggcagcttataaataatgttgtaacaggttactatgggacacacgtcgcgtctccatggttgcactctgggttggcctctgcatccgccgccgcggcaattccagggcgcagaggaccttgcagtgaatggcagcgcccggctaccagcgcgggtggcaggggccgctctccccgccgcacacctggcttcccggcctccacttccctccgggcctccgccccagccgcgtccctcggcggctttgtttctttggctcgctcttggctgcctgcgggatctgaccccgaagacctcccgcagcccagtctggcgcccacggctctccctaccctggaaccccagcactggccggggccaaatcccagcgcccatttctctaacctccaccccaagaggcgggttgaccagtgaccgcgacctgggttcccgtctccacctgctgcccctgggcgctgttcccatcaatcatccattcacaaacgcggttggctccctggaccacacacagatgcgcgctcccaggagcgcgcgcagaggttggtcaaattcatatgcagacccacccaagccacttgaaaaaccagattcagagctgatagacacatcaggctgtgtgtgtgtgtgtgtgtgtgtgtgtgtgtgtgtgtgtgtaagggcgtgccagcgcctgaggggaagggcatggcgggagctggagtctgggaggggtttgggaagcttttccattatttacattcacaaaaaaatctccgtttgtaaaaaagaataagaggtcactttcgagctcatgaagaagtagatgattctaagtaattgcaactgtaattacatgtaagttatccacaatgcccacatgcaaacacgaatgatacattatgtattaatatatgtatattcaaaaacattaggacatgtgcacgagcaattggttacaagtgtaaactaatgatttgggcttgagagaggtaagtggaagaaataggtaaaccaaagcaaaatgcttgaaaagtcacttttaaagtaatgtggatcaggctttgctagaaagtggtaggtgcactttaggttctagaagcactcttctctgttgggatttgtcttactgtcttctggctgtgataacaaaatagtgtaaaatgcgtgggttataaacaacaggaatttatttctcacagttctggaggctggaagtccaagaccaaggtgcaagcagatgctttgtgtggtgagaatctgatttctggttcacagatggcgccttctcagtgtgcatcacatggtgtgaggaaaggcacctctctggggtcccttttatcagggtgatggctcctccctcatcacctcatcacctcccaaagtcctcagcccctaacaccatcaccctggggttaggtttcacatatgaattctggaaaagggagagacaaaaattcagacaacagcaggctgctcaatcacaccttttctcaagaagggaacacttagagtacaggtcacttacactgttgaatgtcaggataaacccagttgagtgtggacagaatatatcaccaatctaaatccgattgtaagcagggttaatatggttcttttgcttcttcctttgaagcggcattcgttcatctagaattttcctccctctctttcccaccaagcatgggcctcca

SEQ ID NO: 586381 - DNA, 4001 bp, Homo sapiens
ctctcctggcatgctcaggtatcaggcaaaataagagcaaatttgtacaggaaacaagggatttcttttacataacacagattgggcttctgactcccaatccttgggtgtatcgggtgtagacctatgaacagcaatgcactctttcgtaattattacttctctcccatggtcagggatgctacctgagtcctagttcaagcctgaaagcccatcgcacacttacttcataactaatgagggaggagaactgtaataaaaagaaacccagttaattacagaatgctaatttagtgtggaaatatttctttattgagcaaatattctgtggaatttttgaaaggaggagggtttggtttgtctgttttgaacctgtcaagctatactgagcatcaatccttatgcacactgtcacactgaatataaaaatttttaatgtccgtatttacagaatcttcttcccagatgacataaaacttcatttaagttctttagatgatgataatgatggtactaataaaatggcccccttttatcgataaatgggctttgggaaatgaccccactaaatacaaatccaaactcatcttcgtgtaagtctctgaagagttggcatggaattctgtcacacagtgtcctcaaggaggctcttcagcttcctgaactctaaagaggtcgcctatctttgccctaatcctagcaaatgagatccaacagcaaccctaaaataaataggagaagtcagcttaagctgttgatttaccacgcttgagcaaactgctttgtgaatctattggtgtctcccaggatctattttaatgatctgcctgaggtgaactgagcaatgattaaaagacaagaaccctcaagatcttccaaggagggaattacgatgtctacacgcgtggtgaagcggctggctgactcacctttcctccctcaccccttgggcctctgcagaccgtggtcttctcaggacaaggcgagcggccgccctgtgccatgtgggacccacgcagccttccccgtccgcggtcagccctttaaacctgcaccttctcggccgagtcctcctttatcccgaccgtctatccttcggcttctctagcagggacagtttgctcttgagggaaacaggaggaaagggccacgaggtatccaaagaaaagtcctttcagtaagctcattttctttgacttgtcttagaaccaaagcaaagtcctgttggagggtcagaatacgctgatgtttctggctacaaccctcttcccccaagttacaaagtactagctgggaaccttcccagggaactcgttagatctggcggctctgtagagagaggcctttgtccagaggtgtttcacatcaagtttaccttgacagaggttccctgtgcctgtaccttaatcatcaagccagggcgccctttagagagagaagccagggagaggagagccgcagactccagcagcacccagcactctacgtctcctcccagcttggtggctcagggggctacagtcataaaccaatacaaaatacaaaattcttccccaaatacatatcctccctctctgtctctgtctctctcatgcacacacatatgcacgcatgcacacgcacgcacacacacacacacggacccccaaaagcagcattacctgttcctgctgctgcacggatttccccgaagcgcttggctccttggctgtggtcatggtctgtccaggcgcttcccaccaccggggcaggtggggtctgacggcgagttgggagccaccagagtccaagcggtaaggtaaggaggagtgtgattttagtccatacttccgaaatcacaaggctattttggggaggatgggggagggagggtgggtagacaagacgagtttgctctttaaatgcaagcagcagagagaggatccgaagcaggaagctgccgctgcttagtggggcttctccaattagcaacagcctctgcaatcgccacagaaacaatgataactgcttagcaaccggcaagtggcggctgggtgcaggaaggggacccgagtgatgcgcgctgcctcctcgcccgcctcccggcccggcgcccacggcgcatgctccggccgcccgctcagccgggctggggctggggctggggctggggctggggctggggctggggctggggctggggctggggctggggagggggccgcggaggcagcgactgccgcggagacgccgcgcccgcagccacagcctcggtcaccgcatccatcagggccccgcgccgcgcccgggtgtctgaacctgcggcccccacgcagggcgcgccagacagcgcgtacctggacagggggcagaggtggccccaggagggatgccctttgttttttcttggtgcaaagtgtctgatgcgtgtttgagaaggaagggggtctgggagcaccggaggcaggcagcttttctgtttgcccagtggatttggcaggaacactggttgttgaaatcttgggctttgttttcctcaaaattcagaaaacttatgttccatcgttagaatcaaagaatctacatttctctaagaaaatcaaccaggacctcaagggtgtttgtccattaaaagaaagacagggagagagagagaggaaaaaaaaaacattccagcctgtgtgatgaccttacagaaacatgagggctccccactgtgtcctgagctcaaggagaaagagacaaagcaggacaggagacggactgtccagcactccctgcctgaggccagaggctgctgtcgtgtcctgacccaggtaccactgcccctgcctggctccctgcaccggagcagtcagttagtgggtagagcggaaatgcaggtggcaaactctaaggaaagtgcaatcagccagtcatttgcaggtgggagtatctcctggccctccagaagcagctcagaactcagtgcccagaggcctggcactctttctctgcactccaggccagcatgtggccaagctctctgttgatgcatttcccactcctggtctggaacctctactttcacccattggcacttggtcacaggcattcactggcctgagagttcagccatttatatatacggggaactctcaataataaagtccttcaggccagggcctgaatcagtcactctagtctttgcatctctgtgatgcccagtatagttccttacagaaaagaggccaactagacatgcttccatttaaaaggtgttgaagatttccccttgttcagcccctttccaatgcccagcactgcttcccaccccatcattttacaaaaacaaaccagccagcaaaatgcaaggcactgtgggcttctttggaattgatggctgaatccaggtcacggcagagtggctggtcacctctaccatggcctgaacttaattctggtctgagtacgtatttggcagactctaagaagtctgggtagatggctggtagcttgcatggttcggccaggggtaaagaaatgaaaaccccgtgtgaaacccttgctgtgtggtatgggtgtgtgcttggccttggttgcactggcttagactcctgcatgggacagggaggtccaggggtgggtatagcagtggtatcagttctcagcttgtctttgtgaccctgcctcctgggatgctaggaacctaagttcttatcagtgttggtaggagggactgggccgggccaagcaagagtcggccttagagggtcttcctacggtcacaggttcctcagtgcaaggtccctccttggtcacgtctctggccctgggagccactgcggtgtaaggtcaccaagcaaacctgtcatggaggccccagcagctgagtaaacaggctcagaaagaagggctgggtagccaggtgggcagtcactctcccctcacacacctgaaatgcagttgacccctggaggacctcagtcacagggaaaatcacagcccctgccttaaagtagaccagcgcagtttcagcctca

SEQ ID NO: 586382 - DNA, 4001 bp, Homo sapiens
taaaacaaaaactaccaataacaacagcaaaacctcactgatttcatagtatctggcaattaggaattgtccctgggaaatcactcaatgtctcacccctccctcgacccaaacacaactcttgcactaaagaaatacgaaacagggaaccagcgtggctggaggctgcagagaggtaatgaccaaaaccacctactcagtgcccggcaatgtactgccctgggtatgtcagggtagactaagtgagaggccggtgggacccctgcggttcccaggttgagcagttgtgaaactcctcaaaggcatacatagtaatttctacaaaccaacacagcctagctgttataagagctgtaccagccaagccagacctgtttctctgagagcctgtcggggatttttctcttttccctgggaaaagaaggcctcaaagaaaaagcacagtttcctcccttctaagtcctagcagccctctgcatccttgaaagggatccacaggaggtggttaaacgcatccatctaaggtccggctcctgtcctgcatgagtcattggttactagggcgatgtgcaaatccaacctttgaaacccaggcttccagcccccatgaagagtaggaaatgtgctctcggagaagttttcactgaacacggtctaaggcagaggtgctagtccagggctgggaggggagacagacacggcctgagggctctcagcaaaagagctgggccctgggacagagggttggggctcagatgccagtattttggtattttttttttccggaaaggataatcaccatcaccaccgctggggggaaaaagtgtctaggagaagtaagaagaggaacgaaggagaggcatttgagtcaagggacagagtgagtaggagaggaggggcacgatggagagattccagacacaggtgggagggagagaaggtgcctgaggctgtgttcccggagcacgaaataaataaaaaataaaccaactcgtaagcacaggccgatcgaattctctccttaggaaccatagcagcatgctgttaaaaacagacatccgcgcacccagggaacgtaaggcgaattccagatcccagcaggcgcagtacccaaaccccgctctctccagccaccaactcccggccgccgcggctgcagacacagacccgctccctccgggacgcggtgaccgcgatctggcgccacggagcctgtctgggggcgcccggagagtcgtgggcggggggagggcgcctgattccccccccaaaaaaaatttcccctgccgacgcgtctcgctgcgcgctcagcccggagaacccgccgccgccccccgcccccgagaagctcttacgtcctcctcgtcaccatcgctccgcgcctggtactggaaccggggccggccacccgcgccgccgccgccgccgccgcgctcccggggcgccgccgcctgcgcccgcgggccgaggggcttggctcctgcgccgccgtcctcctcgggcccctggccgcccaggaggtgactcgcctccgggggcgcggggaaggacctcgaggtgttgatcttgccagtgaacctctggtacagcgaagccatcgggcaccgcgctcctgctggctgtctttggggctttttaatattttgctttctctccggttcccactccccaccccgctccagattaaaaaaaaaaaaaggcggtggggaggcagcagcagcagcagcagcaaggcaagcccagcgccggcggccgctcctcccgcgcgccactcgcgagtctccgctggcgactctgcctggctcagcctcctccgccccctccccggcggctcgcgaagccggggctctggctgtgctttctctctttcctgtttttataatttttttccccaactccttgccacagccacgtacggcctaatcaaagagattgaaggaagaaaaaaaaccaaaaacataaagcgagggaaatgcctaggccccagaatttggcaccacctagagaccggcacacattccgagcgctctcctcgctccccgcccccaggcccctcgcgcagctcctcctccaccccggcccctccgcccccttccccaccggcctcctccccgcgcccgggactggcacctgggtggcaggggttggcagcccggagagggcacggggtcgcacaaaagggtgcgagggtgcgtgaagagggtggaggggctgggaccacgcgggtcgtgggtgcgggggcggtgggggagtcccgggagctcagggtgctgcggccccaccgaaggtagtgctgcgagtgccccgcagcacgcgagcggacggtgcaaggggatgcggaggtcgaggcaggcaggccggccagggggcgactgaaggtgcagccggccccggggcgccccagccacgcacgcgctgcggcgccgggctccccgcgcccccagctcctcttgcctaacttgaagcaacaccagagacaccccgaggacctggggtgcgaatggggcgtgggagagccaccaggagggcgcggggtggtcggacgacgctggtgaagaggccgccctccctccacagcccagctccctccgaaaccgccccttcccttcgcctctctccggaggagggcaggaaaggtcgcggggcggcagaggacgcccagaggcccaggcgcccctcgcgggcgatgcgccccgcagagagcccggctgtgaccgcgactccattctcattatcatgaacgcaggcggaggctcggctctccggctgcccgcaacttttccaaagcctgcgcctcactgtgcccgccgagagcgagggagggcgacatggctccactcgccgcgcgctctcgggcttgcctcctgcccagccgcaggaaggcgcgctccagcgcccctgtgtggacacccgcaccagcgggctccgctcctccgctccaggcccggcctggcttctcttcccctcccggccctcccgcgtcctccccggctcccttctgcactcctctccgtccttctggagttgctgggcacgcgtctctctcgtctcgtccccacgtcctccttgcgcgccccttccagcccttcccggccgggaaggacctatcacatccagagagtgaacgtgggccgggaaaccccaactccagaggggggaacctgtgagacccgaccctgcccattccgccgcctccttccacatggaggtagggcgttggcttcatctcccaggactgcctaaggctccctgctccttccgggtttccatgcctgtttccacttagggtttcaaaataacagcctcggctgccactcacaaggctgactgcaggctcgcccccagccctggcattgccccaagcccagagagaggcctgcctgggcctgaaactgcatgctccctctgtttccctaactgcgggggagaatactggatgccggtgaacaagtctcctgggaagagacctccttcagtcccttccacctgcctcccttccccaagctttcaatccagtgtgtagtttttggtttaaccaaaatttgtaccacgctcatcttctgtttactccacagtagttaccctttactatgaagaaacatgagtttaaaaacactttaaaaaatagcaaatacaaaaccaagtaaaaccaggattgcaacagctaagcgaaacttgctgcatgggagaggccaggcaggtgggtctggggtggggagagcttcagctgctccatttgactttgaagacagaggcaacagagccataaaactaaactttaaaagtcaccacaattagatagatagaaaaccttgctctcaaccccctcctctgccccagctgtgcttttgatgggaggaagctgcctctcctaacatggacatgaaagaaagctcatgctattcaccgcagcatcgcgatcctgacatttcactaaatatagatgcagttagggtcccacttatgtaatatacatacgctatctatgaaatatgcatgca

SEQ ID NO: 586383 - DNA, 4001 bp, Homo sapiens
cattaaaacatacagagatgactggctttttatgactgagtggcttttatttgtggctgtgatctcaggggaagccaatttgctgtgtcctattccttgacttatactggaccccaactcctggctaagggaactttgagtcaccaagggaatctgaaaatatactaagggataaatcaacagtaattaaatagttcagtagcgaaaagcccactgaggcatatagaaaaaagcaatgtaacagcatttcactagttgacttagaaaaattaggcctgttatccaaactgctacaacttgccttatcaaaattcaaccaggaaacagaggaaacctgaagtcagtccgaaacatacgaatgcgtcaactttgtttttttttttcagcacatcattacacatcatccatttggtaaatggcagagggaggggaggagagccctcctcaccaaaggttccaagggcagcagggaggattaaggctcgggcgccccaaacacaacacaacctagaaagtgacgtgtcgaggggaatcacaaataaagtgccaccagcggcgtttgcggccaggaagaaaaaagtacgctaaaatttaattataagtttaagcaactctctacgacatggaacgtgcgtttgctttgagctccacggaatcgtttccaagccaaagcaaaccatcctggcggtcagaggccgagataacgggaaggcggccagtcgtaccaatcagcagcgctcaagtctcgttagcgcagacctgctgcccgcggccaggccgggcagctgttgatccccgggccattcttttaaagcccaggcagagcgcgggtgggaagcgtgcgaggagagctgagccagggagttgcggggaggagaaggtaagaatgtcccagagaaaaagtcggagagggctgcaaactggctggtccggctggcggggctcggcgcggcggaagcgggaggagaggggaaggaaggggaggggaggggaggggagggggccagcgcctcaaagttccgcgtcccggcggcgccggcgctagggctgctcacctaacaggagcgtggtccaggtccggccgcgccccgcgcgccgcaggcccagcgcccagcgcagccgggcggccaggcgccccccaaggccgcccccggcgggcggcgcgccgggctcggcgcggggccccttcctgcccgcggcgcccttgcgccccggggacaggggcgcgcgctcgggccccggctccccggcgccgacgtccgacgcccccctcagcggcgactgtgaggcgcggggtggctggggcggcttgggagccgcctcccggtgcttgttccgcgcctgcaggaccatcttggcatagtcgcgcccgctcgctgcgcgcgcccggacggcggccagagaacggcgggctggctgggcggctgggcgcagctcactctccagcgggcgggcgggcggagggtggagggcgggctcgtccctccccgcgggccgggaggcggggagatcgtggaggccgggcggctgctgcctggctggcagtaccgccgggaggcggcgccggacttgctagcccgccgccgttgccgccgctccggttgtcacggcgaccgcggaacgccggggggcgggggcggggacaccctgcgagcggccgcggccccgcccccgccgcccctctgcgccggacgcgcgctccaggccggccagcgcgcacgcgcggacttccggcgcaggcggggcccgacccctctggcgcccggctacccacacctcttcggcgcccgcgcggggctcggccggtgcgaggacgcgggggcggacggccttccggaggcggccgcccttccattgtgggagtgatggggccgaaggaagagccctctcgggatcggggcgctgattcaagtttcggagcctgttaaggctgcgcttggagcccgcgcaggcgagacgcggcggggcagggagaaggcgcccggagcggccacttaggggcgctgtgcgtgcgccctgggcgcctggtcggccccaccgatgtgaagcgcgcgggtggcaatcaagtcaccgtctccgtttactccccgcagtgtggtcgcgcaacttggagcgcagcccctcactcaccgacaagaagaacgggtgcgacccgatttaagatagtaacagagtattaaaatagcagcctggaatctcatggggagctgataagggacgaggcacaagtgtaaactgaagaccagggtaggagccaggctgaaggtgataggatggattggctggagcaggaaagatcatcaataagtacattcagtttgttacacttgctgtaaccttgttgcttaataggaagcaggaaaacttggcgttgataagataggagattttagtcgaaaatatgttttcttttacatagcagaatgcacgagtaaattaaacccgggaaaatttagaaacccaggtagatcccaattctccctccacccctgcattctttgcacacagtcttacaacagcatggattacaactgggaggttcctttcctggccgtgcccagtggcttgttccaaaaagttgtctttaagtcccaatgttgtaaatcaaggcccatcgttctgcttatctctattgtaattccagggacttcacgtggctttctcgctctttgtttctttgcccagtgatttctttactaataccagcattcgttcattgttagcctttttaagagacagtggattattttgtaaagggagggtgtttgccatgctaattaatactccctcataccctgtctagtttatgaatttggattttccaatgtctttattggagcaaagaacaactatttttatacactggtttaaaaaataatggttgaaagtaggatgcagaaggcttggattctgaaacattgtgtcagctgaactcaatgctacctctgggattaatgttgaatgtattcagttaaaagaaagctaattcaatgcctattaaagataatacgaataactggccgggcaccgtggctcacgcctgtaatcccaacactctgggaggccgaggcgggcagatcacgaggccaagagttcaagaccagcctggccaagatggtgaacctctgtttctaataaaaatacaaaaattagccaggcgtggtagcaggcgcctgtagtcccagctacttgggaggctgaggcagaagaatcgcctgaacccgggaggcggaggttgcagtgagctgagatacgccactgcactccagcctgggcgacagagcgagactccatctcaaaaaaataaataaataaaaataatacaaatgatggattttttttaatgattagaaagacgcatggaaaaagaggttcaacatttgaattattagattgctgtgtgtctactttatgtgataggccctgaattcaggaactgcctcccttaagctggtaccgtttgtaccaggaaaacacttgttgaatgagtgagtgaatgaatgcagttccacaagtgcttgtcagttccccttctcggcttggcaaccatgcggagaggggcagtgtgaggtattagttttttggtttttttgttttgtttgtttttttcttaaacacggtcaatttagatccagtttgcagccactacattgacccataccagccttgaccaaggtattatacctctttgagtctggatttcttcattcttaaaatggaggcaacaaaaacatctagttcacaggtttgtaaaaaataagacaatgtgtgtaaagcatctaacaattacatatatccaagtagttgctcagtgaatgttcaaattgtctggatgttggtagttgctcaataagtgttcaaagtagtggatgacgtttaaggagagtggcaaacttctgtcctcccagaacctgaagttgacattccaagttggggtatagcaaggggagaatgccactctgagcgggagagcaagaacagccacgtgatctttaagccag

SEQ ID NO: 586384 - DNA, 4001 bp, Homo sapiens
tccttaggaggaatgacttgtttgagttcccatcttgatacaaaccacaaacaacaaaaaccgggcaaatctgaaaggcttgctgactcagcgacacaaattccaaggcacctttgccaacgaggaagaagatgatcaggttttaaattaagaaacagcagttagtaaaaacaaaggtacagatgttggatccgtgtgctgtgcctggggactgaaaatcaccagatttattttccaatagcctgggtggagcaggaggtacaacagtcttcctccacccacttaacaatcaaggagatggttgaagaaacaacaaaaagcaaacaaacaaaaaaaccctgagctctttttaaaattttttattattattagtttttggagacggagtcttgctctgtcacccaagctggagtgcagtggcgtgatctcggctcactgcagcctccgcctcccaggttcaagctactctcctgcctcagcttcccgagtagctgggattataggctcgagtcaccacgcctggctctgagcccttttcttaaaaaaaaaaaaaagttcgtttttttagtttgtttgttttttgttttttgagacggggtctccctctgtcgcccatgctgcagtgcagtggtgtgatcacagctcactgcagcctccaactcctgggctcaagcgatcctcctgcctcagcctcccaagtagctgggactacaggcacccaccaacacgcccatctgattttttatagagacagtgatctcaggaatcctcttcgtttcccaggcttgtctcaaattcctggactcaaatgatccttccacctcggcctcccaaagggctgggattacaggcatgagccaccgtgcctggcctgagcccttttacagaaaactctaaaaggacttcataagccagtctggcagctaagcatccaggaaatcaacacaccagagagggtaaatatttaaggtcacagagcaaccgaatcagagggcttgctatccggatggcttaagcccggatggtggctaccagaaagtctaccttctagagcgctagaggagctaggaaggcatgcagaaatattctgagtttctcaagggtccaggcgtctgtacacatgctatttatttccatcgctgttggcgcttagagaagtggagccagcttggaggaggagggcagctggctgagacagtcgcgatgaaagcgcagctccagaaaagggaaccgagttctaaatctttttcggcaccccttacgcaccccaaaaagtgacccagggccccaggaactcctgggaagaccccccacaggaaagcagggaagcagagttaggaagcaaactcctccaaagtacaacccccggcccagtgagtcccttcacctgggggtagaccccagcaggaccaacccctcgtcagggagccggtggcaatctcgtcaccccctcctctgggtactttgggaaggggtgcgcgccttccgagcgacccggaaccgcgcccctccgcctgcgagcccctcagccttcatccgaacgtcccctttcgcacccggcaccctgtcccgtccaaagctgccggcgcctcccaagtcccccaactctcgccctcaggaccttgatcccggagaccgatccccccgacacccccgatctcccgggacccccgggtgtccccgccgccccggccgtcggtccccctcacacccacgcccgcccccttccggtcccagctaggctccggctccccgcgccaccccgcgcccctgggaccgcagccctagcgacgcgcaggtggccttcccgccctctcaccgaggctgaggaggacaagaggacggggctgagggcaccaccgcgctcgggctgcagctccggctcggcctgggcagggctctggctgtggctccgactctcaggagaaggcagccagagtgaaactcggcgtcgcagcttccgagcgagccgctgcgcatgcccggggcgtgcggccttctgggaaatgtagtcccggtagggcccaggggcgggcagaaggcggggctcagcggggaagggctcaacccaaggcgcacctgctccggtctatgttttcttccttcgcctgctcactcattgacttattccttcattaattactgacttaattttaactagtttttactagtacatacatggtgccagtacatacatgtgctactgtttctctttttttgtttttaaaattaattttatttttcttttttgtacagatgggggttttgcaatgctgcaacgttgctcaggccgatctcaaactcctggcctcaagcgatcctcttgcttcattcagcctcccaaagcactggggttgcaagtgtgagccatcgagcacaacctttttaaatttaaatttttgtctttttcttttctttttttctctctttctttcctatttatttttaatatttatttatttatttagctactgtgtagtgggagtgcgggagtgaataggtgaatcagaaatggtttcttggctgggcgcagtggctcatgcctgtaatccctgcactttgagaggcagaggtgggcggatcacctgaggtcgggagttccagaccagcctggccatcatggcgaaaccccgtctctactaaaaataccaaaaaaaactagccgggcgtggtggctcgtgcctgtaatcccagctactcgggaggctgaggcaagagaatcgcttgaacccgggaggcagaggctgtagtgagccaagatcgcgccattgcactccagcctgggcgacggaacaggaatccctctcaaaagaaaaaaaaaaaaagacgaagaagaagaaaaaagaaaaagaaaaggtttctcgccgggagcggtggctcacgcctgtaatcccagcactttgggaggccgaggcagccagatcacaaggtcaagagattgagaccatcctggccaacatggtgaaaccccgtctctactaaaaatacaaaaattaactgggtgtggaggccgggcgcagtggctcacgcctgtaatcccagcactctgggaggccgaggcgggcggatcacgagggcaggagatcgagaccacggtgaaaccccgtctctactaaaaatacaaaaaaaaaaaaaaattaagcgggcgtagtggtgggctcctgtagtcccagctactcgggaggctgaggcaggagaatggcgtgaacccgggaggcggagcttgcagtgagccgagattgtgccactgcactccagcctgggtgacagagcgagactccgtctcaaaaaaaaaaaaaaataataataataataataattaactgggtgtggtggcgcgtgcctgtaatcccagctacttggaagactgaggcaagagaatcacttgaaccctggaggtggaggttgcactgagccaagattgtgccactgcactccagcctggacgacacagtgggaatctgtctcaaaaaaaaaaaaaaaaaaaagaaagaaaagaaaagaaaagaaagaaagaagaaaagaaaaggatttctttcctgggaaagctttgtatctagttggaaagtccggcacttaaacacacaattacgatatagtggggaaaatgtttggataaaggagggcatagaagggtatgcctaacttgagggtggggagaagacatcacaagacagataaaggctatgtgggtttttcagtccatagagaaatttgccagttggagcatagggaagctcttgtaaagcaagagagatgtgaaagtgcctcatgcactccggaggcagcacaaagttcctggtggccagggcagaggacacatggagggaagggagtgaggaaggagaaaatgcactaggctatagcaggatctgaggagtgtggggagaagccggggtaagattatgatgaattttagataatgtgagtgtttgcacatgtgtgcacatactatgtatgttgaatattatgtatacagtttcagggggatcaaggtcctc

SEQ ID NO: 586385 - DNA, 4001 bp, Homo sapiens
tgcctattttcaaaggaaaacaaaaggttagtctgctagcatccccaagatacagggaacgttcaaattcttttttcaaccgccaaaataaacaaataggaacacagtaggtacacagtcatgctgctatttgtttatttatttattgttagaggcagggtacccctttgtcgcccaggctgcagtgcagtgatgtgatcatagttcactgccaccctgacctcctgggctcaagcgatcctcctgccttagcctcctaaataactgggactacaggcacatgacaccacacccagctaacttcaaatcgacctctacaacacctgccactttcattccccgattaacacttcctgctctctgccacgatatgcaatttccatgttattatttatcctgtctgctatctttctcagttgacttcacacactgtgaaggcaacgacttgggagctgactgacagccacagttttcacagactctacgacactcctggaaacacatagtttccagggctgggcatgacggctcgagcctgtaatcccaacactttcggaggccaaggcaggaggatcacttgagctcaggagttgaagaccagcctgggcaacacagggcaatggagacccagtctttacaaaaaacaaacaaacaaacaaacacgaaaaaaaaaaacccatacttttaaaaataaaactaaaattaaaattgaaaaaaaaaaggaaaaaccagtttttcaagtttcctcactggtgacactgtgggccaataattccttactgcagggccagcccagtgcactgccggatggcgagcagcatccctggcctccacccaccagatgccaggagcacccccacctcccacccactcagctgtaacaaccaacaatgtctccaaacattgtcagatggccccggggacaaaatcacccccagtgacaaccaccagattagagtaagggatggctccgagaggaaactggtgcctcattctcaataatactgatcaaaacacactgcaggtccaggcgcggtggctcatgcttgtaatcccagcactttgggaggccgaggcaggcagatcacctgaggtcaggagctcgacaccagcctggccaacgtggcaaaaccccgtctctactaaaaatacaaaaattagccaggtgtggtggtggatgcctataatcccagctactcgggaggctgaggcaggagaatcgcttgaacccaggaggcaggggttgcagtgagccgagactgcgccactgcactccagtttaggcaacagagccagactccgtctcaaaaaaaaaaaaaaagatcaaaacacatcgcagaccaaaaagcagaaacgcacacatgcagaggggcgcagttgcctgcccagggcacacagccactgagtggtgggacagggccctctgaactcctatgacgcaccacctccatgccggcctgccggccaaaggaacccttcaacctctgtggtcgggacaggcatttctgctttgcaagacaaggggaagggcctcccacagtgcctctcccactgtgagctgcactcaacctatgtggatgttcccactcactgcacccacccaccaccacgtgtgctgcagggagagagcagaagctctgtaagtcacgtccatcaccccaacacctggcgcagagcctgtgggaaagcaggtgcggcacccagatatgtgcgagaggcagacagcgtcttaccggtgtcctggcggaactgggtccagctggggaggtcaataatgtaaggggccagcgaggggtctgcctggcccaaggggatgctgtgggccaggctcccaagcccaaaacgttggcccttctgctggacaaactgctgctcgatgaagctgcagacggtggcactgtaggggtgccaggtgcccagcccgtcctgccattcccacacggccacagccgcggggctggtgtacacctgcaccagggaagggcttggggccatggccatcttcccaaggagtcccgctgctttcccaaacagcttcagacccctctggcctggagtcccggggtcattgcccagcgcctccggcagatctgtgaacaggacagacatgagcagttaccaatgcacatcagtagccctgcagaatcagcctcagcgcaggggaaacacgtgatgcttttccacagctgatttttttttttttttggttacagggtctcactctctcacccaggctacagtgcagcagtgtgatcttggctcacagcagcctcaaactcctggtctcaagcaatcctcacaactcagcctccagagcagctgggacaataggcattcaccaccacacccagctcatttttttactttttgtagagatgatgtctgtgttgcccaggctggtctcaaagtcccagcctcaagggatagactcgcctcagccttcccaagtgctgggatcacaggtgtgagccaccgcgcctggtctcacgcttgcttttcttcccctaacaccttaagggcatcatgaatcaagaacctgatcctgtctctttgctgtggcagccaggaagaattcaaagtcaatcccgcagcctacgtaccgccgcacaggcccatgaagaaagagagcataaattccgggtgctagtcaccagcccagcttctttcttgctactgataattcccctctgacccaactgcttagtgtgtttcatcatgcatgtatttttttttctttgagatggagtttccctcttgtcacccaggcgtgtgatctcggctcactgcaacctccacctcccgggtaggttcaagtgattctcctgcctcagcctcccgagtagctaggactacaggcatgcaccactgcgcccagctaattttttgtatttttagtagagacggggtttcaccatgttggccaggctggtctcaaactcctgacctcaggtgatccacccacctcagcctccctattagcacccaccatcctgaagatgagatcccaacatttcttggaaaggagcagggtttgggacacccagggagcaggggcagagctgggaactgcagcacaggttctagctcctcatgtctcccaggtgccctgaagcattgctaaccaaaaaggaagccctagatgggcaccgaatcacccctctctggcctctccaaggctctctgcacccactccccgacctggcccctgctgaccggccaccaggcccagggagctcttccccacatcccgagctccacctcccgagaccttctccttgcagtcactccagcccaccctcttcccttgcgaacactccacgtcctccaggcccagcttgcatcgctcaggatgacccatcacacgccctctgcaccctccacagcacccaccagaaccctagtaaccgcgtccacgtgtggctgtgaccacagtccttctgctcctccccaggtggcagcaaccccaagcctgcttcattcacagctgcatcaccgggacccagcaggggcatgccacgtggtgagtgttctagaatgttctacacactgcttcagaatgacagagtgaatgtggacaatgattccgctcagcacctggagctgtctgaataagaagaggcctgcaaatgccccacctgatggctgccccccagggcaccggctgttggagtgccggtccagggtccaacatttagtaaccaacatcaaatgtacttgtctctcctaagctgcacagactgccaaggtgacatttctcccacttacggacaggaaaccaaggctgaaagaggtcaaggggactgggtgtggtggctcacacctgcaatgccagtgtttagggaggctgcgacaggagggtggtttgagcacaggagtttgaggccagcctgggcaacatagtgagatcccatctctgcagaaaatttaaaagttagccaggtgcggaggtgcatgccaatagtcccagctactcaagaggctgaggcaggaggatggcttga

SEQ ID NO: 586386 - DNA, 4001 bp, Homo sapiens
aataaagcgcaatggcaacaaggtcattagtgattttagcaagaattacttcatttttatccactcctgcagtcatagtaaatggcatacagaaggcctcaatatttatttgctgaaagaataaatcagtaggtttcaggggactgggctcacacctgtaaactcagcattttgggaggccaaggtgggaggcttgcttaaggccaggagtttgagaccagcttgggcaatatagtgagacccccatctctaaaaaaattataaaaatcagctgggcgtggtagcaagcgactgtgatcccaactactccagaagcttgggcaggaggatcccttgagcccaggaggttgaggctgcagtgagccacgatcctgccactgcactccagcctgggtaacagagctagaccccaactcaacaaaacaaaacaatcagtagctttctaccttagttgtacactacaatgacccgaggagcttttaagaattagcatgcccaagccataccctagaccaattaaatccaaacgtctgggctcaggatgcaggcatcagtgtttttattaaagctcttcaggtgatttcaatgtgcagctaagcttggaattactggaataagtaaatccaaagattccaaagcacctggtacaattgtttgtttaaatgggttcctaccttacctattaactccttttagaatatggattgagtcttatgtttgtaaactcatgagagcatgcagagtagaggggtcaaaactttcgctgtatgaatgaatattactcactcttctaaaatcttccactggggggaataaagccaaggaaggaaaaacaattcctaattcacaagtaatgaatgaatcacccctattcccatcatgactaagatcttacatactagggaaaatcctctgagacaaagagagcataatgcagtgtagcataagacttgcttacctgaggtgttatgagtatgaaatgcattgagttataaaatacttagaacagcgataagcacaggataagtaatagcacctttttgaaacagaatgtagaaaaccacgtagctctggaactggataaaattggtttcctggatacatacctactgtacaaaatgaaaaagtcatcttccagcttctttttgcgaagaagcttaagactgtcttgcatacttgtggttgcctgaccctgttaatttatcagtatttatcttagaagaaagaaatctaggtcaaaaacgcgaacgtattagtaaagaagatacaatgggaaccaacctgatgctcttacagcgtcaatactgttagttgagatgtggaccatctatcagtttgtaattaagaaaaagtctggcacgtgactgaaactgaggaagaagtagaaaaggcaaaaggtcaaaggtctcatgggaaggaaggagggtagagacagtgagttttattggtccttttatggttcagacttccttcttcatcgactctccctaattctcttcactgttcatccccagcaacttttcttcccaagcatttcctgcgggcttttattaccccaggagtgccaatcaaggcgtggaacagataaagctgtgtagcaactaacgcgtgactcttgtgagtgtggagggcaaacgaagctccctgaaacctccgctctgctctcctgccttacgccgcgcggcccctgttctgaggtttaatacttgcttcacagataagcgctgcggccacgttccggtgcccaccttctccttggctagggcacgacgccagcccagggggcgcggccctgagctgctgcgagagacagctgaaagcgccggcccgacggccttggctccctcggtgcgctgggcgcagagcactcggaccctgggcgcccactgctcgagtacctgcgcggctcctagccaggcttagcccaggcgcgggctgagagtcagttcgccaggtgggcctggagccatgggctgggtgggcgggcggcgccgggattctgcgtcaccacctgggcggagccgttctgctgctgacgacatcaacccggcacctgccaacatggaaggtggcggcggcagcgtcgctgtagctggcctcggagctcgaggctctggagcggctgcagctacagtccgggaacttctgcaggacggtaaggagacggggtctgaccaggtcgtggggttgggggtctgcgctgctccgcacctggacagcgaggtggacccaacccgttgctttgcagaaagttttccagtctggacgtgaccactcccctccgcccggccccctggcttgggtactgttctagccaacctatttactctgggactggctccctcttttctggagtcttggggacacttggtttctgtgtgttcctcatttcaactcgaccccccccccccccatgcctccagcttccctgaagtttcgggagcccaaaccctgtggaccgcgttggcagccaccggctgctgccgcagttcttgacgaaggggtgtagcgttcgagctcttcaaaagtgtaagctctagaacagacggcagacgcataatgaaatagggccttgttttaaagtagagctggaaacgcttactcctttaacaaatggactgtacaggtgacccctcttacaggctggttttttttttcctcctttatgaggcagttatctacagtgacacgtgggggagggtttgagacatttgttcaggttgggattaaccatttgtacagaatctagcagtcagattttattgctagtcagtttggagagaagttgcccaaaataagaaaagttagatataatatacttgaaaagcatattcagttgtgtcaatccagttaccatgtcccgaatctcttatccttcagaataaagttcacatttataagcataaaaataaagcccttctcacctgttcttaattttttctctagtggccatcgcattctaccttgtactaaaatcatttgtatacttgttttaatctcttctgtattgcaaactttttttaatatcccacagtgtgaatagcagtatcttgcatacagtaggtgcagaatgttttttaaattcatcatcgcagttagaagcacatgcacacatttgaagaccgaagtgggtaataaatgaaataaagttccaaattattgtttattttctctgactgttaaatattttattgtcatcctgaattacgtgccttttcatgataatttatgtacttttgtcaaaagcaatgatgttttctgaactatttcatgttggaaactctaggaccgggtctctgtctaaaacttggctaaactgaatttaaactttagatacaaggcagagaccctgatatatttgcagttgctcctgatacacgtgcaatttttgccctcaagtagttcaccatctagtagaggaaataatcttgtagactataaaggtaggtgctgtaatatagtgatgtaagatagcagtaggattgcatataaagtagagcattaatacagaggagaatgataactgggggttggaaactggttaggaaatgtcagaaaaggctttctaggtggagacgttttaaactgtagacaggacttccccaggtgaacagtggaacattggatatatgtttcagtaggatgtatttcaggaattgtaatcagttcttggacggtaaatactcttcagttctgccttctgtattttcctccttggttctctgccattctccacagtgattgtttaaatcttctttacccttttcaaacctttcgcttcaagctcaacaaatgactttaagcttccctggggagaaaaagaggatccatcagatgtgaactttctccatttcttgcccatcaaacctatgaatttaacctcaacgtataaccatctgttgcaccttttttcccttgccttttcaattgcaacggaagtggagcctctgctcctttctttctttctttcttttttttttttgagacggagtctcgcgctg

SEQ ID NO: 586387 - DNA, 4001 bp, Homo sapiens
tgctcatatccctactggtgatttacctaaagctttaacagtaaaacaatcatgcatgttttcaatagcaaagagggaggaaaggctgggggtggggaaggactgcaagccagcccctcctcctccaggggactgtgcaccagcggctgcagcatctcagaggtccaaagaaggaggaagcaagtgcatttgtatctgaggcctgagacaaggaagacaaagtaaaatgctgagatgctgtgggccagaaacagggctaagagcttgacaggctggaaaagcctgcattcgacccccaactgtattctaaaaacttcccaaggatggtgctagaggttttaagaggaatgggtcttggagcactggatcctcagacctaaacaaatattcgagagttagttcttatgaagagaacatgtggtaactcagtggcaggtgtttcagattttattttattgagaaatatgatcaaaagagctgagttaggacccctttttccacaccaaacctttttgaacaaacttggcattttaaataattagaggtagtattacattctcaccagtaccctcagcttgcaaattgcactgaatattcccttttcaaatttactaacactgatcaacgtatatctctataatttccacaattaaagtatgtacacagactggttacccatgtctgtgttaacatcaggcgttgggttgtcacctgcagttgcctatgccttactgttagctatactttttgctaatctggaatatttggaagcaattcttcacaactctgaactacaataagtctacaatgcccacttgaaaggcattccaagcaagaaaatggctggctacttgttcctgccccttacctaggattagtagaggccagaatagcgaatatattccatcttctgcatgttgttgagtctctgatctcctatgtaatttcctgtcctgatcctgggcttctgtttaatcttattagccaaggtacaagtcatgagactcccgcacactcagttcccatcagcgctgccaggatcactgcccttatgatgacgacgcacggatttataaggccagagcgattccgaatgggagcgggggaaggagagccaggcggccgtgaaggtgtttaccaaaacaacatcccccagccacactttttcgcagcagagagaaactggcatcttctcgctttgaagtgtttaattaatgccctgctggaagtgaattcgctccctccgacttgcagggtagtgacagcatctaagagctttgcagacagctcgaaatgtaatcaaacagcatcctttcccctccctctgcagctttccccctcctccaggggcagtcagccggtggcccagaggggtgcagatttcagcgccgctcgcccactgctcccccggggaagaccgaggcggggcgcactgggacgcccttcccagcccacaaggtgggcgaccaggtggtgacaccacgacccttccttctctgccctagtctctcggctctgccgagaggggggtgtcactggggggctttggccgccttcgggctcagcggagcacgcaggagcctgggcagggggccaggacaagggtccggctgcggctgcaggggcctcggctccagcctggttcccagcgcagacgacaccggggtggggagggttggggagaggtgcggaggcggccgtccggggagcggcgacatcccgctccagtttacctggacgcgctcggcagcggcggaactgggctccccgagccggcggcggctcctgggcggcggcagcgttggtgcaggcggctcccgaaggtggcggggccggcgcgggcaggatgtgctgtctcacgctgcgccggccgctcggctcgcgctcctccgggagcgatcacttcctctctcccagagcctgacactgacagctccccggagcactcagtctgcggggctcgccccgccccctgcccacgccctccacgcccgcgcccctcctgagggagggcctccgctccgcgtcttccgcgcccggtctcgccaggagggggtggcgccgctccgtaggctggtggcgagcagaggacctggaaaggtcaattcgtctatccctctaacgtcggtaggacttagacctcagttgctgcaaagagaagagcttcaatattctgggagctcctgctgaaatgccaccattgaacaactttcactcccaggcaactacacttcttaaggtcatttaaatagaaataaagctcagatctacctgttgtacacaatgacttataggtctgattgatcccaatttttctagaagaaaaaagaattaagtgtgtgtgtctgtgtgtgtgtgtgtgtgtgtgtgtgtgtgtgtggtgtggtgtgtgtgtagcttgtcttcacattgcttcttaaagtcccagcttttaaaaatctgggtaactggccagacgcggtggctcacgcctgtaatccaagcactttgggaggccgaggagggcggatcacctgaggtcgagagttgggggaccagcctgaccaacatgaaaaaaccccgtctctactaaaaatacaaaattagccgggcgtggtggtgcatgccagtaatcccagctactcgggaggctaaggcaggagaatggttgaacccgggaggcggaggttgtggtgaaccgagatcccgccactgcactcaaagcctgggcaacaagagcgaaactccgtctcggggaaacaaaaaaaaatctgggtaactattattggactctgcaaaaaacaagcttgccacaacagctaagttataaggccaaaaaattgagtttgggatgttagggggtttggtatcattttatagatgagcttttcatcatatttcttgcacatctgtggtgtatttttacacattagaatgtaaattagtggagggcagggacgctatcttgttcactgctgtattcttagtatctagaacagcattctgatatataatgggtactcagtaaatatttatgaacttattaattcacaagtactacagtaatttcaaaataaatacagattctagtatgaatacagtatgaatacatactcatctgtaaatggccatccttattctaaaactttggcctccctggctaatctactgcgattgtaactatggctagaaatgaagaggttaaatgtctaggtagaaggtattcaaggtattccagaaggaaaaatctaggaaataaatatttgccactaccgtgactgaatatttaatacatgtcaattctacatacatttttctttaacttttctataacattatgtagtacatataacgaatgccatgcctccagaaaaggaacttgagtcaaagaagttaactcccttgcccaagttccataaccactgagtgatctagctgagatttgaattcccattcatctgcagcttgtactttaactactttgtattttggtctttccaacatggcattgcttttgttgttgttgttgttttgtttgtttgtttgtttgttttttgagacagagtctccctctgatgcccaggctggaatgcagtggcacaatctcggctcactgaaacctccatctcctgggttcaagcgattctccttcctcagcttcctgagtagctaagattacaggtgcacaccacctagcccggctaatttttgtatttttagtagagatggcatttctccatgttggccaggctggtctcgaactcctgacctcaagtgatctgcctgcctcagcctcccaaagtgctgggattacaggtgtgagccaccatgcctggcctcaacatggcattgttgagtgcccacgaagtaggagctgggacttagacactggaccaaattgaagactagctaaaacagggatggggcggaggcagctttccataagagatgctcaccagtgtgccatgtcaatttaccactgccgtggcaaaacccaggagttaccactcccttccatggca

SEQ ID NO: 586388 - DNA, 4001 bp, Homo sapiens
cacccatggtggttcctgtcctcacctgttttccaggagtgtcatgcacaccacctctcgcaccccggggttgttggccttctccacggaacagccctgcaagttccaggtggccagcctcagcacaggcctcccatcccttgtgcctccaaaggcctccacggacggccgagtggagataatctgggtgggcccccctggcggcaggtccaggtcctcactctgcaggctcagggaagtggggctcgggtgaggcttggcggtgaaggtcagtcccccgttcgtgtgggtggatgggggcctggacctctcagcaaacacctggtgccggatcctgtccaggaaggcggcattgataccatccatcctcactaggtcctcaacgctgcgaaagggcccatgctcacggcggaagtccacgatgctgagggccattttctccgagaggcctcgcacgctcatgagctgggccggggtggctgtgttgatgttaacacgtggggtgaggggcacagctgtggccaggtggtgaggctgctgctccgctagcaggtcccgccgcagggaactgggagagtgctgcgctgagctgcccttgctgctcacacagatctcaaacttgacctgctccagcttggtggcgcctacaccactgaccaatgccaggtcctccaccttcttgaagccaccgatatactctcggtactccacgatgctgcgtgccacggcacgcgtcaccccaggcagggtcatcagctcctcctccgtggcagtgttgatgttgagccgctcctgattcactagaatgttgctgaagttacaggctgcgctgaacttgcggctatgggacaggtccgaggggtccctggggatggagcggtggcagcccagggtgctccccatggtccgccaggatcaggctcccgggaaggccgcaccactgcagaagagctctctggctagggaggaagcccagtaggccgtacaagcacagaaaaacggaaggtgcaggattcagggactgaagaggttactatagacaaacaccgaatcttccatgcctggcgtgtccaaaattacctttcacttggccgcctagaaaataaatcaataaacatagaaacccattgaattaagaaatttgcattagcaccccctacctagtgctagagttagtaaccaggagtcggggactggtggctgcccgtgaacccctaaaaacgcaggcacaatgaggctaggcccatgtggattctcctctagggacgtccgggttttatcacactggagtccaaaaaggctacgagccgcttctcttgggaagagacctatccccatcagcctcatgcctctcctccaggcctctctcaactctgacacttgggtcacccacacttgggctcgcgcagacggggtggccactccacctcccccacgctccgcatctgacacagcgctacctgcaacctgggaagtccgtgctccccggagcgggcactgagaaggggcttatcgaccccccacccgacctgccgcgggtccccgcgccccacctctcggccgctctgcggggcgccggttcctcttccacctgcggctcggaagcctgagcccagcccgggacagcacgggccccctgcctccagcctaggcgtccgcgcgggtgtgggtcactggtcaggccctggaagccgactacgccgcttcggtctgcgtgtcccggctctttctatgggagaaacttagcatcgctctcccagagtgaatagaagccgcagggctgctcggaggcggcggcagcggcggcgaaacccgccgccgaggctgcaccggggcttgcggcggcgccgccgcagttgcgtttaccccggcaaaaagtcctgcgcccaactcgggcggggatccgccagagccagtccagacccagcaccagccgcacggctcccgctcgcagtcggtgtcaaagccaaagtcccggccgcgccgcgccgcgccgctcgcgcctccgcaggcaccgcggccacgcctcctccgcgcggcaactcctccccgggactcccgagggcacgtgggggaggggccctggcgcggggcgaggcctggcaccagtgggtggagagaggaacccgagagcgcaagggcgggcctggagtgggagaggcggggccatggaagagggggcggcatcaaggctcaagagggtggagaacgaaccagagagcgcgaggggaggccctggcgtgcgagaggaggagccatgggtgtgggggcgtggcctggcacaaatgggtggagagcagaaccctggagcgcgtggggcgggcctggagtgcgagaggcggggtcatagagtgtgggagcggggccagggcgcgatggggtaggaaaagcgggggcggggccatgagcgcgggggtaggccccgggagcgcagaggcgggacttagggggcttaaggggcggagccggcgccgtgccggcgagggcgggtcacagggaggctgtcctaagtcagctgcccccggaccatggttgccgcccggggcctaggactggttgtgcctggtagaggctgtttaggattgcccgaggcgagatctgctcagctgcttttcgtctgtctttgaggtgtggggatgaaggccggggcagtccctgagagtgcatcgctgtaggtccagggtctcacggaattttgcagaacgttccagaggagactgaatgggatcgtcttaatttctgtccccactttcggccttttcttttcttccaccagtgtattacctttgctccgctcagagagatgtcctctaataacgccagcgacgcattgtgctcctagcagagggcacgcaccaccctcctgtgtgttcgcataggtcaaatacaggtttgctcctttgcacatttagcgctgtgagtaaacaaggataagtttttgtaatattaagtctaatcattacgaaggagggaaatgggggctgcttcccaaaacccagaagagtttttgcatcacactgctaaatgacaatttggttaaagattaaagagccctctgcattatagtggatacctagagctagagtattcgattaagcaaatcatgcggtgatatcgttgaatactttgaccctggacgtttagtgttctctgaagtttcatccccaaccaatgtgaccagtgcatctggtttcaattccaaggactgggtcagcaaaaatagtacctctcacaggcggaaggtactttggttgtaaaattagcggcagcccaagtttggaaaatgctactgcctttctgaggcacattcccctgctatgtatattggtcagaaaaccaagtcaaactagcttagaccaaaaaaaaaaaaaaaaaggtcggggggaaatttttggttccttgttgaaaagttaaggtaaggaatcttacctcaagtctggttgcatccgacccaagtgatgatggggtcattaggacatggcaggactgcctccatctctggctccacggttctctttattggctttatttttaggcaagctatttgcacttgatcgcaaaaatgccttgctacctaccatcatctcccacccaaacactgggctacattatgccacgcactgaaatcctggtgcggtaaggaaaaaacagtttaagacaagcaggaaaacagagaaaactcttcgttgagcagaatgccttgatgcgcaacgtggctgtggaagcacagccgtggagcgtggctacttgggctggaagcagagaaaacatattttatcatacaaaccaggacactctggaggtgaagagaggactctattaataatatcctagaacaacagaaataatctggttttattccccataaacctagcaaatgctccccttggtataaatgaaaccaagcgttggccaaaccaaagtgcatttaaaaacacacatacatacaccccacaaaaacatgcaatgagatggttaactttaaaacgactgattgtatc

SEQ ID NO: 586389 - DNA, 4001 bp, Homo sapiens
tagtgatccccaaatctggctgcccaacagatcacatgaagagcattaaaaaaaatcccaagtccaggtcttgccccatgccaattaaatcagaatgtctgggggcgggagccagacactggtttttgttttgatttttttttttttaatcccaggtaattccaatgtgcagcaaggtctgggaaccactgttctatgccttgcccctcccccaacgaccgcgctgggcaccaaaccccaactccccaagccaatgacatcaacagcaagtacgggcctggctcttggaacccgcgcagctcaaggttggaattgtgcaattaaaccttccaaggcatgtttcccctgtcaagtgggtttatggtcggtagtcacgaagccagactcgctcatgttctgtctgcacacttggcacacttgaaccagggacagcaatccggtgtgtgtgtgtgtgtgtgtgtgtgtgtgtgtgtaagacaggtttaatattttggttggctcaaattcttcaaacagcaaaaagagacatccaagaaagaaagtctccgggttttgaggagaagtttgctgtgagccccattttgaaacaccatggtgttggccaggatgagctctgcttccggggcttccgctcaagagtcccgcgatccccccctgcagtggccggacagccgcgtcccgctccaccgcgaagcccaggcgcgaccgaagggctgcaggtggagcagacccggacgtctccgcgaggcggccatcgaaggagagcctggggctttcggcgcgggcgcccaggagggagctggggtccccgggaggtggggggcactcttggataggcaagacgagggcgcaccgggcgaggcgagcggccggggtctgcgcccaaggggcgggtcggaccccacctgccttttgccaacgaggaaactaaccgccgccagcaccacccctccccgggagccgcaggtggtggtagacgagttctcccagctcccaggtcgaggctgcgactccacactggggaacgaggatcgcggggacctggagaggggccggggccaggctggcgggcgccggcttcagtttgagacctgcgcggagggcggaggcggggaggtcctctcagaaagccgcctgtcccgcggggtccgaggggaggctgtatttttgggttccttcctcagcttccctaaacagtgcagtctcggcgggtgggcagcgcccgcccctcgggtgcgcgccaggaccccgtcgcgccctgggaagacagcgcggggcgcacgtgcgggaccccggccccaggcgcccaccagcacccggctttcgcccactgacgccgatcctgcgcagctgggcggggaaagtgagggaagaaagttgggagcggttcggggcgccggaggtcccggcggccgttccccgcctggcctgcagcccggtgtcccacgcgtctcctcctccgcccgccccagactctcccggccgaagaacgaaacgtcccgttcctcccgcggtcccggtcggcggcgcagctgatctcaaggaaacaggaaaggacgggcgggggcgcgggcgccgagccggtgcgccggtgcgcggttgggcgggctgcggggtccggggcgcgatccgggggcggcgcgggagccggcgagacacgcccttacctttcttttcctccagagcccgactcgccgggcagagcgcagccagcagcgccaggagcgctgccccggccgtcccggagggtcgcatcgctgctccccgaagagctcgctccggctctcccgatcaatactggacggagtcagggggccgtgcgcggtggttgtggcgttggcggcgaggcggggactcgggcggacgccgacgaggtggcctgtcgtccggtctgggcggcggcggccgccggggctagctcgggactccggccgcctcggccgcgtcgggcgctcacaccgtgcggggggcggaggctgctgcggccgcgctgcgccgggggctgcccggacgtctagctcgcgcgggccgaggcgcggggaggcagggcgggaggaggagggaccaggcggcggaggagggatcgggaggagcagaggaggaggagaatgcgaggaggagggaggagaaccagcagcggggacccaaggccagcggccgccggaggcggtggacagcggtggcccccgcgggacctagtctccggcgggagtggggcggcgcatgggaggggagcgggtgccctgaggagttaatttccgagaggggcgttcccagcactgcccctctggacccggtccccgcggacttgcaggcccagcctatgtccaggtcgagccaaatctgtgccagggtccccttccccctttcccttcttttgttttacaaagcaaacttgtaccagctttagacagactggccgagccttagagccagcgtcggataatggcaccgacggggaaactgctcctttattcgggtccccacctcccctgcagcactacgggaccctctcggggatcagaggctggcctggcagctgaggaggtcgccgtgcccgcgcggcaggggtgccaggcgtccgaggtggtgctctaaagtccgagggtccttcagatcttgtcaagcaccctcgaaatcatctgaaatgagggcacccaactccgggtgcagagacaggcctccttaatgtttattgcaaccagccatgggtactttgaagccaatgtgtgaagcacattacttcgcaaaagtgaagctcttggaataaaggcttgacacaaacagccgtggaggtgcttttagagaggctaagtgtcccactgcccctgtagctcccgcaggagaaatgccagggaaactcgcggaagctttggccaaaagaaactgagcttttttgggctgcaggaacttgagctatattcctttggcaagtccaccccatccccactgttccttctcctgcagtaaaaatgtcctctaggtccatgttacagccagacccctcctctcttcacgagattcactaggaccttcaggcctggttcaacaaccctgatctctcggctctgtcaaaaatcacaatcctgaagtaagtgaagctacagacctgccctttgctgtctctgaaggggagcaaccttacatctttcctcctcatccagcaaaatgtttgtgcctgggtctcgcaccctgcagcctgaacggtggggtttttcaccagggcaagcgcagacagacacaggtctgctcactgcccgcacaacctggaacttccctgtgaattaggagaagtaatctgttcctttgttttaacaaatcagtacagccactgtgcgttgaagtcatgccctgaatgcagaggccatgaaggctctgcaggcatgtgtgtgcttcctgcacacctgggctgagagcagtccgtagaaacacagaaaacaaaactagagaaaggcaaatgggaagcacaacagtggaacataaaatgaagacaggagtgagtcttacaataaaagacctgaatacaataaagtcctgtgcattcacttaacaagggctgcaaatttggttttaaactatattttctgtcaagggaatgtgacctgtgtgtacaagtcacaacacaaatcaatttaagctacaactgatttgtaagactgtacaggaatttctttgagtgcccaaaaagacagcatgtaagaacatcagttctcactacgttaggactatatgagacaacagccttcatagtacggcttgtatattcttcaatgtgatctgatagcatcacaagaaacagagctttttgtaaagaattactagacacacacatagcacaatactgggatggattccagggaacagagaagaatgggtttgctgaacatcttcatgggacatctatgtaaagtttgagtttctcctttgagcttttgatacaaaagctgacattcacgttgattttgtagtccttggctagtacctggagtgtgctgataact

SEQ ID NO: 586390 - DNA, 4001 bp, Homo sapiens
gaccccatctctttaagaaaaaaaaaaattataggtagtattaaggataaaaatgcaacaacatttccatgtattaattccatttgaatcaatcaaaaccatttcaactcggtttgcacctttattttttctcatatgctttctcttacaggaataacttgtagctttaaatcaattgcaacacatttttttgtttcatgcttcaaatcaaagtgtattctctgcagtcattctattggaattaccatatagttaaaatctccctgaatcgtgctcacttcagcagcacatatactaaaaactggaacgacacagagattagcacagctcccgcacaagaatgaaacacaaattcctgaagcattccataaaaaaaaaaaaaagaaaaaaaaaacctgaatcaatgttgttgttgttgttgttgtttttcctctgtctcccaggctggagtacagtggtgcgatctcggctcacttcaacctctgcctcctgggttcaagcaagcgattctcctgcctcagcctcgaaagtagctgggattacaggcgaccgccaccacgcccagctaatttgtatttttagtagagagggggtttcaccatgatgaccaggctggtgttgaactcctgacctcaggtgatccgcccacctcagccttccaaagtgctggattacaggcgtgaccccactgggccaatgtattcattcttaatagcacaatttaatttttaatattgctaaaacacctggcagcaactaaagactctatttcactttcatcaaaattgtggactctttcacctagttagagtcaatgttttaagcatctcttactctatgctaagtaacttagctaccccgtatctcctagtaaacaaaagcctcaagaaaacttgggggctgagagtggtggctcacatctataatcccagcattttggaaggccgaggcgggagaatcgcttgaggccaggcgttcgagaccagcctgggaaacacagcaagaccacatctctgcaaaaaaaaaaaaattaaaaaattagctgggcacagtggtgtgcacctgtggtcccagctactcgggaggctaaggctggaggatcacttgagcccaggagttggaggctgcaatgagctatgattgtgccactgcactccagcctgggtgacacagcaagcctgtcttcaaaaaaaaacttgggcctttttattaaaccaaagacgtttatttatttccacgctgcctcactataagaaatctttagttctccttccaatgaagcaaaagacaagaaaagctccaatgaagcaaaagacaagaagagctacaaattacaactcttaacccaaactattcagcgtatagtttgcaaagtctccttgcagtaatgaaagaagatcgttctcaaccaatgacaaaacccagggcatgggggcaagacggtggcctcggggatgtccccagccatccgaaggcctcagtccccagagaggaaaccaaggaacagaaatgtaaacaaaggagggagaggcagacgttcttttcaataaatatttaccttacccgacggcccgcccgccgccccccctcgcactgcgcggctgggccgccggttcaaccctggaggcagccaaagtcgcccaggtcctcaggcaaacctcagggctgcctttgccgcccagaaacgcaggtggacagagagagcagagcggcgacgccgcgatccgatccctcaccgtcatattcggggtccgggccctcggcgggaaagtcgatggccggcggcgcagccacagccccagccccgtcgccctcctcttcgcgcttgcggaccccggagttgcccccctgcatcgccggccgcgcgcgggccgcagcccagcccgccggccagcccagcactgccacactccgatgctgcagctagcgccgtccgacccggaagtaacccctcaccagacggaaaaccagcctccgccacgcgcgcaccttcactgggggcggggctgtagcagactccgccctttatcagacaagaagagttgggcgtgtccggccccggcgtacccccggcgcatgcgctctggtgggctcgtctaccggcggctgggtttcaggggcgcccaggtgaaccctggcctagttcccagctaccccagaagggtcttagcgctcacgtctcacgcccagactcgaatgtcagtgtaagaatcaggtgtctgcaaagactaatcgaaacatatttaccttttgtgggtacagcaatgactttggtcatttgttttccaggaaaaaaattttaaaaagcattttcaaaacctgtctcaaggagacctgaacctattttggtcaactgttatgccacaaaaaaacgggagatgccgccgggcgcggtggctcacgcctgtaatcccagcacctttgggaggctgaggcggtggatcatgaggtcaggagatcgagaccatcctggctaacacggtgaaaccccgtctctactaaaaatacaaaaaattagccaggcgtggtggcgggcgcctgttagttccagctactcgggaggctgaggcaggagaatggcgtgaacccgggaagcggagcttgcagtgagccgagattgcgccactgtactccagcctgggcgacagagcaagactcactctcaaaaaaaaaaaaaaacgggagatgccaactacattccaaaacgcgcagtgaatccaacctaacagaaattcctcttagaatttacaactgaaatgttttccttaaaaaaaaaaaaaaaaaaaatttaggttgagggatacaggtgcaggttcgttttccaaactaaaaccccccgccctggccacactccatctactatgggttgaaaccctcagattcaaaaatccaccctaagccgggcgctgtggctcacacctataatcccagcacttccggagaccaaggttgggggatcacctgaggtcaggagtttgagatcagcctggccaatatggtgaaacccccgtctctattaaaaatacaaaaattagttgggtgtggtggcgcgctcctgtaatcccagctactcgagaggctgaggcaggagaatcgcttgaacccgggagacagaggttgcagtgagcagagatcgggcctctgcacactgcactccagcctgggtgacagagcaagactccatctcaaaaaaaaaagaaaaaattatccttaattttcatggatcagctacagctggaataaaaatctttcagcttttggacctcacccacagcacgatgtgtaaaagtggtattgtttaagaattctatttgaacttgttttccatagacagtcatacttggatgcattcagcttggtagaggcaattaaaggtgtagttctcttaaacagcaactcaaagtactgtaaagatagataaagaaaataaagaaaaataaaaaataaaggtatagttctccagatagattagattccaaacattagagatgggccaggcgcgatggctcacctctgtaatactagcaccttgggaggccgcggcaggtggatcatctgaggtcaggaattcaaaaccagcctggccaacatggtgaaacccccgtctctactaaaaacacaaaaaattagcaggagaatcgcttaaacccaggaggcggagcttacggtgagctgagattgagcgactgcactccagcctgggcaacaaagcaagactccgtctcaaaaaaaaaaaaaaagagattagagatgttccttcctgtgccttgctgatgttctagaagagcacgccccttctgaggagtgttttgtctgtatgtattcgcagctttaaaaatacaaatactgtaaaaatatatatatatacaaatacaaatactggccgggcgcggtggctcacgcctgtaatcccagcactttgggaggccgaggcaggcggatcacgaggtcaggagatcgagaccatcctggttgacgcggtgaaacccccatctctccta

SEQ ID NO: 586391 - DNA, 4001 bp, Homo sapiens
tggtcacagtaactgacagcgtttttattttttaatttttcactttttgagacagggtctcactctgtcgcccaggcagtggtgggatctaggctcactgcaacctccacctcctgggttaaagtgattctcgtgcctcagcctcccaagtacctgagactacaggtgtgcaccagcacacctggctgacttgtatttctgataacctttttttctttttcttttttttttttttttgagacggagtcttgctctgtcgcccaggatggagtgcagtggcaggatctcggctcactgcaagctccgcctcccaggttcacaccattctcctgcctcagcctccagagtagctgggaaatccaggtgcccgccaccacgcccggctaatttttttttatttttagtagagacggggtttcaccgtgttagccaggatggtgacctcgtgatccacccgtctcggcctcccaaagtgctgggattacaggcgtgagccacccagcccggccctctgatagccttttaaaaatacgtttaaatcataaattggcaactccatgttattcccgaaattgtcctggtgtatcgctggctacatcagcaagggtatttttatttttctcactctagtatcaacttagccaatctgcagaggctgatgtgttcccaacttaaaggcttaagagagctaaaaaacaaaagaaaaacaaatgagaccagctctcatcagaagtagcttcaggaaaaaatctctgagacaggaagcaaaaatatgcctgtaaatccaatcaaggttgagatgaaggcaaagctggctgttatcggcaatattaaaacctggaaaaataactctctttatagatttagcgcaagagataaagaaaaatcaaactggaatttcacagggtgcctgtcccactaaggaagtctctggagatggacaattctgaggggcaggaggacaaaatcaccggctctgccacaagctgttcctccgatccagaccttgggaggtctgactggtcagctctggggacacgtagacccgcaaacctgccaccgggtcttcggtttttgccgtacccccagctgctacactcacagcacacccagccataacggagtaccccatgtgccctctcccaccctctcagatttctggttgtcatgcaaatgcctggctcccgaagtgagctccaccctgtcccctttttcaggaaagaaaaggggaggcgctgggctctcagaacacttccagggcactcgggaacccctccctcggtggcttctcaggaacacacggacaccctcgctggaacttctgcacgaaccggtggcacagcccgacgatatctcccacctcgggaaccccagccacgctcccgcgccgctcgccagccccgccccgggcgccctcaccttcctcgctcacgtcgtccacgaagtcctcggggtcgctgaaggagggctcgtccgcgtcgccgttctccagcgcccggggttcggcctcggccgctctgccctcgtttcctcccgcgtcctcggacaccgcctgggcccggctgtcggagcgctcgtcccgagcctgctctcctggggcctcgccctgtgccgggacagggggctcagcatgcgacccgggcagctcctcggcggccggcggcgagggcgactcggacgggccggaggccgcctctgcctcggccgccggctcggtcctcacctcggactccggcccggcctccgcgatccccacctcctcactggaggcctcggtccccgcggcctccggagcgccgggccccgcgggccgcagcagcccctcggctggcggcggctcggcggccggctgctgctggccgggctcggcgcgctcctcggccgcctcgggcaccgccacgttctccgcgtcctgcatgggcccaacgctgcctactcgcagggctccgcggccgccgcgcttccgactctcccaggccgcaccgcgcgccgcgacggctacagcccagccatgtgcgtgcgacggggaggccgcaccaaggccgcggggcggggggcgcacccacgccctggggcctcacgaacgaccctgagaggactcgcatccacaagaccgcgcccgaaaatcatcaaactgatatatttgtgacaagaaagtgcttaattccattcagcaaggttgtttctgtgcatcagtaaactcatgggagcattgaccaccccatgtgtggcagcagatggttccgtccaacatggcgtcctccccctttcctttcccgtcggacgctgcggggcgggactgaactatttgtggagctgaaggcggggacaagaaatgattttagtacccggaatgctaggaaaatgtcctctaactcaacagttaataccctggaagagtggagactcaacaggcgattgctcagggcgtctgagcctttcgctagggaaaccgtttagtttacgttactaaagtcccccctgtccgtgtctgtcacttggactcgcctactgactgagcaaaaggacagactacttcaaaatagaaaaggaattcggggcgagccagagagggcccacacgactagaaggacgactgcctggcgcgatacaaaaatgtatggaagtttctttaatcgcttacccccagtccttccctagcggccgtcactgcctgtttccccccattcgggctttcacagtggttcagtccatccgaggccgccgccttcagcgcgggacagcgcgggtcacgtgggggcgggggcgggtcctcgccgcgtggagctcgaggctgactccggagggaccggagcggttcgctctgcgcgggtgctcacgggacgggcattgggtgcatgtggcttctatcttgttttttgccggagtggaggacaaccactggttgggggatgtcttaatcatcctagaaaacaacccagtggatcacgcctgttatcccagcactttgggaggctgaggtgggaagatcgcttgagcttaggagttggagaccagccttgccaacatagcaccaccaccccccgcacgccagccctcatctctacgaaaattaaataaataaataaaacaggtggtacccagaggctggggtggagagtggggagtgtttatcggggacggaccttcaatttgggaggatgagaacgttttggagatgacggtggtgatggtacaacatggtgaatgtacttgatgccactgaactgtatactaaacttcatattaaaatggctaggccctgcgcggtggctcacacctctcttcccagtactttgggaggccaagacaggaggatcacttgagcccaagagttcaagaccagtcagggcaacatagcgagaccctgtcttcgaaaaaataaaataaaatgccaaaaaggtaaattttatgtatatttcatcctatagtttttttgttttgtttgttttcagagatagggtctcgctctgttgcccaggctagagtgcggtggcataatcacagcgccgctgcaatcgggaccttccagcctcaagagaatcctcccacctcagcctcccaaagtgccaggattacaagcgtgaaccaccgcgcagggcctagccattttaatatgcaatttagtgtacagttcagtgacattaagtacattgccaagtacttgggactgaaggtatgtgccaccgtgcccagctaatttctttatttgtagatagcatctcactgtgttgcccaggctggtctcaaactcctggcctcaagcagtcttcctccctcagcttcccaaagtgccgggactataggcatgagccaccacacccatcccatcctaacggtgtttaaaagagcgaaaaagaagcagagtcttcccatgcctagtaccaggtttgactactcctcatcatgctgtcagtggtgtatctttgggcaggtcacttaatgcctccacctcagtttccgcatctgtacaataagggatgacaatttttttttttttt

SEQ ID NO: 586392 - DNA, 4001 bp, Homo sapiens
aatcccagcactttgggaggctgaggcaggagaatcgcttaaacccgggaggtggaggttgcagtgagccgagatcacaccattgcactccagcttgggcaacaagagtgaaactccatctcaaaaaaaaaaaaaaagaatacacatgtataaatgaatatgtaaattcaccaacaagtttttaaaactacttctgaaagtagcaatactttatgtagtttcacattaatatgaagccaaatagaaaattccaagtaagtgagacatagaagatgcttaacagtaaagagactttctattaggaagttcaagtgatgcacagtgctacctaggaaactctcctatcagtttttggagtacacctggggcaaatggctaatattttcatctgctgtggagatttgaaattaatagcatcttaatagaattttacttctgattgttcctggcacccccaaatgtcaaaatttgacaccagaagagctggcaaatgtgtctgaaggaaatttttttaaatccccacactcagtttaataaggtcaccttattgtagtcccaatgcaactaaaacttaaattgaccacgctgtttaagaagaatttttctgggtacttctgtgaacgttttttggaactaggaaaaaaaaaaaaaccctagttattaaatttcgaaatgacttgagaacaaatttgatgtttagaaacctaacccaaaggcgataatttcatgtcatccaacatttacttctttttttattagcaaataaaatgttctttggaatgacaatagctccacctacaccggcacacttccacgttacagtatcatgaacattagctacactcctgccccgaaacaagcttttgtctgagccgttcccaaaccaaggtattaaaagtgatcattctttaccaaacaaagatacttttggactgcaacccaggagactgaacacctcagtgtgtattattgtggtgttatcctgggaaagtaatcctttctgcaagaaaacacaaagcccaagtgtgtccttgacaaacagcaagatgttcatagcctatattctaacgaggcaacttgtatttaaaaaataaaataaaaaaaagtgcagagtcctggaattaaacaccatgagctctctattcaaagatgtttcttttaagcaaagtgtttcaattatacatagttgtctgcatttgacaacaatcaggacgacgctaaatgcggttccttctccagatcagagcgagaaaccaaggagaaatgaaattgtgccaaagagcacgtagcacctgtcaaggcactgtgacccaagaaagattaatacaaagaagctacgatggatttatctccttggtctccccccgcccgcaaggagtcgtaccatccccgggccagagccgccaaatccctgcctcacacgtaaggggaagggaatcgcccctcttggctgccgaccttccccagtcggccggcctcgtggcgaaggggccaggggcctgcaaggcgggcaggcaacagagggccgcgaaagaggccgggaccggagcggggcaggccgtgtggcccgtaccccagcgccacagctcagccccgcactggtcctaccgtaggggggatggggctggaagcgggcgctcgtctccgggcatcggcgccgccgcggccaaggcagggcaaaaaccaacacgttgtcgttggcgggaggcagtggaagggatccgccccgcaagcaagaccccgggagcccagccgccgccgccccgtctccgagcgcgccatttccaggccccggccctccaggcgccgctcctaggcctccgcgggcccccgcctcccgccgccccggctgagcgcaggacggccgccaccctgacggccccgactccgccggtcccgcagcccccgacggggcccgcgcacgcccgcctcaccctctgccgccgccgaagctgctgtaggcccgatcgtcgtaggtgtcgaagtccgccatttgccgtctccgctccgagaggaaccagggtgagcgaggaaggaccccgcaatataactccccccgccccgccgccggggctgtccgccgcgccgcctgatcgcaaatcccttggacgcaggcacgcgcacgcgcgcgcgcgcacgcacgcacggacgctggccgcgcagcgcccggccctgggcccaccggcagctgcctgccccgtgcgctctgcagcccacgtggtgcggcggcgtcccagctggacgcctgcccggcctacgcggcccattatgtgctggccctggggtgcgcccgtggctgcctcctatccccgccgcaccacgcccgtgcgcgccggcctttccgtccgtcggcgggaggtgacctggagagctggggggaactccctctccagttcgcctgggacgctgcctttcggcctccatacatggcggggacctcggaggcctgtcccgcttggacccccaagtggtccccgggtgacacccaagtaaaggccacctccttctccaggcaggagctggccacacgatgaggatgccccggaagggggtgcgaggcggtgggatgcagacacgaatcctgccttccagggcttactcgctgcctgggtattggggggttttgagaggagagagtataggtgatcggtgacttagcaagagagactgcacatctcggttttttgcagaagtcgttgccttggaaaaagaattggatactgttgtggattccatcatctagcaataacaaaacatggttatgcagtgggaattaattacacgggtaaatttccaggtttgtgattgagatggtagtaattgtggatgccacgatgttgacaaaccttaattatctaagcacactttgaaagaacctcatagaattttgttgtgatgtgtacctaggtatcttccgcttaaccattactttttattatgtatttattggttcgttgttgagacagggtctcgctctgtcgcccaggctggactgcggtggaacagtggtagctcacggcagccttgacctcttgggctcatgccatcctgccgccttagcctctggagtagctaggactataggcgggcagtacctcgcctaatttgcatttttttttttttttttttgagatggagaatcaggttggagtgcagtggcgcaatctcatctcactgcaacctccacctcctcggttcaagcaattctcctgcctctgtctcccgagtaactggggtgacagacgtgcaccaccacacccagttaatttttgtatttttagtagagacagcgtttcaccatgttgcccaggctggtcttgaactgagatccacccgccttggcctcccaaagtgctgggattacaggcatgagccaccgtgcctggctctaatttgctttgtaaaacatttatttgtagagacagagtctcactatgttgcccaggtttgtctcgatctactggcttttaagtagtcctcctgcctctgcctcctaaagtgctggaattacaagcatgagccactgtgccctgccaacttttatatttgagtatcttctccttcatagcagtgttaagatggacagagcattatcaattcatgagttaatagtgttgaactcacttattcatttttctgtgcctttttcttcccaagtaataaaacactttgctgcctgatagacctagattgaacctaggctcagttaacgtcttactggctgagtgacctcgaggacgttgcttaaccgctttaacatgcctgttttctcatctatataataatgtcacctacctcttcagtgttgtaaagattcaaattagtaaatatgtaaaattcctggcacacaatatatattggggacctaccaaggtgtctggcaccattatgggtgctttacctgtagataataatttccaaacctgtttaacagctgtggaaccacccagagagaaagagacttgcccaaggtcacctagttttgaccttagcacatggct

SEQ ID NO: 586393 - DNA, 4001 bp, Homo sapiens
cgaatgtggtattgaggtcagcagggcttggagggatcccagatgggaaggagggactatcccactggggagctggaagacctcagatagggccaggtaggggctggcatttgagtccctgctgatcctggctcaggcggggcagcccactgtgccgcagggaactccaggctgggggcctggaacacctgggaccttgccctcactttgtgaagattttgctgggtggtctcaggagtgagtcccttcccttctctgggcttcaagttccttatctataaatgagaaagttgggttcatgatcccgaaggtgccttccagccctaatattctaggcaatattcaaggcagcagagcaggacagagctaacagcagcagtggaccaggggctggggcctgggcagggagcagcctgccctggggaccccatcacctgccagcctttgtgggaaggaaagagaaagacgtggagaaacgaacactggcctgtgagttagaggagacctatggccccgatctgactctgaatcaccatgtggccccccgggcctcagtttccccacctgtaacatgagacagctgcaatggataagacttgagggcctcccaaattggagatgctacaagctgttggcagggccaatgctgtgcgtggaacccctccctaccaagtcctggtgaggctttcaaataatgccttagtggcaggggtgagggggcaggatagagcctgggaaatgaggtcctttgggatccctccccagagttcagttcaacttgtcttcctgagatacctccctctaaaagctgtggagaggtctggggaaccatctgaccacgagcagaaaaaggcaagccttgggaggttctagacagattgtctgtccccccatgtaatgaaggagagaacccgaaaattcccagatgccttcctcttgtggtccattggaattggcagaacataaggaatacaaccactttaaataaattcagtgtatagaactcttcaatatggaagacaagctatttattgaggaaacccacagtctaaaatccagacttttcagtgtactgtgttgcttaacaatagcgcctccttctggtcaagttagatattacaaccgagctctattagacaaagaaactacggaacaggacctgctaaatttgaaaactgctgagttggagtcccagaactgggtgaagtacagtttcccaaatccaaagtacagttgcccagagaggacatatctgctatttctgaaaaatgctgcagaaaaagaacttgtccagctaccttcccaatgcagaatgaaactcagaaaagacacagcataactgggtcaccaaaagatctggcaagccattgggatggagacctccacctgcctattcacctaggcattcaattcaacatttgtatatatttttccagacaagaacctgcttcaaatacatactgcaagtcaatattaacctacgtgacctatgccgtgttattcacatagtggttttacgctcaaacactggaccatatctgatcacaaaagtggtggaagatgaagtctcctctaatcctcagggctgatcctggcttgtcagggaaggataatgggcataccccgagtatggccaccacctacttagactatttccgggtcccccggcagccccaggctccttttgtccaattccgaggccacccctgcggcctctgtccactcccttcatctgagggcagcaccattgaacaagagtcaatccctaagaaacgcttatttctgcaggacacctggctctgtctccatctccttccaggcacacgtactcacaggtcattaggaattgttcctgtcccccttctctgcaaccccctgcggagagcatgaggaacaagagcatgccttacttgtgtgtcagggcccgccaacgacctgatgcaccagcgaggaataggctggaggattcctccctgctgggctcaaagacatgttcgcctcattccagcacacagaaggacagcctgggtccggacaaactgtaggacaaatggtcgccaaggcagctgcacctgcacagagacagaggggaggaggttgaggagagatggagcatcgcctcctgcagccgtctcagctgctggaagaccccacctgccggagccaccagctgtcagtcacacgtgtcggactgcaggtacgtcacacctcaagaacaaatcagagaggctggggacttcctgacacacagagcaggctgacacacagagccatgtgccagccgggatagaggggagaggagccaacagcagatgcaagatatgaactgaactgcagaccgagggagttgccagacctggggtcactgcaaccaattccagctctagtcacttggcggtggcccaggtgtttggggtaaaggtggggctcacttctggggctacagccccagagcctctggggctgttgggtccgtgggaaccttccaggcacatcgcatccaacatccctccaggaggtgaaggaagatgaaacaacagctggactgattaggtagagaccctgggtatgctcaccagaactgctccacccctggcagggccctctccctggcacctcccaccccaactgcctgggagcagagtatgccaaatgccaggccaggccaatcactgagaaggaaactaagtcaggaggcagaagcctcaggcccaagcgcagctctgtgctggtctgctgagtgacagaccttgggctggtcagtgaactatgccgcccacaggtcaggtcattcgtccacccactggatcaatcccaggaagctttacgcacccagccctggtgctgaggattctccaggcctcatctcatttcaccagcgtacttgcttccttcaccacgaggtggcacctgatccccattttgcagatagggaaactgaggctgagaagggaagtcgtcctgccagggtcgcacagctggggtgtggtgcagagcccagccccatgaatgatgcttttgcatctggagggcaggaggggaagtgctgtggggtgctggtggggtgcagggaccagaggaggtagtgtctgcaagacaaaggggggttctaggtgcaaaggggttcgcgaggttggtgcagaggcggggggttggtgctgggctctgccgcatccgcgcccctggaggctgagggagcctcaggaggccctagtgggggccaggaggggccccccggtctgtctgtctgcctgtgccccgctcccacagctccagggacagagtaagtgctagaaggcgaacaggaacctgtagctggaggaagtgtgtgtgtgcaaatagatgagtgagtggcatgtaattacctaaaattgtgggttagaagcagatgtaaataaccaaaaaatacgtggggaagtggggggatgctcatcagttagagattattacttaaccactaattgaaataataatggtgtgtatttgaatatgctaatgaggttgaacctgtgttggaaaaggtaactgaaataaaataagaggaggcttccaggcccacacccgctctgccccaggcctttgctctgtgagccgccctgccgtctacccagcccgtgcctgcttcctttgcttggtcctgcccaaggcccctcccagggcacccatcagccccagggttgcccctgcttcccgcgctgggagggcagatgctgcgatgcagggcgtttgcccaccagcctcccgcaaagccccagggagaggcaggaacgcatgcttgtggagtgcctactgtatacccagcccagctctgcaaagcactccatgttatagactaggagacaggcgtgtgcagccagcctgcagtcacgtggaggggtcgggccaggacgcggatttccagctgctctcggactttccagcaaagccatccaaaagcggaacagccagacatcacggaaccaccgtgtcactgtgagcagaggcccagaccccttgggagc

SEQ ID NO: 586394 - DNA, 4001 bp, Homo sapiens
atgtaagcaaagggcagccatgggacactggtgacctgtcacctctcccagatggcccagaaggaactggtctcctaggtaaattgacccaaatcataccaggcaaataaatgctacaggaatgagatggtgcatcacacagtaacataaaggggcaaccaatggggcattttgtgatgggctttttacttagctcaaacttcccaaatggcgttattaataattcacccaaccaccccaaaatgccttttcaatttgactttaattattgtggtgattgtttaattcaactacctgtggtctgactccacttgacagactgacaggctgatgaaaccatcttcccctatatactcactctccttccacatatgaatgcagcaacaagtacatcgacatgcatgaaacaccaaacacttgtcagttcctagctggataaacaccggcaaggtccttaatattttggcgactaaatttcctcatctaaaacaggcaaaaaaacttagtcccattagggctgctggaagattcaatgaattattatatctacatataaaatgtattgagcagtgcctggcacacagtaaatgctcaggacagattgagatggggctgcagcatttagcggacccatctgaaaagaaggagacaatgaacttcagggtatgatacgttcttggctattcccccaggacagggatcttgctttaccctaaaatgcctgattatcaaagtgttatgtgtttgtgcatgaatgcgtttttaggtggggggagcagagaggaggttcatagctttcacattcttaaagagttccatgatccaataatagcttaagaactactgttttagattttttttttttttttgtaaacattttttactgcttccataaaaagctggtttcttctctcattcttaccaacaggtgccagcacttcgctcatgtaaagtgacactagtgggggagagaagaggccaaggcgaaatggacattgactctaacgagctgactgtcacttaatgcacatcctctagaaaccagacttcctcaaaatcgagcatcgaggtgtactgaggagtgtggtgcagcaggcagagttaacatgcacacaagctcttccagtcaggcagaattctcaatgtatccagccatctggagcctcatgggatcagagagcagcctacatctccagaaaggcattcagctaacaaacaggtcactgaccttgtcaagtgaccaggtgtccctgatgcattgtcacccgcagttaggaaattctccctctcctgcaacgtcagccctacttctttaatagacagagtagaaggtctctcccagacacccagtcgccctcaccctgccttgagtcttctataggcgaaagctttctagctcttctgtttctgtaaccattcatcacaggtcccatttaggataaagtaaattctattctagagccacgtgaagacccacagcattctcctgtgcaaaaggacattttttaaaaaggacaaccaataagatttctcttgtttgactatttcatgtgcatttcttcataaaccagatgcttcattctcttttcctctctccattatttgaagtcaagtggactgtaaatagaagacatcaagtgtgctatgacactttcaggcacataagacaggaaatcacattttaaaaaaagtaacatgatgaatcctcaaaatcaggagacaatcaggggaaaagatcttaggcagagatagaagccccaacttcagcccccactctctgcaacccaagccaatggcattacctttcctctccccgttcagaatgattataactcgtctggaatcctgctcggtgcttgggttgcatcttgccacatacatttttaagtttgcagctagaagggtccctacaggcaaagagtttctcgttccccacgctgcccctccattgcctgtttatagtactgctttcttgttcttcctgtttctacccaacgaaattgaaaatttcatcaccagtgtcagaaaattaaaccccagggagcagagcaatagctcagagcatccctttcctggcagagagccaatccttgaatataactttgcaaaccctctctggtttttcaggggtttgaaaggatgcaaaatagagtcattttgaagcatgctttttgactgctaaaatctttccaattgcacttcactttatctttgcaattaattaaaaaacatatttcaatttggagacaggtttcataaaaggaaaggacatgacctagctcagttacacattttccaagcagagaacagtggcacacggagaagagatgcttcattccgtggctgggggtctgaagaagtgtttgacagaccattgtaataacatctctcttcacaatgcaaacaccagcaacacaatcaagcggctccgggctccgtgcctgcacctttttctctcttcctagcaatacacagggttgactcttattattaatgtagctttaaaagcattttctcttgaaatgcatcaacacccagggaaataaagcagaactctgctccttacactaatcctaacaagacaaccaatgtccaagtataatgtacagtcagctacaaatcggatcagacccaagcaaagcatgcagtcttttgaattcagagtctcctacatcatgggaacccttgaatgcccgctcctccatgtgcttgttccaattcagttttctcggcagacaataggacaaagctacatttagctcaggctgataataccggtggacacatgtgtgagacggaggtttactcaccaagctcccgtaagtccatctttcccaaccacaaatactgattctaagctgctgccaccacaaagcgacttagagtcgtccccctgaagaacaatgtgctggaataccaccagatggttcctgagtaagcttgttcatgaaacaggtttccagttgagccatgtgaacagagacccgccgcacacctttaaatggtatacactccaagtccagaagaataagcatgtagctttgcttatgtttatggagctggagcccagggatgctccgattggcaggagtcggggaaagatcagccaatcaaagggcgcctccatttcagggaaactcctgctcatttatttagcatcttcagagatcatcggcttttccaggaagagcttttctcttagagtatcacaagagaaaaataataacttcgtttctattttagtgtcctatgctcttttgtcaataaacccatagctccccgtcttggtacttctcaatatatcccccactttttcttataaagaactaaaaaacaaataaggacaagaagaaaaagaaaaagctggtgatgggctggagatagttcatattcatcagcctccaccttgttgggagaagtgggggagtgcctgggctcaataattaccgattctgttgccatagaaacagactggctgcagcgagttggattcgtgcagaacatctgctgccagacccataatcaactgcaatctcatctcttcccctctctctacttttatttgattgtgagtttgctttctcctaccttctcttcacacacagtttttgtccagaaatgtcatagaaccacctcgcgataccttgccatgtacacacaaggcatgcacaccaggggtgctcacatactcaggaatgcaagcattccagagcatcccagcaggggtcccactgggaggatttatactctaattcctacccaggatgtaaacaaacataaacagcctctacccctaattaaaattactgcaacttttaacctagagaattagaggggtatctttaaaaatatttgttgcctaacagccctgagagctccgcaaataaaagttaaagtttgcaatggtattcctcagagggcactgcggtggttcctagccaacctttggaatgaagcgattacactggcggcttgtggaagattttgtaagtacggagtgt

SEQ ID NO: 586395 - DNA, 4001 bp, Homo sapiens
tcttagattatctgaaatcttaaccataacgaattaggcccgaatcattcaaggccagcggtgttgggaagcccatgatccagcgcggggggcatcccaaatatattcactgagtctcgggagccgtccagggactctcagagctgggtcactacctgggaccaagcctgaggctggtcctttaggtcaaggcaggtcccgacccgcctccaacttcaaatggccccctaggcgggagagggtcactgggcggggagttcctggctgtgcggtcacacacacacacaccgactcacacacacacccacaacaccccccccacacacacacactcacacacacaccgacgacacaccacacacacatacatacgcgcgcgcgcacacaccacacacacacacacacacacacacacacacacacgccgcctcgcgcgcgctcgcggcacagcaccgacttcccaaccccaaacacacgcgcgcacccccgggacagctgagttctgtatttcctcttcctcaaagcgactccggcgatcgcagtcgccactctccgctccgattcccgggccccctggcatgccgccgcccccttctctgaaggcgcgcccggtgcgtcccctctccgaagccgagatttccacgaagctccacaaagctccccgccgcctctctcggtctcggcggagaccccggtgtgtccccgggaggagagtatttactaaccagaacctcaggggctcccggctgcccagaccgccctctccggccctcctggcccccattcctctggcccatcaccgccccctcccacgagcgcgctcgccgggggattccctcccatccccgagtgcaggagaagacgccgagtctgagccgcagccgcttctctagctctataggaatcttgactccaagatcccagccccacatcccccgtccccagtaaccccgcgccagcgtcgcaaccctcccgcgccccccctcccgcagaccctggtcgaaatgtctcggcgggctcccgggccccgggccctgcgcttcatccgcgggcgccgcacctccagcgccccctccctccgctcccactcccactcccgccatccccggagctcagacttccccaactgcagagcgccccgacgcgcccgcagccctcaccctgccgagcgcggcggccacccccgcccgagccgcggcgcccccagggaggaaacaaaagtgtctccgcggcgcccggagtcccccggagcaggacgcctcctcccggccccagtcccggccccctcccctgccgcgccgaggtcagcgagtcggggcgcggcgccagcccaggaaactttacgaacctgcttggggtcgcaggacagcagcggcaagggttcccggcgatcagagctccggcgacccgccaccattgaaggggaactggaggctctgtcgcccagcgtggggccgcggcggcgtgggtggctctgcctctatcctgtgcccatcctcgcccgctcccgctcgccccagcacacgcacttacactctgggtcggccggctgctgcaccgccggctgccgctgctctcacttcctcttccttcctcctgctggccagagacacattttgcatctgcaaggcatccggagatcagccgcgaactctcctcccgagcggacgctgcggagttgcagccgccgcccccggcacctgcgccaggacactcgtggtctgcgcgttcgccttgcgcccgcaccctgcctggtccctgcccactgcactttgcctagggggatgcccacgactttttgaagtccccctacttaaaagacagaaatgtcaaacaccatgcatgcctcagatctgctataaataatatgtgtgcagagcatgacttcgatgagctcacacacggcgtttggaggcactaattaactccgtcaccctcatagcgccatctccgggaggccaaaagcgagtagcatcttttcacatccttttttaatttttggcaaccggttccggatattaaggggaaacttcggtgggctgtttgaacgctactttaagacgtgtttgttttgacgctgtgcctctacccttggacagagtggcaaaaaaaaaaaaaaaaagtttcctccctctccgtcgacatctatgtatttactaaccctgcaattgaaactacaagatgtatttctaaccaattaagccagggacttcctaattttgcataactttgcataaggcaagacgttccacccataatttgatatttagaataaattacttaattcatgcaacctacttaaatcattttcaaagcagaaatcaaaaacgttaactcccagcctagctggcaggagggaagagggttgcaggcgaaccacctgtcctcccccagttcagaaatacctacattggctctaccggaaaagtcaaaggcagttcggcattttcttctaattggcaaaggaaataagtcgggggcagggaggcatcagaatcaaggtggaaaactaagctcccttttaagatcttccccctcaagagccacaggcagctgttgagcacttgaaatgtggctatccctgagatgttctgtaagtgtaaaacagacatacaattcagtatttttaaaatgaatgtaaactaacttgttaagtatgtttatgttgattacattattgcaatacatgagaatagtctgatgtagtaagtcagttggattcgtcatgtgttgggttaagatataagcatatataagattaatttcaccagtttctttttacattttctgatgtagctactagaaaatgtaaggctacacataggctctcattagtggctcaccttatacttttaatgaacagctctgatctaactccttattatacgcatgactctgggaggcagtattagtatcaagagtgcctgggtccagatggttataagccagtaactaaagcagggtgactgcaggaaagcaacttaacttctgtatttcctcatctataaaacagtaatgatataataacaaaagtcaatagcaccaactattaaatgaagtaatttaataagtagtcagtaaatggagcctttactaacgatgctctgagacacttgtagtgataagtatgaatttgatctacaaccttgtagctaaggcatataaagaccttaactttagtgcatgcgtggtgagcactcagtaaacattagctgtcataattgttccctccttgcacagcaattatgcaaatccactcccctgtaacctttggtcccgggtcttcacatctttcctccatgaagtagtctttcagatctttgaagtcagccctcaaattttacctaaacactctcttttgaggattaaccatcctcaattattctgactcttcttcatgtgacatggcttcaagtctctctcatttgagccatcttctcccagaagaatatctgtctctgccctttaaaaaaaaaaaagaaaaaagaaaaaaagaaaaaaaagtagtcttatagattaattacgtaattaaccattagcaaacacaatacagcctgagatcttctctctctctctctttttttttttttctcaaatacatctcagtgttgataggagtgcaaggggaagactggaaattctttacagtgttacggttaggccatgtgcgggaacatggagttgatctttggaaccaaagttcctgatccactttctctaagtcccttaggatttaattcaggcatccagtgtctccccatatccatggattacattaaaatattaagatgccacatgacatcccactaaggagctccctctgctaagctgggagaatagcattctttggttcactggttattaataaactgcttaacagtgcaattgccaaacttcaattttctcttctattcataaagacatcttagaagtattgtcaagtgtcttagaggaacccgccttctccctcagctctgctggtggtcagcaatggatgcaat

SEQ ID NO: 586396 - DNA, 4001 bp, Homo sapiens
tcagcttgagttgtttctgtcccttacaattgaaaaactcctaatatatcaacctaaccatatctgtttactgccctgagttccaaacttgtcattaaatgactggaaggcaaaacagactgaagttacacactctaaccttgcagtcaagaggaaatggtcttttgctccccaattctagagcttcatatagctgcaagtccacatctgtgacgtagcgctcagcacctagggcctgcctttcctctgtgggactgctatcagaagtcacgcatggattgcaagagttagtctcactccagcatttcccacacagcaccgcttctctgagttatttataaatgcaatgcaaaaataaagagtcaggattcttggaaaaaactgaatagaataatatccactaataacttactagttcacttactatatacttttagagacaattttatgaataaggtaccattactagcctattttataaacaaggaaaccaagatgtaaagacattaaatatcttgcccaaagtctcacatccacatacggaacccagccagaatgaaatctacatgtctgatttgatagctcatgttcgtaaccactatgccatttttttgtttaatagagatgaggtctcattatgttacctggtctcgaactcctgagctcaaaggatacttcttgctgcagcctcccaaagtactgggattgcaggcatgagccactgtgctgggctctacgccgttcttttcaaagtttcctttactgcaggacttctcagggactttaacgtaacacgtgttctgtgaaatgtccatatgcaatctataatatttcccaaatgtatctgtccagaaaactttttttttaacgaaacatcttgcggcacacgtttctcataggacatactttgagactatttgcctcctcggtttctcagaaagaatcgctaaatagtcttggccagaaatgcaatggaaagtggcagagaaaactttccgttagtcccatattgaattatcaccacctgcatctatgggcttgtctccaggaaagtagcccaattcttttgagtaactctttccaattcagagaacagtaaaacttctattaactgcaacttctactgtgcaaagcaacggaagataaaacagtaaaagaaacagaatacttgtatttgtgatcatttgaacatctcacttcctgctttaaatctgtggtgacttgggacctctaggatataaacttttcacagcctgcatccaggtaccaccggtgcatcctcccccacccaacgagtccctgctccccaaaccccaggcacatccaatggctctgtaagtctgacatggaaaactggttctaccttaagactgccaatggtccatttgcggcacctgctggtggcaatgcgtaaaggaaccccccagactaaatcaggatcatcccccagccagctatggtctgggtaaagaactagagaacttgagaccaacgtttgctatctcttccctcttcataaatggcttgccatttcctgagcctgctaaggtccttttgtgtccagaattggtgcgttctcggtctcactgcctttaagaatgaagcagcgaactgtcgcggtgtttcagttcttaaagatggtgtgtccagagtttgttccttcagatgttcagatgcgtccggagtttcttctggggggttcgtggtctccctgacttcaggagtgataccgcagactttcaccgttagtgttacagctcttaaaggtggcgcgtccggagttgtttcttcctcccggtgggttcgtggtctcgctggcttcaagagtgaatagcgaagctgcaaaccttcgcggtgagtgctacagctcataaaggtaacacggacccaaataataagcagcagcaagatttattgcgagcagtgaaaaaaaaacaaagattccacagcgtggaaggggacccaggttgctgctactggctcaggtgacctgcgtttattcccttatctggccccacccacacatcctgctgattggttcattttacagagagctgattgggccgttttacagagcgttcatttgtctgttttgacattgtgctgactggcgtgtttacaaacctttagctagacacagagtgctgattggtgtatttacaatcctttagcgagacacaaaagttctccaagtccccacccaacccagaagcccagtcggctccacctctcgctttcaccctgtctttgttcagaatgttctctctacctccaatgtcctttccttcccttgggtctgcttcaaaaattcccatctagatttcagtgccaatctcatgcaccagtttctcttaaagatctccctgacctcacggcctcccgtgctagaagtaactgccctgaatctgtcttcttaggcgcttacagtgacctaccagagcacttttccacaccttatcctatttgtttatatgagttctctgagggtaggactcatatcttactcatctctgttgttccagacctgatcagacagcatggtaaagagcaactcaatattttccagacaagtgaatgaataaatgaaccactctttccttaaaaccaaattcaaagattaaaattacaaatgtgaaggattactcaagccagtgatgcatttttaaaatccagaattccttgcacagaaaaccttccggcatttcttcaagcagcagctattcatttgttcccactggacagaaatagaaagggagctgctgagaggtgagaggagggcctattccagattccttttcctcctggaaaaattctttcaaaaacaagatgagacctgagctgagccactcactctcttcccttcactccaagctctcttgcgctttgggaatcagcatttcaactggaaagttcatcattttgcaaactaatgcacacacttcctcccttgttctggttttctggatatttgcttttcaaattccttttcagctgttgtaatgccagtggctgctcccttcctcccagcaagcctgtcactcggtgatgtgtgcagacagtccccagtggaggaggcaaggctcgagcccagttccctatcgcagaaaccagactcgaagccacaggaagtgctggagcatttccaccatcctgtgagccaaacattcaaagtttccaaacctgctgatcaaaaaacaatatgtgaaacttctttcttgggcctctctccagcaacagcagagctctaactaccacccctagaacatttgattgcatcagattaccagcgaaggcccctgcagaactctgggctgtgcctccactgggtttcacctgacaaccctcgtacacagaattagtcattctgatgcataatgcaatgccgcatagccgcctctcacggaataccattaggctctttctcccggcctgacgtccttattcccagaggagcacagacttttatgagggctctggggtcagttgttggcctgggtgttaatcctggttcacccacattgaaaacgctgtgactctggacaaattacacaacatgtgaccctcagtatcctcatctgtgaaactggaatgacagaggtacctttctcatgggattattatgaagataaaatatctataaagcaattagagtagtgcctgacctgggattatcatttgccagacatggggtagctggataaatgaaactgaggaaacacatctgtagtccagtctcatgaaacacacagaagccacactgcatgagaattccttttgctgtaagcatcataaccgaattggacaaagagctatggcactagaaaggaaataataactttgctttaagttcagggagtttttagatttgaagttttgagggcatagaaaagattctaggtgaacgattgtgttgacagaaatcggaggggggaaagttagggtaagattctggaaggattgacctacatttgcaaaggcaggaagtcacagagaattgcctg

SEQ ID NO: 586397 - DNA, 4001 bp, Homo sapiens
aaatatgtgatgtttctgcaggggatctggcctcctaacttaccattattttcccccagatctgtaaattatgggacattaatgcttgaaacaaccttggaaagtaggcatggaggtgagataatatgagaaccctggccagaggagaccccaataatagctgctgccggtttttgcaatctcaaagtgattctgagaaggattatatccctctatgtcccaaagttgctcgcagggttttggtgtgtaaatacaggtcattaattacttttatagaagcaaaagagaaacactcagatattcttccatagcttcatccccaagtcactggcagcgcccaacaggaagcctccgcttctggaggcctcaacccgtcttagattatctgaaatcttaaccataacgaattaggcccgaatcattcaaggccagcggtgttgggaagcccatgatccagcgcggggggcatcccaaatatattcactgagtctcgggagccgtccagggactctcagagctgggtcactacctgggaccaagcctgaggctggtcctttaggtcaaggcaggtcccgacccgcctccaacttcaaatggccccctaggcgggagagggtcactgggcggggagttcctggctgtgcggtcacacacacacacaccgactcacacacacacccacaacaccccccccacacacacacactcacacacacaccgacgacacaccacacacacatacatacgcgcgcgcgcacacaccacacacacacacacacacacacacacacacacacgccgcctcgcgcgcgctcgcggcacagcaccgacttcccaaccccaaacacacgcgcgcacccccgggacagctgagttctgtatttcctcttcctcaaagcgactccggcgatcgcagtcgccactctccgctccgattcccgggccccctggcatgccgccgcccccttctctgaaggcgcgcccggtgcgtcccctctccgaagccgagatttccacgaagctccacaaagctccccgccgcctctctcggtctcggcggagaccccggtgtgtccccgggaggagagtatttactaaccagaacctcaggggctcccggctgcccagaccgccctctccggccctcctggcccccattcctctggcccatcaccgccccctcccacgagcgcgctcgccgggggattccctcccatccccgagtgcaggagaagacgccgagtctgagccgcagccgcttctctagctctataggaatcttgactccaagatcccagccccacatcccccgtccccagtaaccccgcgccagcgtcgcaaccctcccgcgccccccctcccgcagaccctggtcgaaatgtctcggcgggctcccgggccccgggccctgcgcttcatccgcgggcgccgcacctccagcgccccctccctccgctcccactcccactcccgccatccccggagctcagacttccccaactgcagagcgccccgacgcgcccgcagccctcaccctgccgagcgcggcggccacccccgcccgagccgcggcgcccccagggaggaaacaaaagtgtctccgcggcgcccggagtcccccggagcaggacgcctcctcccggccccagtcccggccccctcccctgccgcgccgaggtcagcgagtcggggcgcggcgccagcccaggaaactttacgaacctgcttggggtcgcaggacagcagcggcaagggttcccggcgatcagagctccggcgacccgccaccattgaaggggaactggaggctctgtcgcccagcgtggggccgcggcggcgtgggtggctctgcctctatcctgtgcccatcctcgcccgctcccgctcgccccagcacacgcacttacactctgggtcggccggctgctgcaccgccggctgccgctgctctcacttcctcttccttcctcctgctggccagagacacattttgcatctgcaaggcatccggagatcagccgcgaactctcctcccgagcggacgctgcggagttgcagccgccgcccccggcacctgcgccaggacactcgtggtctgcgcgttcgccttgcgcccgcaccctgcctggtccctgcccactgcactttgcctagggggatgcccacgactttttgaagtccccctacttaaaagacagaaatgtcaaacaccatgcatgcctcagatctgctataaataatatgtgtgcagagcatgacttcgatgagctcacacacggcgtttggaggcactaattaactccgtcaccctcatagcgccatctccgggaggccaaaagcgagtagcatcttttcacatccttttttaatttttggcaaccggttccggatattaaggggaaacttcggtgggctgtttgaacgctactttaagacgtgtttgttttgacgctgtgcctctacccttggacagagtggcaaaaaaaaaaaaaaaaagtttcctccctctccgtcgacatctatgtatttactaaccctgcaattgaaactacaagatgtatttctaaccaattaagccagggacttcctaattttgcataactttgcataaggcaagacgttccacccataatttgatatttagaataaattacttaattcatgcaacctacttaaatcattttcaaagcagaaatcaaaaacgttaactcccagcctagctggcaggagggaagagggttgcaggcgaaccacctgtcctcccccagttcagaaatacctacattggctctaccggaaaagtcaaaggcagttcggcattttcttctaattggcaaaggaaataagtcgggggcagggaggcatcagaatcaaggtggaaaactaagctcccttttaagatcttccccctcaagagccacaggcagctgttgagcacttgaaatgtggctatccctgagatgttctgtaagtgtaaaacagacatacaattcagtatttttaaaatgaatgtaaactaacttgttaagtatgtttatgttgattacattattgcaatacatgagaatagtctgatgtagtaagtcagttggattcgtcatgtgttgggttaagatataagcatatataagattaatttcaccagtttctttttacattttctgatgtagctactagaaaatgtaaggctacacataggctctcattagtggctcaccttatacttttaatgaacagctctgatctaactccttattatacgcatgactctgggaggcagtattagtatcaagagtgcctgggtccagatggttataagccagtaactaaagcagggtgactgcaggaaagcaacttaacttctgtatttcctcatctataaaacagtaatgatataataacaaaagtcaatagcaccaactattaaatgaagtaatttaataagtagtcagtaaatggagcctttactaacgatgctctgagacacttgtagtgataagtatgaatttgatctacaaccttgtagctaaggcatataaagaccttaactttagtgcatgcgtggtgagcactcagtaaacattagctgtcataattgttccctccttgcacagcaattatgcaaatccactcccctgtaacctttggtcccgggtcttcacatctttcctccatgaagtagtctttcagatctttgaagtcagccctcaaattttacctaaacactctcttttgaggattaaccatcctcaattattctgactcttcttcatgtgacatggcttcaagtctctctcatttgagccatcttctcccagaagaatatctgtctctgccctttaaaaaaaaaaaagaaaaaagaaaaaaagaaaaaaaagtagtcttatagattaattacgtaattaaccattagcaaacacaatacagcctgagatcttctctctctctctctttttttttttttctcaaatacatctcagtgttgataggagtgcaagggg

SEQ ID NO: 586398 - DNA, 4001 bp, Homo sapiens
atctggagcctcatgggatcagagagcagcctacatctccagaaaggcattcagctaacaaacaggtcactgaccttgtcaagtgaccaggtgtccctgatgcattgtcacccgcagttaggaaattctccctctcctgcaacgtcagccctacttctttaatagacagagtagaaggtctctcccagacacccagtcgccctcaccctgccttgagtcttctataggcgaaagctttctagctcttctgtttctgtaaccattcatcacaggtcccatttaggataaagtaaattctattctagagccacgtgaagacccacagcattctcctgtgcaaaaggacattttttaaaaaggacaaccaataagatttctcttgtttgactatttcatgtgcatttcttcataaaccagatgcttcattctcttttcctctctccattatttgaagtcaagtggactgtaaatagaagacatcaagtgtgctatgacactttcaggcacataagacaggaaatcacattttaaaaaaagtaacatgatgaatcctcaaaatcaggagacaatcaggggaaaagatcttaggcagagatagaagccccaacttcagcccccactctctgcaacccaagccaatggcattacctttcctctccccgttcagaatgattataactcgtctggaatcctgctcggtgcttgggttgcatcttgccacatacatttttaagtttgcagctagaagggtccctacaggcaaagagtttctcgttccccacgctgcccctccattgcctgtttatagtactgctttcttgttcttcctgtttctacccaacgaaattgaaaatttcatcaccagtgtcagaaaattaaaccccagggagcagagcaatagctcagagcatccctttcctggcagagagccaatccttgaatataactttgcaaaccctctctggtttttcaggggtttgaaaggatgcaaaatagagtcattttgaagcatgctttttgactgctaaaatctttccaattgcacttcactttatctttgcaattaattaaaaaacatatttcaatttggagacaggtttcataaaaggaaaggacatgacctagctcagttacacattttccaagcagagaacagtggcacacggagaagagatgcttcattccgtggctgggggtctgaagaagtgtttgacagaccattgtaataacatctctcttcacaatgcaaacaccagcaacacaatcaagcggctccgggctccgtgcctgcacctttttctctcttcctagcaatacacagggttgactcttattattaatgtagctttaaaagcattttctcttgaaatgcatcaacacccagggaaataaagcagaactctgctccttacactaatcctaacaagacaaccaatgtccaagtataatgtacagtcagctacaaatcggatcagacccaagcaaagcatgcagtcttttgaattcagagtctcctacatcatgggaacccttgaatgcccgctcctccatgtgcttgttccaattcagttttctcggcagacaataggacaaagctacatttagctcaggctgataataccggtggacacatgtgtgagacggaggtttactcaccaagctcccgtaagtccatctttcccaaccacaaatactgattctaagctgctgccaccacaaagcgacttagagtcgtccccctgaagaacaatgtgctggaataccaccagatggttcctgagtaagcttgttcatgaaacaggtttccagttgagccatgtgaacagagacccgccgcacacctttaaatggtatacactccaagtccagaagaataagcatgtagctttgcttatgtttatggagctggagcccagggatgctccgattggcaggagtcggggaaagatcagccaatcaaagggcgcctccatttcagggaaactcctgctcatttatttagcatcttcagagatcatcggcttttccaggaagagcttttctcttagagtatcacaagagaaaaataataacttcgtttctattttagtgtcctatgctcttttgtcaataaacccatagctccccgtcttggtacttctcaatatatcccccactttttcttataaagaactaaaaaacaaataaggacaagaagaaaaagaaaaagctggtgatgggctggagatagttcatattcatcagcctccaccttgttgggagaagtgggggagtgcctgggctcaataattaccgattctgttgccatagaaacagactggctgcagcgagttggattcgtgcagaacatctgctgccagacccataatcaactgcaatctcatctcttcccctctctctacttttatttgattgtgagtttgctttctcctaccttctcttcacacacagtttttgtccagaaatgtcatagaaccacctcgcgataccttgccatgtacacacaaggcatgcacaccaggggtgctcacatactcaggaatgcaagcattccagagcatcccagcaggggtcccactgggaggatttatactctaattcctacccaggatgtaaacaaacataaacagcctctacccctaattaaaattactgcaacttttaacctagagaattagaggggtatctttaaaaatatttgttgcctaacagccctgagagctccgcaaataaaagttaaagtttgcaatggtattcctcagagggcactgcggtggttcctagccaacctttggaatgaagcgattacactggcggcttgtggaagattttgtaagtacggagtgttcaggcccagctcttttctgcattagcacctcatcaaggcgccctgaacactagggatctccctggatttcctcagcccattttcatcccctcagactcctcccctgcttgctccaaattccccgggttgcatgactagaattaatgtcaccaactctgaatgtgctgccatctctctccttagcagcaggggtcgccactgagcagtgaatggctgcacatcctggtcagactcgagggggctcataaggtggcaatctcactcaggggtctgcggaagccctcagttccacagagattgatggaaaatggtaagtgtcacagaaggcaccgatttgggcttatgttagagagaaaagaattactctctgccctatcgtcatctgccttggcatcataacaacctcaaggagaaccttctcttccttaaaggtctctgcaagcctgggaccctcagcccgtaatgacccagatgaggcttctgaggagactgggacctgctctttgtgtgtttctgattcttgaagccaagctgaactatccatctacaacacatccactgtctaaacagcaacagtcgccctcagcctcctttcttcctaaatgaagctcagtataaaccccatatccatccaactccaaatgctcagctatagcccactggtgttttgttttgttttgacagtcttgctggagtgcaatggtgtgatctcggctcactgcaacctcttcctcccaggttcaagcgattctcctgcctcagcctcctgagtagctgagattacaggcatgtgccatcatgcctggctaatttttgtatatttattaaagatggggtttcaccatgttggacaggctggtctcaaactcctgacctcaggtgatccatccaccttggcctcccaaagtgctgggattacaggcgggagccacgacgcctggccgcccattggtcttgatgttggatttgtaccttcaagaatatgaatcctggctttccattttgtctctttatgccactaagtgtaggaagaaagtctcacccaggtacagcacccaaagccaacactgtcaatctttctcagctctgcccagacaacattcaccctcagggtggtggatggctcaggttttctctaccatctttctggaac

SEQ ID NO: 586399 - DNA, 4001 bp, Homo sapiens
ggtggtggccccatctgggaagaagggtggctgggtgtttgggggctacacctggggaggaggctgagacggacccggggctgctgctttcaggccctggctcgttgcccctgctggggcccgcctgtgggtacccatgtcccttggcctcatccaggtccagcagcggaccctgcacaggaagctgttcaatctcacggaaacagctgcagctcctgcccaggcccttgactccaccccgtggccctcccgccccccactcagcgtttggttctcatggcaaggaggactcccgaggaaaccagactccacccagacccccctaccaaatgccctcctttttcccatgcccgggagcctcttctgtcctcccccgttggccgcggcatagcagccccacagggcacaccctcaaaccccataaccaactgtgcctgggttggggcacatagcagatggcccagcagtgccccaggatccactccagcctctgtctcagccacactgcctctgccaggagacagacaccttctccagcccgcctttccatgcttgcgtgccacatcgcacacacattcacacacacagatgtacacactccataacacacacagtgacagtccacaccagtgtcacacctggatgccagatcgcccatgtctacatgtgtacatgtctacatgtctgtcaggtggcagacttttgcacacactaaggagcagcttcatatacctcctccaaacatacgcatacacctgcctaaggatgaacctgtgagcagacatatgtacccctccagaaatccctttccctgttcagtgacacagccgggcatctgaacacatgcacacctgtgcatgcacacatacacacacgagcacacagcacgctcattcctgtgtgcatgcacacacacacacacacacaaatgcataccaggagtccctgcctgcctcagcagggagaacacagcagcagcttcccaacctgcaaacccatcctcagcggagccctgaccttcctgacggggggatcccggcttcccaggggtcaaggaacctgctgaggtcacacagctcactgcggttgagctggtatcaagcccaggttccctgtccccagggctggtgtgcaccccagctgtgtccacaggtgtgcagactgtggtgtctccagacccaggggttcccgctgggccctcccccaggatgctctgatccccctacagggcgggcacccgggcacctgagcaggggccccctcagccctcgcagggcagcaaagcctggatgctgggctgggactattctgagtcgagggtgtctctttgacaggttcctcctgggcacggggctggctcctgggaggggcagttccgaggacccagtggctgaggggctcccacctgggaccccttgcagttcccagggacgaaggtctcccccttgagcgtctagtcacctggcccaaagggcccgcagctgtgggcagcgctggggacaggggcgaggggtccttacctccaggccgagaggggtggaggatggacagcaggagcaggaggactccgggccgcggggccgccgccgtcagacccgccatctcggggagaaatgccccagcccgctctccgcacctcgttttatccccaaagcctaattgttgcctcgtcggctgtgagggaaagagggagggagagagggcgggcgggagggcgggagaggggggaggcctgggggagggggccgcggggaggggacaattacgaaaggcccggctcacaagcctcccaggcccgggctgctggactgcgagcttttttccttgacacacacacgcacacacatgcacacaagcacacactcacacacacacactttcccccatctctttcccgctttccctctgcgactgttctttcgctgctggccctgttcccgccagaaagagcgaggggggcctctgccaggacagccctcgggagaggaagcagaagggagggcctggcggccaggccaaaaatcccagccccagccaaggcccgagtggccaggcccccgcccctccggctgggccccgggcccagtgtgaggatacgggccagctgtcccgcgcctcagcccccaccccggccctccagactccccaacacccccaggtctggctagagacaggttctgcccaaagctggggaggggaggcattgggcaggtctgggggtttggggggtgcgatgtctacagaggccggggggctgcaggttgaatggcctggaaggtaggcccgggttggtattgctctgggagggatctggggggaaggtaggggaccctggacagggctgcattctgcaggggccaaggtctctgcctagcgcctgaagctggggaggaggtgttgggtgggtctggggtggatgcctgcagatgccagggggttagaggcaggggaatggcttgggagttaaggccatgttggtgctgtccccaggggcatctggagcacatggaggatcccgacacacagggttctattctgcatgggtcaaggtcacagccctatacccagccccatgcaggccgcagggtctggtaaaaatcaggctggatccccaggtgccctgtgggggaacagggaggtgggagccccccgcagactgacaggcagcccagcttcccattatcactgggtcacctcccatccccacgctgagcacagctagcgcccacaccagtctgggagcttctcgactgctgttctcccggcccctctgggaaggctgacattccgctggtggccaggagggggcggcctgcactgaaacagctgggaccacgttcctggagaactctgcatttctgcccccaggactgagctggacggggaccctgggggattttgggggttggagtgtgggatggaacaggggagggtcgtgtcccccacccctcacttcccactactgctagaggagaagaaatgtgagacctagagaataggagagggaaacttgttccttgtcctaggtcacagccagtcagggaacagcatggaagccacacgccctgtgggcttttccctgcaccacgatggctccgagggatgagttaaagaccccttgtggaggcaggagcactgtggcagtctggagtgccagcaggggtggctcagcgtggaaaggtcaaatgcaggcattggtcaaaggcaggtattggtggacctagaagtaaatttctggctctagcctttctggtaggaaaacctctccacagagcatcagtttccttatctgtctacaggtgatcagtattcctagctaagagattattgcaaagacaaatacaacgtggtcttgtatttctgctagatcaaaaatgctctgtgttcagctggtgctaggactggtgtcaataccacagttgccgtcactcgctctgcaagtactctgcttctaggacagctatcaggctttggtctatacggggccaccccaggaccctggacaaacccttccttttccctgggtctttggagggagcagctctggaattttggaaggtaggggcatgctgggagaattgtcttgaagatgtacgcacacagccagtgtacagctcttacttacggtgtgtgtttatttgggggtgctttgagggtagctgatggagattatgctggggtgaaagcccccccaagccaccctttgttggtggggttaggggctgctcaggggcagggtctgaagctcgatgcccaggatgtgcctgctgcaggggaggggaagtcaatggtatatctgcgtgcctccgcctgcctgggaaggaggaaggcaggggctactgtggggagctggacccctctcttctcgaggcagtgacacgggcaggaaccagctttcagacttgcaaaccgcagtctgcacagagtctttattaattccaggacggggagagagtccggagccagggggagagagtttgcagtggggggatccaggaggg

SEQ ID NO: 586400 - DNA, 4001 bp, Homo sapiens
atatgcacgcatagttctgcgggatggcggcccaagggttggctcactcctgctgtgatctgggcaaatgacccccgcaaaatagttgagggtttgggggcagcggggatccgctgccagctcggggtcaaacagtccacttctaatggcggttcccagccgcagacccgcatggaatgcagttgatgatttctacaaggacatggacttagttttttaaaatcgcagatctatgaaaaaatatatccagcatctctgcagggcccctgcgaatgctgcctctttcccatcagcagcccccaggaaaccctgagagaaggtcctttctatttggggatggcaggtgccgggagggacggctgcctcccttgtcctcgctgtgtgcaggaagggggctgagccccaccactgcgggctggcgctggcaaacaaagtggagccaaggggaaagggcgcctttattttcctccttccctgtgtgcatcctcctgagtcccaccggtcagcgcaggcccgaggggcagaaggcagagcggcaaagggcctcgccttttcttccccgagcacagccgggataaccggatggtaggacaagtctggggtgggctggggcatgcgtccccggcctggcctgagttggaagatcgtagggaaggggatgagagtgtgcacttccgggcccatcttccagccaccacgttcccaccaaaaaaaactacagtgggggagacatgggctaggggctgggaagagatgcgccaaggcggggtggaagacagagaggggagacagggagagaggaaggagagagagagacagagaaagaaagaaggtcccttctgcggtcctaagaagtctgtaccccctagcgaatcagtcctgccgctggactcctggccgctgcccgggccggcgtcagcttcacacaatgtcgcgtgagtctttgtgcgtgtgcgcgggggaggttcgagatgttttcctcccggtaagttcccgcgccagcaccgccccccagctccgcgggcctccccgcggcgagccgggacgcgtggtccccgcgggctcacctgaagaaggccggtccgagtagcgcgtacagtagacccacgccggccagagcatgggctgcgcgcccaggttggcgccggcttgcgagctgtccgagtccgagctcaccgacaggtcgccgccgcccaagccgcgggccttgagcgacccgtccagggggccgccggggtcgccgcctttcttggcgccaccgtgcagcgagagcgtcttggagccgccttccccgtcacccggagagtcgctgccggcggctgggagcggcccgcccgcgccgggcgcacatggcgggttctgccggggctctcgggagcccgagcccaagagctgctccgagccgcccgcgccgccgcctccctccgcaccgctcgcgccgccttcgccgccggctccgccgccccttcctcctcccgcgcccgcacagcaggtccccgcgtcctttcgccggccgaactcgggccgcaggatgttgtcgatgaagaagttggtgatgcggtgcgggtgctggtggttgccgggcgcctgcaggaccgcgggcagcatcagagcccgccggcgcccggtgtccgcttcgcccgggctgctaccgccgccgccgcccgagccgccgccggggctggattccggctgccgctgtccctccaccgccgccgctgcttcgccaggcttggggtcattctcctccatgctgttcacagtaaatcccacactggttctccggggacgcccttccaaatcagccttcggccctcccgcggcgcacacggagacccccgcgcccccaccccgccgagtcttccgagggcgtgcgcggcggccgcggccagggctgaggtcctacaagtcgccggccgcgctcggcgcggagccacctttgaatccacgaactgggttagaaacaccacgagccgccccgctcgcccagacgatgagagattcaacagagccaagtcctcgacttcgccgcgcagccggggtctagacagtcgcagtggtccggcggggacgcgggccgcctcccgggctccccgctcctctccgcgtccggccgcctcgggctccggcgccgccgcctgggccgcccggggcgagagctgcgcgcatgcaggcagcgcgttccccggcgctcacgcccgcccgggccggctccggccgccgccgccgcccggccgtccccgcccgcacgccctagccggccctcgagggtgccgggcgcccgcggtcagcgcgcccgccaccgcccgcacgcacatggaggccccctcctcgcggccgccgccccgctgcgggccggggcgccccaccggcgtgcggccgcgcccccgccgagccccgcagagctccgcggcccgagtcgcatgggtgagagacgcgaggccagggcccggccgggccgggctgggccgcccgcgctccccggccgtccgccgccctcgccgcctcggcctccgcgcgggctcggaaatttccaggccactcggcgcaacctgagacactttcactctggatttttgttcttatttttaacagagccccctcgagtgacgtcgcaggccggtctcctggacacgtgcctcgggccaatggccgcggcgccgcgcgcccacgtgacgctccggccgccgctgggtgacaggagcagcccgccgcccctcctccccttaaagcggccgcgtcccccgctccgggtgcgggagcccaggaacccggagagacccccgaccgcgtctcctgcgctcgcccgcgctttccctgtcgcttcgcggttcaggggtgtgagtcacccggcgacagccccgccaggtcaccccggggcgcgtaggtggacacgcacaggaagatcgctatttttaagatttccatattgtttaccgtggggcgaaatcccacaattccttgcacaaaatgcataaataatattaaatgagctgccgagatacaaagggacttttgtggtccgctttccttgctgatggagaggaatagtgtcactcccatttgactcggtaacccggcagcttcctgtcttaaacgcagagctggcgcgcaggacactcctcctgcagacacttattgtaagtgtgcgtgtgtgtgcgtgtgcagggaggcgcgtgcatacggccgcattccacccggggacagcgaccctcatgaaacatgcttagcgatccgaaagagcgggggaatgcagtatgcggctccatttgcgaagggagaaatccaggagcctcggaggttctaaaggaatcctttttgccaaggagaggaggggtgactgttcagctaagacttcaaaaccaagtcgcccgcccccctctaacttctctactctgattgaggagctcccagaccggtcatctcgttttctttgttttaaaatcctttaaactaattttgccggagagcagggcccatttgaaacgagaattaggaatccaacggcaagggtgggagccccagttggtttctcccctcctctctcttcatcttttctagactttccttccagctgttgtcagaatgtccaactggaagttctgtttcctcttctcttccccctcctccctcgggctccttcccatttgctcttgtctacccaccaaacacccgttgttaccccaggctcgcctgtccatcatttaaaatgcatttttatggaaatgtgtgaattcctggaaacatccgatagggcagctctgggggtgcgggagcatttgcacgccatgagtaccctcagtgcgggggaggcggggaggccgcagcctggcacggacaccctagggctgattggccctgggcagctgcaccgtgctcagcaacccagacccccgcagaggcagccagcaggttgctgccaggccctgagtgaacttggggagtctggcaagcatctccgaggcagcgtggcctgccaggccacctggggcctgaaggtt

SEQ ID NO: 586401 - DNA, 4001 bp, Homo sapiens
agttattgtgagatttaaactaaattatataatagatgtaaagtcctcagtgtcatgcctcatatataataagtatgcaactgttagttgttattattattactgtgcccttcaagaccctactgaaaacattcatgttcttgaaagacttcgaatcaattcccagtccaccatgatgactgtgctgctctgtgctgcatttcataatgcattattttgcacccttgatattgtttgaaagggtctgccctttccgtactttcttcaagtcgcctaatacttgaacaaatgcttttagaataaatgatattatcaagtttggttttgttctataaactaatggtgcccttttgctatagatcttacagtccattggcgtttcaaaccatggaaattcactttgcaactcctaatgatgcaaatgccataaagagaggccagtgagaggaacacacttagggggaacggcagggctctggaagggagacaggtggtgatcccaaattagaaatcaggtcttaaaggggccacaagcgagatgacatctcaaaaagagggtttcctttgtcacaacagatgtgaaaaggtgaatggtcagaccaatacttaaaagaaacttacagctttgcccctgtaagcgatactgtgcagccattaaaaataggaggcaagctaataaaatggcaaataagaacatataagggacaatgttaagttaaaaaaagattcagataacgtatggcttttgatcatagtatgtaaaatttgctttaaaataaacaaaaaacttaaaaggagtagaccaaaattttaatgctgtaacaatttgctaagtttgtgggtgaaattttctttttatcactttcccataccgtttgtaatcttgccatattcttttaaaatacaaaaagtatttcttagaaaatacatattctgcgtgcctctctagcagatgtctctagaaagaaatgagatagcgcagaagacacgccctagactgcagggggctccatgagcccagagcctgactcagcagcgtgagaacaggggcgaacctgggcatggggcactctgcagcttgatcccgccctggatgggtcccttctttacctgccaccgcctcgctgggtgttactgagtcccccgccagcaggccgccctcggtgggcgcagcgcccctcccagtcccggaccatgctatccccaagagaccctcctcgcgaaagatctctctgggagaagggaggagctgcaaggggccggaaagagttacagggcgcaggcctctgcgacctcgccctccccatgcccgcgcggctccctactcccgccccgcgggccgatgacctgtacctcttgcaggggatcagcgccttcctctcgtccagcacccgcacgcgctggttgagcccgtcgtaggagagcagggcgcggctgttgcgcccgctactttgctggtacataacctggcgcccctcccactgctgcggcgcctggcacgggcgcggggctcccaccgcccccaggctgcacaggccgcacagggtccaggcccagaggccgcccagcagccaggcacccagggcgcccgggacggtgcggaggggagcgcgtcctggcatcgcggtcagccttccccggcccgagggcaagcccaagcccaagggggcgctgaggcgtccgggatcagagtggctcccgccggctctttccgcactgtgccgggagtgtggtctggaccaaagtgcttcctgtcccttcggtggcctctgccgcttttgagatccggacgcgcgagtcccggtagccgggaccagggcccggggaaggctccagtgaatcgcgcgggagctatttctgcctgggccactgcctgctgccactgcctgctgccactgccttctgccgcttcggttttcactgctcactgctgccaacaggaaatgcagtggcagtggtgccactagcatcctgggaggcatcgtgttttaagaggggggatggggggagactgtgctgagaagtgtgtttctccactaacttcagtgttcaacaggtaatcacacagggaggggcaagttcaaggtcaagataggaaaagcagagctgctgcgtttgctgtgcaaacgtttgccccgcctacattgcccctcgacaaaattgcaaacttcttcctccaaattaaaagtggaaagacgagtcttttcctgaagaaatgatactagctattcatcatggccgctcctcagctcccattcccagtgaagagtctaggagactagtagacagccccttgcattgggcctaggactcatggacatagcctcaaggtcacattgcagtgagactgctcctcccatcgcctggcaataccaccagccgagtggtttgggtgtctggggggtttcgcttcttcaagaataaggttaattgggtttatagttatgtaatgttaggatctataatatggaatgagcgaggctcacacacctgtagtcccagctactcctgaggctgaagtgggaggatcgcttgagcccaggagttagaggttgcagtgagctatgatcatgccactgcactccatccagcctgggtgacatggcgagaccctgtctctaaaaatatagtgataaagtatgaaatcaagaaaaaagaaaggaactaaaaaaatgtatagcgtctttccatttgaactgcatttcaaggatgattaagattgagccaggtgaaagtgggagataacattcctgaatgaagggcataaggacaagaaaagaataatgctggggttcaaggacaaggtagaggagtactctgaagccatagcactcattttaaggaatttgtcattgatattgaggactgtgggaactatcaatcaatgtaaagctagggaggagcatcatcaggcatatgctttagaaagcccacttagacaacagaaagggtagggccagagggaaggcagggagaggaggaagctactgttatcatcctggaaagagatgatcctgactcagctaaggcagcgggagtggtcatggaaagggtggaagacaggtgggagctgtagagaagcatttcaactcagagagagaggtttctggtttgggccactgggaatccagtcctgagtgaggagagatgatcaattcattttaggattggttgatcttgagctgactgtggagtattaaggtggaaatatccaagggacagctggataaatacttctggaaaccagcagagcttttggattaggaagccataggtacataggtggtaaatgaagccgaagagtagaacagtggttcctggggaaatttcacatccccctccccagcaaagaaacatttggcaatatctggagacatttttgatgatcacaatgtagatggggaggaggctaccgctgacattttgtgggtagaggccaaggatgctactaaacttcctacaatgtgcagtacagccacctcccctctcccaaatgaagagaaaattatctggccccaaatgtcctaagtgttgggggtgagaaaacctggagttcaggggagtgttgagtgtgagaagaaggattaggatggagccccagagagctccagacatttaaaggatgggcaaagaacaggcacttgaggagaccaaaaggagtcaccagagagaagccactgaatgaggcaacttcccgagccttgttaaataaatgtaaggcatggaaagaatggactgaatgctgaagtagggtgttctagaatcacagcctccctggaagtcccgaagaggagggacagttgacaggttttcctgatgcatccttctctgctgccccctgtctgtcgaaccaccagagacactaccaatgggccgaatggggcaggcacaaagctttaggaagaagggctcttcatttcctcttaccttttcttaaagggcatgcctcagagaacatcagggaagcccataagactttgtgacttggtacttacatagtt

SEQ ID NO: 586402 - DNA, 4001 bp, Homo sapiens
cctaatgcattcacttgccccctgttcaccatttccatcgctactacccatctctcacctggaccactacgacaatctccaagattgtgttctcacttccacttttgctccacatggctccattttgtgtccacatcttgggaatgcattcttaaggacacatccagggatctttatataatctaatcacaaattccactgtttaaaactcctcagtatgacccttcgccatgtcctgggcttcagccctaatagtgagtggtctgtggtttttggaatttactcagctctaaaaactccgggatggcacacacataccaggcatggatacacctgcatccccctggaccagcagtctctccacatctccctggaaaacctgtacaggtgttttggaactcactctcatttcagctcctccaggaagcctgggttaggtgcccaactgagttcttctcatcacaaccccagctctcacccctcatcccactgtatggaaattttttttatttatgtgacttcacctccagactctgacctccctgaaagccaggagccattctgtttatacacagtgcctaacatgaacaaatgcttgttaaataaatgaatgaatgtgaacctggtataccataggcgtcagaacccccccctagcttcctcaagcattagctgtgtgatcttaagaaagttgcttaatctccctagacctcagagttattgtctgtaaaatggagatcataaaacctatactgtcaagttattgtgagatttaaactaaattatataatagatgtaaagtcctcagtgtcatgcctcatatataataagtatgcaactgttagttgttattattattactgtgcccttcaagaccctactgaaaacattcatgttcttgaaagacttcgaatcaattcccagtccaccatgatgactgtgctgctctgtgctgcatttcataatgcattattttgcacccttgatattgtttgaaagggtctgccctttccgtactttcttcaagtcgcctaatacttgaacaaatgcttttagaataaatgatattatcaagtttggttttgttctataaactaatggtgcccttttgctatagatcttacagtccattggcgtttcaaaccatggaaattcactttgcaactcctaatgatgcaaatgccataaagagaggccagtgagaggaacacacttagggggaacggcagggctctggaagggagacaggtggtgatcccaaattagaaatcaggtcttaaaggggccacaagcgagatgacatctcaaaaagagggtttcctttgtcacaacagatgtgaaaaggtgaatggtcagaccaatacttaaaagaaacttacagctttgcccctgtaagcgatactgtgcagccattaaaaataggaggcaagctaataaaatggcaaataagaacatataagggacaatgttaagttaaaaaaagattcagataacgtatggcttttgatcatagtatgtaaaatttgctttaaaataaacaaaaaacttaaaaggagtagaccaaaattttaatgctgtaacaatttgctaagtttgtgggtgaaattttctttttatcactttcccataccgtttgtaatcttgccatattcttttaaaatacaaaaagtatttcttagaaaatacatattctgcgtgcctctctagcagatgtctctagaaagaaatgagatagcgcagaagacacgccctagactgcagggggctccatgagcccagagcctgactcagcagcgtgagaacaggggcgaacctgggcatggggcactctgcagcttgatcccgccctggatgggtcccttctttacctgccaccgcctcgctgggtgttactgagtcccccgccagcaggccgccctcggtgggcgcagcgcccctcccagtcccggaccatgctatccccaagagaccctcctcgcgaaagatctctctgggagaagggaggagctgcaaggggccggaaagagttacagggcgcaggcctctgcgacctcgccctccccatgcccgcgcggctccctactcccgccccgcgggccgatgacctgtacctcttgcaggggatcagcgccttcctctcgtccagcacccgcacgcgctggttgagcccgtcgtaggagagcagggcgcggctgttgcgcccgctactttgctggtacataacctggcgcccctcccactgctgcggcgcctggcacgggcgcggggctcccaccgcccccaggctgcacaggccgcacagggtccaggcccagaggccgcccagcagccaggcacccagggcgcccgggacggtgcggaggggagcgcgtcctggcatcgcggtcagccttccccggcccgagggcaagcccaagcccaagggggcgctgaggcgtccgggatcagagtggctcccgccggctctttccgcactgtgccgggagtgtggtctggaccaaagtgcttcctgtcccttcggtggcctctgccgcttttgagatccggacgcgcgagtcccggtagccgggaccagggcccggggaaggctccagtgaatcgcgcgggagctatttctgcctgggccactgcctgctgccactgcctgctgccactgccttctgccgcttcggttttcactgctcactgctgccaacaggaaatgcagtggcagtggtgccactagcatcctgggaggcatcgtgttttaagaggggggatggggggagactgtgctgagaagtgtgtttctccactaacttcagtgttcaacaggtaatcacacagggaggggcaagttcaaggtcaagataggaaaagcagagctgctgcgtttgctgtgcaaacgtttgccccgcctacattgcccctcgacaaaattgcaaacttcttcctccaaattaaaagtggaaagacgagtcttttcctgaagaaatgatactagctattcatcatggccgctcctcagctcccattcccagtgaagagtctaggagactagtagacagccccttgcattgggcctaggactcatggacatagcctcaaggtcacattgcagtgagactgctcctcccatcgcctggcaataccaccagccgagtggtttgggtgtctggggggtttcgcttcttcaagaataaggttaattgggtttatagttatgtaatgttaggatctataatatggaatgagcgaggctcacacacctgtagtcccagctactcctgaggctgaagtgggaggatcgcttgagcccaggagttagaggttgcagtgagctatgatcatgccactgcactccatccagcctgggtgacatggcgagaccctgtctctaaaaatatagtgataaagtatgaaatcaagaaaaaagaaaggaactaaaaaaatgtatagcgtctttccatttgaactgcatttcaaggatgattaagattgagccaggtgaaagtgggagataacattcctgaatgaagggcataaggacaagaaaagaataatgctggggttcaaggacaaggtagaggagtactctgaagccatagcactcattttaaggaatttgtcattgatattgaggactgtgggaactatcaatcaatgtaaagctagggaggagcatcatcaggcatatgctttagaaagcccacttagacaacagaaagggtagggccagagggaaggcagggagaggaggaagctactgttatcatcctggaaagagatgatcctgactcagctaaggcagcgggagtggtcatggaaagggtggaagacaggtgggagctgtagagaagcatttcaactcagagagagaggtttctggtttgggccactgggaatccagtcctgagtgaggagagatgatcaattcattttaggattggttgatcttgagctgactgtggagtattaaggtggaaatatccaagggacagctggataaatacttctggaaa

SEQ ID NO: 586403 - DNA, 4001 bp, Homo sapiens
acccacctcacaacctgttcactgagtcttaggaacatccaaggaaggaagggaactggaacaagctctgacactttcaaacagctggaatgcatggtgtgcacgcagtcagcctgaggaggtgtggaggatgagctaagggctcagaaacctttaggggagcagcttttaacttcggaggagtcaaagaccctttgaagaatttgatgaaagctttggctggtctctccagaaaaaaaaatgcccgcttacatatacagaatttagagtacactttcatggggtttccccaccccctgaaacctatcaatgcaacttcattgggatgaatggatctcagattgaggatgcttttctgccttttctatccctccccaagcaaagcactggtctcagccttcaaccatccccagcatggtgcattctctccccgggtatgtgagctcctctccccctcacaagtatcagcttgtattcacaatattcccaagtattcactggaggagccaggccattcaagcgttcatcttgaggtgaagtctgacccccccaccccttgtcccattgaggaggctctgactcagcctcctctccccctccctgaggagacacttccagtttttcctgctcttttctctgttcctccacccacctctccaccccatttcccactggccttcaggagttttccaagatccttccctcttccgacacttaccccatcttttgggggatccagcagccagcccagctctccctgtgccttgcttgtgtccatcagagtaactgaaagtggggagaaaagaagtctgtcacctctgggggaggaggtgcccctgcagcccacattaatcattctggggcctcagccccaggctgcaacatcctgttcctaaaagctgtgacttcctgaggcttaggggagaaaaagggctcaggactgaggagtgaagagctccagggatttcactcttctttgtgtgtgtgaaggaaggcaggtagagtgggacaagggttggggcgctgggtctttgaccaaagtcaatgcaagaagagcagccccacgagacgctcagttacccaggctgctgcgtcctgggacacccatcagctgcaggattggaacgcgtggagggcaggaggagctcacctctgctagccaggagtgggcagggtggaccggggacctcagaaggggtttcctgggtagggaggctcacctccactgtccgaagcctgctttggcctgacctggccagtgatcagagccgtgaagtggggataagaggcacagctacctgcctgggaagtgggggggagtaaggccggagagggtgttccaactttcacatggaatattcgactcggacaactgggaacccctgtggcgtcagtcctaacccttctcccggaggcagctccctctgtccctggcctaggttggcaggaggcgacttcccaccttcaacttccaagggctcagatctctggggtgggcacctgaagctgggactgtctgggaatgcaggcaggggtgcgggtgcaggtgctacttcctggcaagggtccggaattccctccccactcccaggagcagattgctggcctgcgggagtgggggtgactgacccgggagagcagccgcttggggttaaagaccaaagatgggcctggccagtcgatagcctggcggtcgggcacagcgagagagctggcgagggtctcggggaacatggcccctaggaatgccggcttctgcaggggggtgctggccgggccccgggaaggggcggggcgcgggggttgggggcgcgggggcgggggtcggtaccttccttggcgcgcgcccccgggggcagcggggcgcagagcagcagcaccagccctagccccaggggccagcgccgctccatagctccgggccgggacctgggacagtggcccggatggcagcgccaggttgcaagggactaggagagccgggcgggccgggcgggggcggggggcggggccagcgccgggggcggagtcccggcctcacctggttcacctccttaaagggacagtagggcaggaaagaaacttgctagactggtaatcaaattcaagaaccggaggcgtcttgacccgaatgagactgcgggcgccgcctagtaggtgggattaagaattgacgaaccttttcccaattctaatcctaaactcaacccaatcttgatccagcttttaacctaattctacctctgacttgaattacactcctatattcctctttctgtctttgtgcaggccccagagctgggtaatagggccggggaaggcaaggggtaagagtcatatcttcaccctctagcaggggaggcttagatgaccacaatgcaaggtggggtacaacctgcagtgaagcatctggagattagaagaggaagcaagcccagtcatcggggcacattagttgagtcttcagggagagctggtgtgacctgggttttcagtggcagagattgggaaaggcaccagcaagggcctgaaggcagggagcctcaaggtgcgcccagggagtggtgaatggaccagtttgactgctggggcgcaggatttgtcttgggaatcagggcagaaaggcaggtgtgggccagggctgggtaaacaagaaaaggagtttgaaccttgacatgcacttacacagcagacatgaatatctggttaaggttccagccacaggtggcagggaaggatattttaacccatcttagtggtgtcaaaccacgtgccctctcactttcttgcggacttccttatattctttttcttttttgagatggagtctcgctctgtggcccaggctgcagtgcagtggtgcaatcttggctcactgcaacctccgcctccctggttcaaacgatcctcctgcctcagcctcccgagtaactgggatcacaagcgtcaagcgtgcaccaccacacccagctaatttttctatttttagtagagacggggtttcaccatgttggccagcctggtgtcgaactcctgaccttaggtgatccctcctgatctcaagtgatctccctgcctctgcctcccaaagtcctggaattacaggcctgagttactgcgctctgccgagactttcttatattctatttagtaaatgtttgttcagtttctgctatgcatgcaggaagctctagaagcacctaagaacagaaggacaatgtcttgccctatataagctattaatttggggatgctgggggttgagacataaataattgcacaaatgattgaaatggcgggcaggagtggaccccaggcaaggtacacacagggatcacagtagctcaaaggggagtgatgcatttactaaagaggctgggggtccactcctggcccctccttctttcgctccatcccatctgggtaaattgttcataatttttctatcatttacattgttgcacatttcggtactgtgaatgaagggaggtggtggattataggtgctttttctcattttcaaaatgtaatgcttctcaggttttttgttttttttttttgctttcttatgcagatacgtatatgacaaacacggcccatcagttcttggctcagactatccttatttgcataaataaatgtaattcatgtacattggttaggaaattcatgttgaacatacagaaacaaaatgggaagtagaaccctctgccctccaacactctaatttctgttccccaagttaaccaccatcaactgtttcttgtaagtcctcccaggattgcttcctcgctgtgtacacaccatcgtgtatttttccctccctctctccctctactcccacacttacatgcttttaaaatgtgtatacagaggggccatctgacacacattgctctgcaccagaggcctcttttctaatgttaaagactccaggaaggaggaggaggctcacgctggctggcgggggtcagagctttgtgatttcagcagggaggaat

SEQ ID NO: 586404 - DNA, 4001 bp, Homo sapiens
cgcatgtctctcacctatctctcctccactctctgtccacctccgtttctctttctgacagtcactatctctccttcgctttcggcctccacttctcgctgttcctcgcggcacagggccttggataaactacttaaccttaactaagccccagcctcctcatctgaaaaatgggggcaataatagcaccacccttagcgttgctggatgggtgaaattaatatttgtaaggcgctcagcacaggcctggtgcttggaaacactcaggtaataggtgtcacaatcaccatttcctctttgcgtctttccttctcaccacacctcgtcctcgtggtttttccacccctttggccttcctcttcccctcgttcatggtttttgttcccccttctccgttctctgagctgggcaagcctcccctcactcccaaccccacacctagcctttgatccccagcccagggcagtcctgcccagccagggggagagggtttttctaacgccgctgaatccttccctttgggagtccctcatagcctaccgccccataaccactttcataccagacagagaaaggggggtgttggcagctcactgaaaggacattagggacacaggagagtttctagggctcttggctccccctttaggggaccaggagggacagcgatccatggccaaagaaatgcttggagagaccaggaggtgggagatagactgggttagttagggcgatgtgggggctgtgtaggtcagtttctacctgggggctgtgtaggtcagtttctacccgctcctaggtctcaagggaagcccgggactcacctggggccggggtctagaccgcatttaaagggatggggtgcagcctgtagaaaccaaggagccaccctataccaggggcaggagcagtgggcgggagagcggtttgggggtttgctgtgtgaatgcaaaggaggccatcctgttgcaggagtgtggaactggaggatcaaggtgtgatcgctaaggaattggcgctgggggtcgttttagggcctagcacgaaaagttgtgccttgtctgctgttgcttctccagaaaccttccctcatgtacggcgggaggtgggactgggacagaaactttgcagatagttttgaatagtggggtagggaggaaaggaaaggcagccaggggcgtatgtaatcagcagtgagagttcggggagcccgggcaggggaatgtcccgggtcgtagccagactccatctctttcccaaacaaaagaaaactccactacccgtcgggcgcctcttccccgcccccctcccgttccagcactatcggtccgaagtgtttgggactgcagtgcccgggtaggggtagtcagaggccggcccctccactccgaggcccagatgttgggggggaggtcccaggagtgacggggtgcgcccccccccgcaaggaaactcaccttccaaagctgcggccaacgaagcccagcagagcagcacccggagctccatggcgccgcctcactcgggtaggatccgaactgagtttggggggccctcgcccccccaggtctgactctccctgggcgggtggacgccgatactccgcgcgggactcctcgtcggggccctcagcgcgggcccatgcgagcgtgcggggcaccgggcggcggcgccaagtgtggccccgcgtctgtgccgcgcgcgcgggcggcgggcccggagcgtgctggcagtggccgcgccgggcgggcgcgcagcaagacgtggctggagttggggtccctccggggcctcggggtcccgccccgggtggcgggggctgagccggccgctcgcggtctccccccctccctggagtggctctgctcgcgccgccgggccgagtgctctcctcgcgggcggggatggtgggagcccgagcggggacggagcgggagggagggagactgcggcgcggagccgggcgggccgggccgggcaggggctgagctgcgctggaactgggccgggcggcgccgggcccgggagggaggggcgcgcggggggcgggggcagctctcccaacgcgggggctccgcgagtgagccccgggcgcgctgattggagctcacgctactgaataattcatgagggaagcggagaggggcaccgagtggagcaggtcgggaagttgagagaaagtttggagaagggggaggggcggcgggtgaggaaccccgggaccgcccagatgtgcgccgtggcggtgcgcgctgtccaggaccgagcatgtcggggctggggcccagggacccccgggacaggcccgaacccggctggcaccagggagcagagaaaacacacacccagcagcaacacggagggccgcccaggcgtgcacgtaaatgttcaccgcgcacacaaagcccgctctgaccttgctgcggactctagatgccgctcttggatgcgcccaccaccctctagtgggcgcagggactgcgttttgggggaaaaggaaggaaaagggagtagaagctttggagaattgacggccgcccagggggcctcaaggagcaatcccagtttggatagccttgcagcgaacgttcacacagtcaccccataaacattcagtgttggggacctactgtgcgcgcaaccaagccctgaaaaatgtccagaggaggcgcgcactaagctgcgctagggagtagagaaaaatcgaggaaacaacggtaaagaaaaggtgggtgtggcgggcgcggtggctcacgcctgtagtcccagcattttgggaggcagaggcaggcggatcatttgaggtcaggagttcaagaccagcctggccaacatgatgaaaccccgtctctactaaaaatacaaaaattagctgggcatggtggcgcgcgcctgtaatcctagctactcgggaggctgaggcaggagaattgcttgaaccgggacctaggaggcggaggttgcagtgagctgggagctgagatcgcgccactgcactccagcctgggctacagagtgagacgaaatctcaaaaaaaaaaaaaaaaaaaaaaaaggtgggtgtgtccgagagggtgaggggtccggctagatctccaaatcgcccttctcactctcactctcgtgttttgggggggcttccccgccgcccgcagccatgacccctgaggctggggctgcggctgcggctgctgtctttcctgagctgtttcctgtctggctcctgggggccctcgggatggctgggaggggcccttcctctcactgccaactcccctcaccctcccatcagttagcggggagggtccagcacagccgtgctcctcccaccaacccccttctacttcagggaacttaacagtatgggttactggatagatggattggagggggtgctgctccaggagtcagcccctccaaggggcagaaggaaaggacttagactcccacagtaattagcggggacagattttttttttttttttgagacagagtctccctctatttcccaggctggagtgcagtggcgtgatctgggctcactgcaacctccgcctcccaggttcaagcgattctcctgcctcagcctcccgagtagctgggattacaggcacagggcaccaaccccggctagttttcgtatttttagtagagacagggtttcgccatgttggccaggctggtctcgaactcctgacctaaagtgatccacccaccttggcctcccaaagtgctgggattacagacgttagccaccgcgcccagccggaggacagaatcttgaggagcccagcaagagagacgttggagcccagcaagagagacgttggagtccaggatgcttggggggctgccaagcgcccttacgtcccagaaaggacagccgggcctgtgataacctcttgtcccggcttacttatcttcctgctgcaagaggtgttccccacacccctgcccttccttgctgttctgcctgggtcctgcgcccgggttggggggggt

SEQ ID NO: 586405 - DNA, 4001 bp, Homo sapiens
agatgagtaagtggaaggttgtggaagaaagcccctgagtgccaggagtagcacctgcgtcagcagtgcctgaggatgtgtgtctacctggtggagtgtgtaagggaatgtgtatgagatgaggtgggcgggagcagatgctgtctgtgtagatgggggctgttgctttcctgtggcagaagatgcacatcagtgctggttccggagtggttccatgggcccttcttcctcaccttcggcccctgctctacccccagtctggctgtgagttgctcttggccccaggaggtacttctgcagaaacacctgggctgggagagggagccaagtggggggcggggaggagtgggtaaagaaagggaaacctgaggcttcccaaaccctccagaacctgccatcctccttctacctagagtgggaactcagggtctagggcccaggctcaggacagagtgatagcagaacagccgtcccagaaggaggatcctgcctttcccatgctcagcccaccccagcctgttgctccccagcattctggtaactcagtgtcattgccaaccatctttttgcaccctgaatggagtaatagactccaaacaagtcctccttctgaggccaccaggtaagtacatagacacccccacgctaatcttcctttgagaaaaaaggcccactgctctgaaaagccaagtggccccactgagcagcactcagaagcctcaatgctccaatgccccttacttgggcagcttctgtggtctactaacagccccacacagctccctcccactggtctctcagctcaggaccagcatctcccctcctagagcctcagtcaagttcccctggcgggcggagggcctgggttaactgggaacagacccagcagctccgctccatgggcgctgccagggacattacaacattgctatgctgggtccatgccagctcccccagggatgggaggagagagggtgccagacggccaagatcggtgggtgggggtgtggggcaagcagggccaagcacccagatggagggagcagagcgagggtggagctggggcaggagcacgcaatagaatttggttgcacgttgggggtgatggctgggcagcaggaaccaagcgttccttccacctccaaggcttaactgtggtcatggagctgggggggacagtgccttgtggggagcaggggacaggtgtgtggtcagcctcctgactcctcccagctccaaggggattggagtgatgccactggagtcagaggggtggcaatcctgttccaagcgtggagctccgtctctgcgaggaccctcccagattaggactcccaagccagagccagaggagaatgtctgggaacgcaactgggggatcctaacagcaagggtaatgcggtgtcaatgatgccaggtcagagtggagtgagaggggagtagccaggttgaccgtttcctcacccttcatgaaccccactctggccttgaggaaggatcctcagtactccctcaggaagccacctaggggctgaggagccccactactcttgcaaaccttaattcctctgtccccaagcatactgtccccgacccccacaacgccgcctgctaaccccgcgggctcaccttcccgttggccgcagtctctgcaggtctgcgccccccgaggcctcgcagtggacccggggctcctggagctcgcacggtgccacccgcgtcttctccagtccggggaccccgttgcacccggcccgggtccgttcggcgccgagagtccctgggattccggggtggacctgacgctggcggcaggggctgctccagaggtggggcgccgggagatcctgggggcccgcgtcgagatcgccgtcgccaagctgggtcccgggtcccgccgcccgctgctgtagagccgcggctggagcgaacgcagcccggcccgccccctccgcgtcccctcccaagccggcccggcccgccccttcagcccctttggccgccttcccactcccttcttccggggagccgagcccgccctcccggcctaggcggtgagtgcgcggcgcccgctcctccgccccggcgcgcgggggagacgcggggcgcgcccggggccccgcctgtgcgccgggaagggggcggcctcctcccgcgggtcttggccgggaggatcgcacgcgtggggcgcctgcaggaagtgggaagggaagaggctgtctgtaaagcccctgcctgggctcgggctcgggctcggcttgggtcggacacccgcggagcgaagcgcaactggcggaccgtggcagttcagggcagggcagagccctgcacacaccccctcgcgcctccctcctcttcggctttaactctaggaactaaaacagtggggctcctactcagcttggaactaaggtgggcgtgagctgagcaagagagaaggaaggaaaagcagggggtggagggaaagacaaactgagaaatctgggagagtacgggcggtggtagggggagccgaggcagcgggagaggggggcgtctcggtatgaaagcgtcgccgtgctagccgggaactcttttctcttttcgtgtctggatcttggtcaacgttggggcttctgagtcgaacctccctccatctaccctccccaaggggcagggcagtcgggttgaaaaggggaagcgctgctgtacgcctggctctgacatggcttgggcaagtcgctgcacctctgggtgcctcctccctcgcccgcgctccggagagaacctccctgcagtgaggaggggcggtgcaaggtgctctcagctggcgcctggaggcagggttgaggaaccgagggggcgccgcgaggaaaagtgtttccgcccacctctaaccccttctctagccgaggacggggatttggggtctattgtttgggtcctacagagctgggctggggccttgccacgaagtgttgctaccacctgctggtttttctagggagcacaagcacccggtgcgattccctttgcccccttttctccctgtatcgccctgtcccatcttgctctcctgtttattaaagcaaatgggctgatcaaaactggtacttaaagagcattcagaagccgaagaaaattgtgaaagagatctatgagccaacaaacacaataaacaaaacaatgaaactcagtaagagtcacctgggagagacaaacaggctttaatgaattgactgaatgagtgatagaaagataaaggctaccgagcaagttcccacttggccaggggtttgttcactcttaatatcaggagtcaataaataagtctgatagtatttaatgactgcatttggacgtcattaataattccacttgtactgacggttctactttatcttgtttcttccctttgccctgaaactcagtggtggagggcttccttcattttctggttatctccaaggctttcaaagacttctgcaaagaaacagaatttgcattgtgtgtggaattacgtaactcatacattaacatgcctgattgctagacatctatggttatattgaaaacttaaaaaaaagacacataactagattatgttaaaataaaaatatggacaaaaccaaaccgtagttgttactttataaaacccagaaattcctgtagtaatttgcaacgtatcctgtattgacataacagtaaaaatatctgccttcttttctatttcatgatatacctcatattaggtgactataatatgaaatgaagtttttgctgctcaaggcttgtgtaattagttatatttgtcttgttaataaaatttgagaggcatctagttttcaaaggaagtgtcatactcaggatgcaaagaggtttaaatttgtgattagtcggctttgcatcctaattgcctatgtcttatcaaaccaagttttaatggtaggtggagagcatagaatgcattgttaaagtatgctgcaacctgcagctattaaaaagcaaagtaatgaattcct

SEQ ID NO: 586406 - DNA, 4001 bp, Homo sapiens
ctctcaccttggcaggccttgtctcctcgtgctggttggtatccaggctggcagcggcagcccccgacagctaccatccacttgccctccccgttgcagtgcagcctgggggggctgcctcctgcctggccccctactccatcctcctctggctctgcatgagccacacaggtgcccacagctgccaccagggaggcccccccagccccactggcctgcgtctctggaaaggaagcaaaggatcggagcacggcagggcaggtgtaggagaagagcctgacagcgaccagggccaggcaggcccccgtgtcctggaaggccacgtagaagccgcgttgggtgagaggcccaaagctccgctctttgacgttcagttgcagtccagcccgctgcccagccccgtggggtcccacagcccacgctgcagaggaagaagaggaggaggaggaggaggaggaggagggaaagctctcgtctgctgcaattgtgtccaccttggtccagcgtttgaggtgccaggaggaaacgctgtcagggctgtcgggctcctcagcctgacggtagtaaagggtgaaggtctcccggcaggtgccgccgctcacacccaggctggagcatgcccgcacagagaagtggagtcgaatgtgcgccctctgggccccgcgccgctccacaaagtgtgtctgcaaccaattgtcctgcccggtgcctggaggggcccctgccacatgacatgcctcaaaggtccgagtcaggcgtcgctggtcgtccagaacactcacctcgtcccactgcaggaagggccaggagaagctttaggggctccgggcttaagcacggcgaggtagaggttatagggaaggggacatatctcttccactgagacttaaaattaatgacaagcaaagcagatagaggataccttgaaatcttggtgctctagagggagggatccttttcccataatcctcacccagggtttccttcatgaattccactctccagggaacagggaggggcagggccaagggattcaggttcagaattagagtggcactcaccccccctggtgggtaggtgagccagccaatctcagatgtctctccggtggtgtccagcaatacctctgcccagaaataagaggggcacacagtggccaagcctccagccagcactgccagcccctactctattcccaccgcgaacaaaagaatgccccacccgggcccatgtctttgccagcaggagcacagctgtccatcagggtcctttctctgacaaatctgatgtgggtcttcattatcctcaccatgcctttccctttattgatgtcttcactcttatctaccttttctaaatctttcccacttccccctttcactgggtctctatggcaggtctgggttctcctgtctcccctccctcttaccttccagagccagaactgaagacaccaggagcagcacccataggctacacaccatgcccgccactctgttccctaactgggcagccccttcagtagccatgggacatcttcagggcgtccaccatcgccccagccaccaccctgctcctgggtggggctgcagcttttgcaagactcagggtgtacagctaagcttgcttcctgaggagacacacaagaccagaagaggcaggtgggaagaaagtgtttcttcatatacagcccaagctccaaaagctgaccccgtgtctgtgtctcctcctacagctctccaatcgccccagcacccaccatgggacagaagccaggttgcatactgcctctcctgagccggtgcacatttgaccatcttggagtgttcgtgcctactccctgtgtgaccctgtctctgtgttcatttctcacagctctccttcctagaagtggggcagagggtgtttctgggtcaatcttaccctttttttttttttctgcaaggggttattccagttctttctcttcatttactctcctcccttcctccaacagccaccctgtattggaagttagaagattttcattaaaggcagctggttaagaagctgctgcatcctacagacacatgaattgaatcctcaccacaccgccccacccccgatggacctggatgctctagaaatttcagaggggcagtgaagcagtgaagcgggagggacacaggaagatggctgtggggtatgatgggagggaagggaccagaataaatacagaaagaacacaggcatgaagattcagtctgataaatgagacagtgcagggagggggcagagctatggaggtctggcatacactttgtgaacaaagatcctcgtgccccaaggggtgcatgttttcctagagcttacagaagaataaccctatggctttaacatatgaaaagatgcttcttgtttgctcacattgaaaggaaaccaggttaaaactacagcaacaggccatttgttatagaaggaatatttgtgccccccctccattcatatgttgaaatcctaactcccaagatgatggtattagaagatggggcctttgggaggaaattttaggtcatgagggtggagccctcactaatcatgagattagtgcccagatgaaagagaccccaaagggctttctcaccctttttctgccattcgaggacacaacaaagaagagggcagtctgaaacctagaagagaggcttcgccaggaactgaccatgccggcaccctgatcttggacttcccagcatctagactgtgagaaagatatttctattgtgtataagctactaggtctattgcactttgttatggcagccacagttgcctaagacaccatttttaccatgttggacaagatatgggaaataggttctcttgtacatactctgcttgaatccaaattggaatattctcttgggaggacaattgggtaatatctttccagcaactacattgtaagaatgtgtccttcaggtactgtatacttgtatgggtttgcacagatgtttgaacaaagacattaattgcaaattgtttataagagaaaaggctgtaaactaactgtccatcaattggaagacagtaaaattatagtacatccttagaaagaaatacgggcaactgttgatgcactgatataaaaagcatttccaagtgaaagtgggacaatggagaacagtgtaaagtaagctcccctttgttaagaaggatatatacacatacatatgtatggaaggatatctatggaagagcatccaaaacctgtgaaaaaggcaaaggaagtggactgagacccagtgcaagggagacttaactttcattgtattctcattaattgtatccatttaaatttttgcattcttaaactcttgcatgtgtattctttcaactaaatcattgattaaaattttctttaaaactataggataataactgtttagtaaagttaatcaaaacagtgttcatatcctcataatggcttctcagaactatgtagtaagctacctcttatataaaaccttcctgtgccttcagaaggtacaccactaagctcacgagcaaatgaacagaaggaatagctacctccagtgtcacaatgaagacaaacaggcttggcacctcctttgcttgttgatttagagattggcggttctctatctctcctcgtgtctgagtctcagaagtctgtgaattgggtggactataatccctttatttctgtgaagaaaaaaaagagacatgttgcccagattgctcaaaagacatagaactgagaggaaaacaaaaaaaaagccaattagaagagaagttgtgatttgtttttcctggatatatatggccttgggattgttgaaagctatcataaaacaaaaatcaaactatgaaactttaattgcaacaaatatgaaaatcataatttgattcctactaatttttttctggcactgcgggctgtgctgtccatgaagttatcatggaaatacaccatttctacatacgcgtgggctgatgta

SEQ ID NO: 586407 - DNA, 4001 bp, Homo sapiens
ccactgacggctttatccacatgcagctgcaggggctcccacggctgggaagagttgaccaacagggcctggccccgcaggacagcttccgacagcagggccaggccctgccagacttctacggcctgctgcccgacctacagggagtggactctgggagtcagctgacccatgtcaccctctccctcctgcccctcagcagccccaagcaccaagctgagcaaacagaaggtatgcaataagacttgttgaatgaatgaatgaatgaatgagtgagtgagtgagtgagtgaatgaataatgaatgtattccatacagccctcattatttttcttttttcttttcttttttgagacagggcctcactctgtcactgaggctggagtgcagtggtgtgatcacagctcactgcagcctcaaattcctgggctcaagcgatcctcccgcctcagccttccaaatatctgggactaccaccatgcaccacctcacctgactaatttttttaaatgtttgtagagatgggggatctcactatgctgcctaggttggtctgaaactccagggctcaagcaattctcccatctcggccatctcagcctgggattatagacgtgagcctctgcgcccaggcagcctcatctctgctgctccattttacctttccctcgatcattctccctttcatccaaaatcaggctcgcaaatgagattctccaaaagaaaggaaaaaaaaaaaaaaaggaactcacctccatcctcttccaggcatagaaattaactttggtgtctgggacagtgatattctcattcaagctgcagtgttcagcacagcccgtctgaaatgcacacagcccggggagtcaagggtccctgaaggctctggccctggcccacaggccgtaggatctgctggctttgctccttgcctagtttccaggtatggtttggggccaccagacttattcttatgtaggggggcagtgtctagcttcccaactccaccccaaaccaagtgccaggttcctggatctgggaggagttccctgaagccctgagcgtgagttctgtggaatgtgctggggaaggggtctcaccgtgatattctcggcctccttggcctccaagaggtacctctccaggactcggctgtcacagatgaggcgtggtggggcgcccaggactgggaggcccagagggagcgacagcagggacaggagaagccacagccaggcaggacattctagaacagatagccaggctgagagtcaggcggggagggagaagggtggctgtggaaggacagcttccttcatccccacgtctctgccccagctcgtccttcctgtccccaaccatgcaagcactcaggtgctgcctccctggccttcattcaatcctgctgccgtgtgcacaccccacccccagctaccagcatccacttctccggccaaacttcaatcctggtgtgacagaggcttcccctctggcagataagtggtggctccagcgcccaggttatcagcttatcagcttcctctccactggcacagcagaacccccaaaccttcttcccctcaacccccaaactgtgtccccttcacaggtcaggtttttgccatccccaaggactcccccaagtccccgctggcacgtggaggctgccccacccccctcccccttccggggtccttgacaagtcgccggtccttgaacccagccacctcctggccaatagccggggcgctaaatccccgctcaaacagggacccgggcgggcgggagcgcccagcccgcgagtactcaccgtgcacccccatctccgcgcctggccggggtccctcagcgacctggggcgcgccgggtgaccacaccgggggccctcatcccgggaagctcggcggtgcagggccagccccacgggcctggaggagagggcggctgtccagggggcgcggtgtcggagcagagcgggcgcggtggccccggtccggctccgggaggacagcgcggtgcggcgcagcgcagcgagcggccggggtggcccagggactctgcggctctggccgggggtcggggctgttatctgcatgtgtgcgtgcgcgggtgggggtgggggagaggctgtgtgcgtgaggggtcgccaggggtaggggccacccggggtcagagcaggggcaggacgcctgggttgaggctcgccggggcgtgagcggggctgctgcagacgtgcgtgtgggtcatgggggctgctcccgggccctgggtcgcgggaggggagtgcagccggttgcgcacccttgggactggcggagcgtgctatctgggaaaggctgggctcccggacacctcccctggggggcatcccggtcttgggcggagactcagagatgcctgggttgctgagttccgcaaagtagctgggtctggaagcccagaagctttagggaggggcaaatgagtggtctcccttcccacaatcccaggacatgttctagaaacaatgttgaccatgttgaggaatttgatgggggcaaatagggcaagaaatttggggttcttcctccccacctcactcctcaccgtctagtactctgcaaacccagacacttaacttttttttttttttctggagatgtagcctccctatgttgcccaggcagtgcagtggtgccatctcccgttcactacaacctctgcctcctgggttcaagcaattctcctgcttcagcctctggagcagctgggactacaggcacacctttacacccggctatgttttgtatttttagtagagatggggtgttgccatattgcccataccggtcttgaactcctgacctcaggtgatccaccctcctcggcctctcaaagtgctgggattgcaggcgtgagccaccgcacccagcccccaccccagacacttaacttttagtgcacagagcacacagtccattgtgcaggacacacatgcaccttgacatctgtttatttgacctgtggtgtaggttagctaggctgcattgctgagttcttaagaacactgaaatacagctaacaccaagagtgatgggggctgggatttacagctaaggttttatggcttctggaaaccctgagccagaggagtgagattcccagagcaggagaccaagactagctggtctctcacaccttagaaagtggcctcgtccttgagccctcaatgtcctcatctgtcaaatgggtgtggtgaaactaccagcctatcccattcaggtttcataaaagacaggaaaggtccaggcgccgcagctgacacctataatcccagcactttgggagaccaaggcaggaagatcctttgagcccaggagttcgagaccagcccggacaacatggcaagaccttgtctctaaaataaataaataaataaaaaataattagtcaggtgtggtggctcacgcctgtagtcccaaatatgcaggaggctaaggcaggaggatcacctgagcccaggagttcgaggccgtagtgagccatgatcgtgccactgcactgcagcctgggcgacagagtgagagcctgtctcaaaaacaaaaaaagactggaatgtgtagatctgagctgtaagagttagccgggagaaatcaagaaagatttgagggaggaggtgacaatgacctcagccttgaaggggggtaggacatcaatgggaagaggtatgaggtgggtgggggattgtcgattcagcaaagtgaatggagagtcaggtgagtattgcgggatctggccagcagcccgcaatgcaacagggctctctctttgttcccaggcggatcagcaggttgagaaataatagacacacacaagatagtgaaagctggtccggggggtcaccgccttctggtcccgtggtgtcaacaatgcaccagatgtaccatcatttattattaagtttagtgagggcgggggtaggttagtgagggatttagggtcatttgattatgaggtgagatggt

SEQ ID NO: 586408 - DNA, 4001 bp, Homo sapiens
cctgctcacttaagtgctcagtgaccaccctctccagagacactgtactaggccccattgagtgccccaaggtgcatttcactttgcaagttgctgcaccatctcactggggccaggtttgattttttttttttttttttttttgtcttttgggatactattttctctttcataattcttggagaatccaggtggcagtaattatttgtttttccctcattaccaccatctgattggctgaccagcaatgtgtcttcgagaaatggaacccgggttgcttgaagacaatcttaacttctctaagggtttgcttttcaaaggaagagtaccccaggagactcctctcagcctcagggcatccacctgctcccttgagaggctacactccaacttcaggctgtcctgtctcccattcccagatatgcgaagtttcattccaggccaggagctgaaatttactagacattgtagcatacacagccacagtggatatcttgatttatccccagacagtactgaaacccagaaccagggaaaaaactgaagggtggctgaggacacattaccttataaagtttccaaagggaaaccctgacccaaaaatattctgataaggtttctgtggctagaggcaataaaaggaaaggaggcacagaacattttttacaatacagtgtcaggggattattctttgctttcttctcttgggaaatctttacaaacagaaaacaaatcttttttaaaatgccagccaatgctttgtcaaaaaatgattaattaaaatatggtacctaaaatgtacactaaagtgtacattaaaggacaaatagttgataatgtgaattagggaggggaaattggcatttgggaatgtcagaaggaactggaaatttagtattttactgcaagccagagttaggctggaggaatgggaaatggggagaagtcttgagaccctgcttgagacagaagtgaaaaatgcagaggaaaatcagtgccctgtggagtgtgaaaataattaagtggcaggcaattagactgaggtggctccagtcctagggttgctacttgcaaaaaaatctaactcgaatgatttttttctaaagtattacattgggggaaaataaaattcaggcttaaccaactataaactgccaattaacctctcattacatgaccagggaatttccaccttgatcgtacaaattaagaaactacataactttacctaaccaattattgaatttgctttcctttatcatgcactttataaaagtgttttcttcaagccccttccataaaccacaaactacaaaacatagcttggtgctctacaattcttgaattactctttaattaaattctttaatatttctgcggagacttccacaaatttttaatagaaaaaaagggggactgggaaccccgcagaccaaagctcttcccattcatgaactctgcatcctgagtcagtattctcccctgacgaccgtccagtggtccctgcacaatcggggagagctgcggcagtgggggcagagctgcccacagaggactccagaacaaggcacagtcactgcgcagggaggagacaggatgcccggggtccgagctgtcagcccggccgccatcctatggctgaaggggactgagggccgagctgcgccaaggagaactcggggccgcggattttggagccagctgcggggaggccagagtcccgccacagccacttcccaccagttccaaccagccccgccccctctctcgggatgtcggacccggcactctcaccatttctaggcttccagtgggtcctggcgtcttagctgtggatctcccaatacctgcaggtaacgaggccacagaagctgggcctctaggagcagaagacacagagcagtgaagactacaccagaagctccggctgccgccagagacaaaggccccaccaaacccggaagccgtcctgtctgctccagctgagtgcctgattggacgggtcccagcccagcgtccctgattggataatgtttagggccccaccctctcaggccttgattgacagaagacgtgctcagatgctgggctgaatgtagagtgaaccctaagccttttcaggcagagcttcctccctgagctgacccaggccctccccagacggcatttgccttgtaaggcaaccgtctgaaataaaatgtgagccatgtgtgaattctaaattttctagtagttaagaagaaagaagaaacaggtgaaattcattctaaccatttaataacccaatatatccaaaatattattttagtataggagcaatatgtaattattaatgtagtgtatatattcttggaactaaatctttaaatctaaccctgtattttacctttctagcacatcgcagttcagaccagccatattccagctatcctgtagccacacatggccaatagccaccacattgaagtgcagctctgatttcatacttcctctctctctctcctcaaacctcctgtgcttccttccctccctcccttctgctaagctgatgctcacttctccaacgttactagaagccctcagagtgaatgttcttatcttcccaccatccaccgactgtgtctctgttccttccactgtcactgtgtaataattgcccttctgcggctgggcatggtggctcatgcctgtaatcccagcactttgggaggctgaggtgggaggactgcttgaagccaggagcttgagaccagcctgggcaacatagtgagactccatctctacaaaaaagtttaaaaattagccatgggctgggtacggtggctcacgcctgtaatctcagcactttgggaggctgaggtgggcggatcacctgaggtcaggagttcaagaccagcctggccaacatggtgaaaccctgtctctataaaaatacaaaaattagctgggcctggtggcgtgcacctgtaattccagctacttgggaggctgaggcaggagggtcacttgaacccaggaggtggaggttgcagtgagccaagaacgcaccattgcactccagcctgggtgacagagcgagactgtgtctcaaaaataaaaataaaagttagcaaggcgtgttggtgtgcacctgtggtcccagctactcaggaggctgagctgggaggataacttgagctcacgagttcaaggctacagtgaggcatgattgggtcactgcacaccagcctgggtgatggagtgagaccttatctcttaaaaaaaaaatgtccttttgatttatgaagcctcggcccggcctgagctgtggttcctattccttctggctttcccaagcttttcttgcccactggaagtttcactggagggtagaggactggctctgtagttggggacctaattgatgctctgttttctgtaaagaggaatttttctaattgtcacttagcagggagcctggctaggaatggaatctgggggcattactattggtttaccctcctggggacccctcatctttggtccatgcatattctccttggggtggcatcctgtaattaatgatctcttacatatcacagcacctcgaagctcccccagacacatcctcatccagcctctcactctgatgccatcattgtctagggacacctccgcataggtccataccatgtctcaagctgctcatctcaacaacatttgtgctctaggaggtggaggtgccctagggggctcctcaccaagggagtgggcaggtgatcccagcactttgggaggctggggcaggtgatcccagcactttgggaggccgaggcaggtgggttatttgaggtcaggagttcatgatcagcctgaccaacatggtgaaaccccatttctgctaaaaatacaaaaaaattagccaggtctggtggtgcatgcctgtagtcccagctactcaggaggctgaagagaatcgcttgaacctgtaaagcggagcttgcagtgagccaagatcatgc

SEQ ID NO: 586409 - DNA, 4001 bp, Homo sapiens
aaggcttggctgagtgcaaacagctcacacgtttgaggagaccagttattaggcaatttttctaactctgcttccacaagagtccccgtatcaattactgaatacccattgtggtttttttcctcaatcacctgggaggaaccatctatcgtcctgtcctgaagggagttccgcctaggtctggtcggacctttgtatggtaattaagatttaaatcccgttaggaaatctgctgggttaagggaattatcagtggttggagttacattacctttttctaacagaatagccccatactttaagatttttgagttagtaagctacctttttgctttttttattagaataattctgaacaggtgaggtgtgctcacaatgaggtttcctctaaaagttacttttctacttttagcaaagcagttgcgctaccgactgaatgcatttggtccatctgcgggttactgggttaaggatttttgatagggaagctacgggttgtcaatggcctcagtgctttcggcctatgctcttatttacactgaccacaaagtggattggagtgctatagggtcacagagaagaccttcaattatcaagtacaggttttaaatttaccctggcttttaaaggaatagggcacactgttttttactatttctttctctttctttctctctttgactctctctctctcctctttgtctctctctctcttctgtctctctcactgtctctctctcctctctgtctctctctctttctcctccatttctctctctctcctctgtctctcttttccctcagccatttacaaacttggggccctggcaagggtggtggggagtgggtcctacataactgcccatgtcaagagctgtatgcctaaattgggagggacaccagggataagactccctgggttatagcctaggtgcctaaggacgcagcgcagagcttccttagatccctttggagatacaacttgctagaggaaatggaagtctgaaccaatagtacctaggaggcagggatcagaggaagtatattcagaggtaaggagaattttggggctacactttgaagaaagttgtggttgggacccaggaggtatgggtcagaaggaaagataggggtgcatgcatgggcgactgttgagacttctggctacaccatgatctcaaccggctactgccgggagttcaggacgacagctttctgcctctagtcggccctcggcttccccaagaaaactgaaagtggaagctggcttgaggcaaaccaagtccccaacccagaagggttgggggttgttagaaagcccttccccagatagcctcacacctgagtcttaagtccggtggccacactaatcgtttttaactggccgacaagtgcccggtattttcctccaattctaaggaaggataggacagaatagcaagtgaaagtggtccaatattactcaccactttggatgtccgttcgtggttgccaaaatgttaccggggggtccttgctcacagagctcccaagatggtggtgaaccacttccaagatggtagcaggccgcttccaagatggtggcaagcctcgtattctctgacctggagttcttggcctcacggattccaaggaatggaatcttgggccatgtggtaagtgttatagttctattagaagccgtgggtcacagaagagaaccatggaacccagtgactagtgttcagctcaattagaacaaacccaggcacttagccgtgcaggaacaatggcaagcctttagcccaattgggagcggcaatgggcgcctcgctggatcaggagcacagcggacaccctgcaggatccagagggatgggagtcagcggcaggtctgcggtggtggcaaacagcagtggtggacggtgagcaaaagctcagctcgagccgtaagaaacatggaccagaagagtgcagttgcaagatttaatagagtgaaatagcatgaaaacagctcccatacaaagggaagggacccaaaggggggctgctgttgccagctcgaatgcctgggtttatatcccgattgttgtccctcctgctgtgctctcaggcaatagatgattggctatttctttacctcctgtctttgcctaattagcattttagtgagctctctgattggtcaggtgtgagctaagttgcaagccccgtgtttaaaggtggacgtggtcaccttcccagctaggcttagggattcttagtcggcctaggaaatccagctagtcctgtctctcagttgcaagataattgctgtatctccaggcgttttgccctcatcccagaaaggaagcccgccccagggacttctgtctatgttcactgtccagaactatgtcacatagccacaaatgactgcagtgaagatcatgtgactcagtaattcactctccagagagtataggaaggcaagagaggtggtgttggaatggatgttgaatgaattcatctataggatataccacaacgtcgggaataagtggcagatgttacaatcgaaatgggctgattataagtggggataagtggctcgtggggtggcagaggtcaggcagttgcaatatgagaggctaggtggatgcagctaccataatcagcagtaaagccagcatgttaattgcagtggtctgacctgcagggatctttggtgctgcctaattatggtaatacataagttattaagaaatagttttttggcagctagaaagagtaaaggtttttggaaattttcttgtaataagaagcaaccctcacccattccaaaccattccttttctaacagaaaagacagcttaaagagccaggccagcaaactttgatatgcaaatgcaggctattaaaaactaggtccacccaacatggccaccatggcgattcccaccctcttcttgtcagcacatgtaccaagtgtcatggccccctccagataattcatgtgttttcagaacatcatggcaacccacatttgcatattaaagggctgaggtgggagggccaggttttttgcggggtacatgaatgatacacctggtcaacccaatcccctgggccctgtgcaaatcagacaccgcctcctccagcctcccagtataatcaaccacttttccactgcacatggggtttccttctctcggcttggagccccctccctctgtgtctgtacaggggagcctcttccttcttttttgcgtattaaactctctgctccttaaaaccactccatgtgtgtccgtgttgttgtcacccccgtccctgtgaagagagtccaccaaacaggctttgtgtgagcaacaaggctgtttatttcacctgggtgcaggcgggctgagtccaaaaaaggagtcagctaagggagatggggtggggccattttataggatttgggtgggtagtggaggggcaggggtcacaaggtgctcagtgggggaggttttgagccaggagaaggaatttcccaaggttaattgctcagttaaggtggggcaggaacaaatcacagtggtggaatgtcatcggttaaggcaggaacaggccattttcacttcttttgtgattcttcagttacttcaggccatctggatgtatatgtgcaggtcacaggggatatgatggcttgggctcagaggcctgacattgctgtcttcttatattaataagaaaaataatgtaaaatagtgttgaagtgttggggcagcaaaaattttgggggtggtatggagagataatgggctatgtttctcagggctgcttcgagagggattatgggcggcatgggaacctagagtgggagagattaagctgaaggaagattttgtggtaaggggcgatattgtggggttgttagaaggagcatttattgtatagaacgattggtgatggcctggatgcggttttgtatgaattgaaaaactaaacggaagacacaaggtccgaataagagaaggagaaaaacagatattaaa

SEQ ID NO: 586410 - DNA, 4001 bp, Homo sapiens
gggtactcttttgttgcggggcttagatatgacataactgtataaatcttgttcagtgtagatggtcatagggggcactaagaatgagaggaagcacatagattctgaagagccattcaaacaacgataggctgaggtaccacagacaaaaaatattcctgagggtaggcagactatttgtgtgggaggagttacccacctgatgcattgggagttggttgtgtatgtagtattgctaaattttacacaggtgaggtttgaggtatgggttatttccagattggaaacaagaggtcctactaaaacggaagtggtgtttatttctgtgctgaagttgttccattgttcaggtacagggattgaaacatatggcctgaagttcagggggaggcatatccaacagttagtagggttttgggccgagacctcatggagcccagtgagggtggtattaaataggcttaccaggcgagtatgggtacggagggtttcatgtagttttgagagatctagtcctttgtaggggctagaggtgccatgtacccgggtgagttgggagattacttcttttacatgtttttctcttgcctgatcttgaactccacccccatcagacataccagtttgggtgaagtaagtccaacagacagtgactccaagtcctccaggacaactaggattaatcatttttcctgtccaataatgagtatttgcatgcatgcaaagagtggcagagtgatagcagttgcggggcatatgggtgtgggcagtgaaggtgggggttcccttagaaagactcctatacgatggggcatcaatatttccgggacgctgcattctccatagaaactcttggtaaggggagctactggtcatacagcggcatggagggggtgcagtgagagtgaaagagggtaaaagaacagtaaagagaaaaatatgataagggagggccatggggatttatgattttagttactttcctcctggttgttgtttgaagagcaggcgcaaatcctctagaggttcacaggaatagctagcgttgtctcctggattttcaggttcctttggcagtatccaggatttgactcaagtgtgatgtatccaagactccactccagccactttaaccgcagttggggtagataaaatgactgggtagggtccttcccaggatgtatctagggatggggaattagagggaagggacttgactaataccatgtcacaagggtggaatagttcttttccctcttctcagggataggttccttgtaatgttttaagaacttgttgatatttggctaaggaggtgatgtctgcaactaagttggctgtcttgggtcaagcacaaggtcattggttatgaagggccttccatacagcatttcgtatgggctaagtcctgctttttggggaaagttgcagattctttttaaggctataggcaacagagcaggccatgtgaggtgggtttcctgggtttgcttttttagatgtcctttgagtgtttcattcattttctcgaccttccctgaggactgtggccttcaggcgcagtgtaagtgatatcgtatacctaacgcctgggatactccctgggttactgtggcctggaaagcagggctattgtcactctgtaagcctcggggaagtccgaatctgggaattatttcatgaactagtgcctttattacctcttgggccttttctgtcctacaggggaaggcctctgcccaacccgtgaaagtatctacccagactagtagatactgaaatccctgaggtttgggcttgtgggtaaaatcagttgccagtcttctccagggtaatggcctgttctttgttctcctgaaggagcttggcgataaggcaggggattatttctctggcacacttcacaggccctgactatctgcttgatagttttgaaaaggcctggtccagtaaataatgatttggccatctgatgggtgctatcgatgcctaagtgaaaggtttgatgaagggttttaagtaatttccattggatagttgcaggcaaaagtattttcccttcttcagtggctagccgtcccgaggggagaaaactgtcctcgtgaggttccccattctgtttctcctgctgagtactggggcttggtttcccggaggggattaccctatactaggggttgttttataagcatttctaatggagggtcctgccttgcagctcttttggcttcaatatctgcttggcagttctcttctatttccctttcctttcctttctgatgaccccggcagtgtaagactgccacctctttaggtttctgtacagccaataataatttcctaatggcttcctgatgtttgataggtgttctctcagaagttaggaattccctttctttccatattgctgcatgggcatggaggactaggtaagcatatttagagtctgtatatatatttgcccttttttcttctcctaattctagtgcccaagtgagggctattagttctgctagctgagcactagttcctggagtgaggggattactttcaagtattccattatcactgaccactgcataccccacttttcgaagtcctttttctacaaaggaacttccatcagtatacaagttgaggtcgggatcagtcaaaggaacctctaaaaggtcccctcgagtggcataggtttgagaaattacttgttgacagttatgttttatcttttcttcattgtctggaagaaatgtggctgggttaagagttgcacaagtgcacagtcgcagcactggcccttcaagtaatagagcctgacatttaagtaaacagttgtctgacagccacaagtctcctttagcagtgagtatgccattcacatcatgagatgtccacacagtaagatctcttccctgtattattttaactgcttcagatactaagactgctactgccaccactacccgtaaacaatgaggtcaaccctttgccactacatcaatttccttagtcaggtatgccacaggttgcaagctcatccctcggatctgtgtaaggactcctagagctattcctgttttttctgtgacatatgaagaaaagtcttgccctgttggcaaacttaacactggggcttgggttagggcctggaaagccacttctacttcagttgtccatcttactaaatgggtattggctttctgagtttccttaattagtgtatttaatgacctggctatttcgccatacctgggaatccattttcggcagaaacctattacgccaaggaatccccttagttgctttagggttttgggatgaggataagccagtataggctggatgtgttcctcactgagggccctggtgcctttggataattttagccctaagtaacctgctgtgagcagagttgagcctttggtttggaaaccatgtagccacaggtagcgaggaaattgaagagcgcttgggtggcttgatggcacaaggtttctgaatgggcggccaaaagtaaatcatccacctaccgaaggacaagtgtccaggtatgaggattggctcaagtcttgggctaatgcctggccaaatagatggggactatccctgaacccttggggtaaaatagtccaggtgagttgagatgttgggtttgaagtatcttcaaaggcaaacaagaattgagagtcaggatgtacagggatgcagaagaaggcatcctgaaggtccaggactgtaaaccactctgcttcctctggtatttgggaaagcagagtataagggctaggtacagctggctatagaggaacaacagcctcattgataatcctgagatcttgcactaacctccactgtctgttgggtttctgtactcctaaaattggagtactgcaggggttactgcatggttttactaggccttgggcttttaggtccttaacaatcttttggagtccttgttgggccttgggtctgagggggtactgcctttggtagggaaagga

SEQ ID NO: 586411 - DNA, 4001 bp, Homo sapiens
ccagttgcaatatgacgtcacaaagtagcatctactaccttcttcttgtcttgggcacgcctcctttctaattcttgtttgccatctgtgtcatgccttacttctcaggtgtctcatgactggaaacagggacttttctcctctaagagaaaatgacccttccgaaacccactgctggtcaccttcaccccaaagtttatattaagcctaatggaagaatcattaaaatcctttcttgcagtgtgaaactgtgaagccaagtcatggctaagaaagaattagggaatgacaagaaaaagatttgaagccaactcttcgtgtctatagtccataaatatacgaggtagagaactgccgggttaaaaataaaataataccatgactcttgttattgctgcaactcttccaaaacttcctgccacacacacacacattcacactggattcaggtcgatcccatataaaaatgctcagtctcacaattatacttgcaaaaaaactgaaacaatctttcaattatctaatatctccacatctttcgagagacacttactgcccttgaaatgcgtcagaaacaaccaagacacgagtgcgtcttctcccggtagaagaaaaagttaacttctcccccaccagctgtcattacgttttttaaaaaacagagagaaggaaaagctgaagccacccggagcatttccaggccggcagggctttgggaatgcgcacgagaatcgcgctgggcgctctgagagcagaaccggccgctcaggcccctaaggagaccccgcgggcggcaccaggaggaagcgcgcgctccgggcagggccgcggccgaagagggggcgccaagcccggtacctgccgctggcgctcggggtctgcaggccgggggagggaagcgggctttgtgaagaggggtctccgagaaagccgcgcgggacggcgaggggaggcttcacgagggcagacgcgccccggacccggagcctgggcgggcggggaagcggagaaggggacgcccgacttggacggagggagggcacggagcactcaggactagggcgggagcggcgagcagcgggcggcggccccaggcggacaggttcgcagggagtgggccggaggccggggcggggctggggtctgcactcgccctagcgggcaggtcgccagcaggctgggagtcggggccggggggcggggcggggtctgcactcacctaggttggcaggtcgcaggaaccggcccgggggccggggctggggtctgcactcgcccaggcggaagggaagcgcctgcctggaccggggtgggtgggggactacgaaggcgggagccggggcagggctggggtctgcactcacccaggcggcaggtcgcggggaggggagtgcctgcctggacgaggggagatcgggactggtggtcaggggtcgggacgggcaggggtctgcactcacccaggcgggcaggtcgcaggcgcgcacccccaggcgcacgacgcgctcctcgtcttccagcagcgccagcgcgcggcacaggcgcagggccttgaggccgcggctgcggcgacaccaggcgagcagcgcgagcgcgaggagaacccagctgaagctgagccccaggtagcccagcgcgtacacgggcagcagcagcgcgaagctccgcgccagctgcgccagcagcccgggcagctccacgctcagcacgcccccggggttctcaggcgccgcgcggcccccagccccgccggcgcccgcctccgggccctcgccccgggcgccgctcatcgccccgcagtgccgcgctgccctcccggccgaggcgggctgggtgctcgcgctgatcccgggcggctcagccccgcgccagcgcccctctgaggggacgcggctccgccgcacgcccgcctccgcccgggacggtggcgtcatcacgcggggcgggagcggcgtgggcctggggctggcacgtcaccgggagcgggcggggtggatactgacgtcatcgcgcggggcgggccgtgggccgggtcggagactactggagtgggccgggcaggcgcacgacgtcatcacgcgagcgttgtgtctcggctggcgggagccggggacgggaaaggagagtgctcggtgcgtgggctgggcgtgcctgcgtcccctcgagccccacggggcaccctccccacttgcctgtggcctcggagcccgcgggcggttttggctcggcgtcgcgccccgaggcggcttccgggtgcgtggctgcgctcgccgaggcccgggaagttgccgtcgtcaaacccaaaggctgaccgcctctgggagctgctggcaaacgtgggggtgcgcggccgctgagcgcagccggggtggcggtgggatgagagggcggcgtccctgtttgcggtcattttgcggccaggaggacgggtgagagggcgccgcccgccggaggtcggacgggcgccgctggcgggagtcctccggtatttttcggtgtgaggttgcctagccagtgtgcaaggttgtggcttttgcggagtctctcgggacggtcttgttatcgggcattccggcgtgagaacgctgcctctggggcccttcccaccctgcttgtcagggttttaaacacaaacgactccgttgtgaccttgacaactctcacacagttcagttggcttttaagatgcctttaatcccaaaagtcctccctgaggggtctggtagtgccgggcaaagaccaccgcaagcgcccaagggacgctgttgacactcgggaactccaccccgggcaccacgcagcttcgccgaaggtgttaatattgtggccaactatgaatagctgtttcaaacgactaattttgggcctttcctgtgattcctgaggtcacttttcagttaactcaaaaacacaactattgatcactttactttccagtgaattcaatcgagttaattatatttgttctgtagtttctttcaaggaaactccaagccaaacagtagcaaagaacatcctacttgactgtttttgagcatattcagtgaattccaaggaaatttttactgaatttgtaacagagtagggcactggcaggtactgaatgaataaacaaatgcccagaagaagcagggtcacctttacataggaatctgtctcccctcgttcctgcgtcttcataattttgtgtgcatatgtatgtggagattatatcacatatgtaaaacattgcagagtctaaactctcaactccaggcaagggcagtaaaccccaagcaaggaatggaagtggtttcccttttcttactcttcacagtccctggtttgctgcagcaacaaattatattatgtagattgtaaatatgcaaccggttaatgctcctaacaccacctttcattcaaaactaagcctcaacacaaaagcaagtaattgctttgttgacacagaaaggagcctgagcctttcttttgcagctttcctctactggaaaattgtaggatcacatcctacaaagacttgcataaacataagccacgtaaaaaattctgtaatcccagcactttgggaggccgaggagggcagatcacgaggtcaggagatcaagaccatcctggccaacatggtgaaaccccgtctctactaaaaataacaaaaaattagccgcgcatggcggcgcgcacctggagtcccagctactcgggaggctgaggcaggagaattacttgaacccgggaggcggaggttgcagtgagtcgagatcgcaccactgcactccagcctgggcgacagagcaagactacgtctcaagaaaaaaaaaaaaatcctgtgccatgtgccatccagtggttgacccaaggatgtaaactagattgaagagaagtttccatgttgcataccagtcagcccaagtgtcctcagcttccctctgtgtgagccccgggtttccagcccctccctgtggttaattgcctgcagaaagcagatcctaaggctctgccac

SEQ ID NO: 586412 - DNA, 4001 bp, Homo sapiens
ccttttcttttagcagggtggagagtgtaggtaaaaaaatggggattcagcccaaaatcaaacctcaccttctgaatcatgagccagatctctgttaatgaattttcttttcctgacatttgttggtttctcgttacaatttctcccacgctgactctacaaagggaaagataaaatcctttaaaagaatgtaaacctcagatcacacacacgcacacgcgcgcgcacacacacacacacagacatgcatacataagtctaatggatcttctctgaatagaaaaatagaagtccatagtatcaactctaatattcattttctcacttatttgacagtgaaagcttatgttaagcaggcagggagagttgcttcccagtgccgatcttagcacattactatttatcaatcatatattcatggtatctcagcatcaaaacaacctgaagcatttacacttaaagttgtttttaggctggttcaatgctagattaaaacagtgggttttattctctcttggacagcccctcctccccaccccacccccacaaaaaaaaaaagcaaaaagagtagagaaatgaaaaaaaaaaaaaagagaaaatgagaaaaaaaaaagaaacaaaaacaccccatataaacaaaaagtgtcagcatttgtctcaacttcattcttttcaatgtggcagacaaacccagccaaaaactttgagtgcagcagctgctgctgccctccatctcctcttccactcatgttgggcactttaatcagaaaaaggggtcttaaaaacaaaactatgccttatccaaatcactgaaaggtaagctcattttgaagactgggcttctagaagcagagtcgccctacagtggcaacaaagcagataagtatctgcaatcccaacccccgtgccccctcccttctcattttctccctctccccacccccgacggagtcaagtttataaacagcaactttcaaactgatcactcacattggtgaccatgtaaggcacttgctggtcataaaatccatccatgctgctgctcttcgcaaatctcagctcagtattttatattttgagcatttagctggagatttcctcaggatctggacttctatcaacctagaggggaacaagatggcttttaggcttaaaaaaaaatcatgaatgaagctcttgaatttgcatagctaattaccctccgacagtcccattcacaaaaataaccctccctacaccgcctccttcacctggatccaaagagagccaacagagttcacaatttacatattttcggtagtagcaaaaatccgaacaagaggcgatgtatttatttacactctcgatgtttccctgcgcggtcggtgtaccccgggcagctctgattcgcaaacgtgtgcaaaactagcaatggcgatcaacgagacttgctttgcacctaacgggactaaagagacggagacacctctttcatcaggatagtttttgcgacccacaaccatgcaattatctggagagacataaaaagttgttggaaagacccacctgaaggccacgctaggcgaaaggctgcaaaaacttccctccaaatttaataaaaacattaattatagcccagcacttcccccttggaagccgaaagcgcctctgacagagctcaattcggtggtttttcctctacttctcctccaggggcctccaatccaaactgatggatcgctgcctcccattggctccgcgtctctttcacaagatcagatttcgggctgtcaatcaggcggcttgctgccccttcccgcgggtctccctcgcccctctgccctagggggtgctcggccggtaggcgctgggtcctcagcctggaagcgccacggagagactcgatttcctctgtaacccgctgcttattgttaaggcgcctggggatactgaaaccgtgtgtttcgagtcgccagttcccattattggggtgttaggtccactattgggctggtttccttaaagtactgttgtgcggttctggtatacccttagagccgcgatccacaaagcccgtaccgccttattcagctgccctcccctcaggatctccaacctctctactcttgccctgactaggagctcacctcgctctctatcctcattcccactcagcttttggcccaatttattttcccgtttttcaaaacccaccatcaccattatggtttatcgaaacattttttaaacagtcatcctcaactaaaattagatcctatcgttcgtgggacagaaacataaagaatctataaggaaggcacctaggagatgcagaattgctgattagcagaggttgtgatgggaggacaacagagcaagctaggtgaaaaagtataagtcaaaatggtccctacgtgtgcactgggaaaaggtacttccagtccactgtggctgtggggaggaggagggagtgcttggggttgctcgtatatcctagaacccgcacgtttcctgagcttttgttatgtatacacggaggcggagggtgtcacttactgtacttgacgctttcacttcctctccagcttttaaacagccagagcccagggttgggggcgagcggtgagatggctcgggtttcaaggacaataactaggacgttaagcagtgagggctgcatctctgaagccacttgccctgatcctcctatgggactcagaacagtaaagcgtcactttaaggagccagtgtccaacagcggacgggaggccgcggggataggaccagggactcaatgctgttgaaattcatttgtgaccagaactagtgaccaaaagacgtttccggcagctgttccgcccgttaggaaacgtgctgcagttctcaatttctatttgaaagtttccttccttaaatagaacgttatggagacacattaaaatggagtgtaagagcgcacagcactcaaccccggacctgggcaggagaaagatctacttaaaaaagaagcaaacaaacaaacaatcaacacttattactgggaaaacaaccaataactatggacagcaaagacagaccccgcgcattcccggaaactactaaatcggagttcacaacgcgcgcacctataagcattttgagcgggaactgcattttaaccccggccaaggagagattccaggaagcgcctgggccccgaggctgaacagtgaagctcatgggtactatctgagggtgcaaccaagcagggggtcaataacaagggtcctccaccaccctgcactcctggaataacccagcgcctgtaatctgagcaacagtttccaaagaccttctctgcagcccgagcctgacgggtatccagggtaaccgcgagggggcggagcttcgggttaggtcccggcgaggttcttcccgcagccaataacgagccgtaaatccccagcccattgttgtttattgctgacccctcagcgctccgctaggagattggccgctttagggaagggggcggagtcccgcccgccccaacagccacctttcgtctccattcacaaaattccggcccttcttggtcacgtggttgggggcgtggaggggtagaggaaatgacacaacaaaggcccaagtatcccaaaccacaaaacttttttcagctcgctgcctcctctttgtcctgtccctgaaacagatactagatgaggaaaaagaggttggggtctgggagtaataacaagagagaaaaaaattaagaccgaaattaaaggaaggctcacgtggggataattccggcgtgcactgcttagacagcttttgcactagaggaaagaaagaattgagagtggggagaaagtcttaaggactgggaacttttgcttgctgcttcaagtcattgcttttaaaggtgcaaactgttcgactgtagatggatttcagttttttcacttaacattctgtaattttcatttctacctttttttgtatcccacagtgtcttgttagttttttaaagcttttatgta

SEQ ID NO: 586413 - DNA, 4001 bp, Homo sapiens
caatggcgatcaacgagacttgctttgcacctaacgggactaaagagacggagacacctctttcatcaggatagtttttgcgacccacaaccatgcaattatctggagagacataaaaagttgttggaaagacccacctgaaggccacgctaggcgaaaggctgcaaaaacttccctccaaatttaataaaaacattaattatagcccagcacttcccccttggaagccgaaagcgcctctgacagagctcaattcggtggtttttcctctacttctcctccaggggcctccaatccaaactgatggatcgctgcctcccattggctccgcgtctctttcacaagatcagatttcgggctgtcaatcaggcggcttgctgccccttcccgcgggtctccctcgcccctctgccctagggggtgctcggccggtaggcgctgggtcctcagcctggaagcgccacggagagactcgatttcctctgtaacccgctgcttattgttaaggcgcctggggatactgaaaccgtgtgtttcgagtcgccagttcccattattggggtgttaggtccactattgggctggtttccttaaagtactgttgtgcggttctggtatacccttagagccgcgatccacaaagcccgtaccgccttattcagctgccctcccctcaggatctccaacctctctactcttgccctgactaggagctcacctcgctctctatcctcattcccactcagcttttggcccaatttattttcccgtttttcaaaacccaccatcaccattatggtttatcgaaacattttttaaacagtcatcctcaactaaaattagatcctatcgttcgtgggacagaaacataaagaatctataaggaaggcacctaggagatgcagaattgctgattagcagaggttgtgatgggaggacaacagagcaagctaggtgaaaaagtataagtcaaaatggtccctacgtgtgcactgggaaaaggtacttccagtccactgtggctgtggggaggaggagggagtgcttggggttgctcgtatatcctagaacccgcacgtttcctgagcttttgttatgtatacacggaggcggagggtgtcacttactgtacttgacgctttcacttcctctccagcttttaaacagccagagcccagggttgggggcgagcggtgagatggctcgggtttcaaggacaataactaggacgttaagcagtgagggctgcatctctgaagccacttgccctgatcctcctatgggactcagaacagtaaagcgtcactttaaggagccagtgtccaacagcggacgggaggccgcggggataggaccagggactcaatgctgttgaaattcatttgtgaccagaactagtgaccaaaagacgtttccggcagctgttccgcccgttaggaaacgtgctgcagttctcaatttctatttgaaagtttccttccttaaatagaacgttatggagacacattaaaatggagtgtaagagcgcacagcactcaaccccggacctgggcaggagaaagatctacttaaaaaagaagcaaacaaacaaacaatcaacacttattactgggaaaacaaccaataactatggacagcaaagacagaccccgcgcattcccggaaactactaaatcggagttcacaacgcgcgcacctataagcattttgagcgggaactgcattttaaccccggccaaggagagattccaggaagcgcctgggccccgaggctgaacagtgaagctcatgggtactatctgagggtgcaaccaagcagggggtcaataacaagggtcctccaccaccctgcactcctggaataacccagcgcctgtaatctgagcaacagtttccaaagaccttctctgcagcccgagcctgacgggtatccagggtaaccgcgagggggcggagcttcgggttaggtcccggcgaggttcttcccgcagccaataacgagccgtaaatccccagcccattgttgtttattgctgacccctcagcgctccgctaggagattggccgctttagggaagggggcggagtcccgcccgccccaacagccacctttcgtctccattcacaaaattccggcccttcttggtcacgtggttgggggcgtggaggggtagaggaaatgacacaacaaaggcccaagtatcccaaaccacaaaacttttttcagctcgctgcctcctctttgtcctgtccctgaaacagatactagatgaggaaaaagaggttggggtctgggagtaataacaagagagaaaaaaattaagaccgaaattaaaggaaggctcacgtggggataattccggcgtgcactgcttagacagcttttgcactagaggaaagaaagaattgagagtggggagaaagtcttaaggactgggaacttttgcttgctgcttcaagtcattgcttttaaaggtgcaaactgttcgactgtagatggatttcagttttttcacttaacattctgtaattttcatttctacctttttttgtatcccacagtgtcttgttagttttttaaagcttttatgtattattagtattatatatttttaggaatattgatggttttcgctggctgatagctttagtttccatttccaaagacttatcactccttcccaggcccccataagctctgcgccccttctccctccctttagtggactggcactctcaggcgctgcgctgttaagcctcagattttactacgtattgcggtggcttcatattttcccttttgagttctttaaacgaactcatatcttttaactctttgatcttcatagtaactgaaaatgatgttctcgtgtgaataagcagctagtctcgctacagctcggttttgttgaaacagcctaaaattttgagataaatgtgtccctcttgactgtgaacgattgaaccaccctcttttctttctcccactttctcttctgtcctttctctgcattgatacttactgaaacactatctcttctgtcctttctatgccttgatactcagacactagcttctagtttggcagttgtttatcttctctgcttggcactgggaaaaaccaatagacccacttgctgaagacagtggaagggctgaaaatttgtttttcagaaaatgtaagatcttggaaaatatctgcaaaggcagctgttctgtctacaagacaggaacataaaaagctggacaaagtttccactactttttgagaatgtctttaaaacatcagtttagtaaatgccagcccttttgaacggaaaatttcattttggcaggatttcaggcatagaatggcagagcagaggccaagaggctttgacatttatttgcttgtattttgaaatcccatttggattttgaaataagagttcttgagagaaagctacccccctccaaaaaaaagtccatttttgagtttggaaagtttttaggttgcatgtaaaactatttaaatttttatatttcccttgctgttatttaataaagtaaaataatattcattagtgacttctctacagttaacttactatggcattatgaagaaattgcacgttgttaaagaaagtgaatttctaaaagcagttacagaaaggcaacaagctaaaatggcgctgcttgttttaaatggttgctataattaaaatcaaatgaagtttgctcaaaattgagtagagtattaagtaaaacagtaacttttaaaatttgttgtattaaaacagtatgtaaggcaaattgttaaagatctagtttgcacagttacatcaaatagataagaaaaagatataaaattaaacagcaaaattggccaagaaaatgaacaagtgaaaataattccaaaggagaacatagagtcctcacaggagggtgaaagataatcagtggcttcaggaacactgtatgtgaggagtagcagaaatttgagaggagggtggagcctggga

SEQ ID NO: 586414 - DNA, 4001 bp, Homo sapiens
taaccctccctacaccgcctccttcacctggatccaaagagagccaacagagttcacaatttacatattttcggtagtagcaaaaatccgaacaagaggcgatgtatttatttacactctcgatgtttccctgcgcggtcggtgtaccccgggcagctctgattcgcaaacgtgtgcaaaactagcaatggcgatcaacgagacttgctttgcacctaacgggactaaagagacggagacacctctttcatcaggatagtttttgcgacccacaaccatgcaattatctggagagacataaaaagttgttggaaagacccacctgaaggccacgctaggcgaaaggctgcaaaaacttccctccaaatttaataaaaacattaattatagcccagcacttcccccttggaagccgaaagcgcctctgacagagctcaattcggtggtttttcctctacttctcctccaggggcctccaatccaaactgatggatcgctgcctcccattggctccgcgtctctttcacaagatcagatttcgggctgtcaatcaggcggcttgctgccccttcccgcgggtctccctcgcccctctgccctagggggtgctcggccggtaggcgctgggtcctcagcctggaagcgccacggagagactcgatttcctctgtaacccgctgcttattgttaaggcgcctggggatactgaaaccgtgtgtttcgagtcgccagttcccattattggggtgttaggtccactattgggctggtttccttaaagtactgttgtgcggttctggtatacccttagagccgcgatccacaaagcccgtaccgccttattcagctgccctcccctcaggatctccaacctctctactcttgccctgactaggagctcacctcgctctctatcctcattcccactcagcttttggcccaatttattttcccgtttttcaaaacccaccatcaccattatggtttatcgaaacattttttaaacagtcatcctcaactaaaattagatcctatcgttcgtgggacagaaacataaagaatctataaggaaggcacctaggagatgcagaattgctgattagcagaggttgtgatgggaggacaacagagcaagctaggtgaaaaagtataagtcaaaatggtccctacgtgtgcactgggaaaaggtacttccagtccactgtggctgtggggaggaggagggagtgcttggggttgctcgtatatcctagaacccgcacgtttcctgagcttttgttatgtatacacggaggcggagggtgtcacttactgtacttgacgctttcacttcctctccagcttttaaacagccagagcccagggttgggggcgagcggtgagatggctcgggtttcaaggacaataactaggacgttaagcagtgagggctgcatctctgaagccacttgccctgatcctcctatgggactcagaacagtaaagcgtcactttaaggagccagtgtccaacagcggacgggaggccgcggggataggaccagggactcaatgctgttgaaattcatttgtgaccagaactagtgaccaaaagacgtttccggcagctgttccgcccgttaggaaacgtgctgcagttctcaatttctatttgaaagtttccttccttaaatagaacgttatggagacacattaaaatggagtgtaagagcgcacagcactcaaccccggacctgggcaggagaaagatctacttaaaaaagaagcaaacaaacaaacaatcaacacttattactgggaaaacaaccaataactatggacagcaaagacagaccccgcgcattcccggaaactactaaatcggagttcacaacgcgcgcacctataagcattttgagcgggaactgcattttaaccccggccaaggagagattccaggaagcgcctgggccccgaggctgaacagtgaagctcatgggtactatctgagggtgcaaccaagcagggggtcaataacaagggtcctccaccaccctgcactcctggaataacccagcgcctgtaatctgagcaacagtttccaaagaccttctctgcagcccgagcctgacgggtatccagggtaaccgcgagggggcggagcttcgggttaggtcccggcgaggttcttcccgcagccaataacgagccgtaaatccccagcccattgttgtttattgctgacccctcagcgctccgctaggagattggccgctttagggaagggggcggagtcccgcccgccccaacagccacctttcgtctccattcacaaaattccggcccttcttggtcacgtggttgggggcgtggaggggtagaggaaatgacacaacaaaggcccaagtatcccaaaccacaaaacttttttcagctcgctgcctcctctttgtcctgtccctgaaacagatactagatgaggaaaaagaggttggggtctgggagtaataacaagagagaaaaaaattaagaccgaaattaaaggaaggctcacgtggggataattccggcgtgcactgcttagacagcttttgcactagaggaaagaaagaattgagagtggggagaaagtcttaaggactgggaacttttgcttgctgcttcaagtcattgcttttaaaggtgcaaactgttcgactgtagatggatttcagttttttcacttaacattctgtaattttcatttctacctttttttgtatcccacagtgtcttgttagttttttaaagcttttatgtattattagtattatatatttttaggaatattgatggttttcgctggctgatagctttagtttccatttccaaagacttatcactccttcccaggcccccataagctctgcgccccttctccctccctttagtggactggcactctcaggcgctgcgctgttaagcctcagattttactacgtattgcggtggcttcatattttcccttttgagttctttaaacgaactcatatcttttaactctttgatcttcatagtaactgaaaatgatgttctcgtgtgaataagcagctagtctcgctacagctcggttttgttgaaacagcctaaaattttgagataaatgtgtccctcttgactgtgaacgattgaaccaccctcttttctttctcccactttctcttctgtcctttctctgcattgatacttactgaaacactatctcttctgtcctttctatgccttgatactcagacactagcttctagtttggcagttgtttatcttctctgcttggcactgggaaaaaccaatagacccacttgctgaagacagtggaagggctgaaaatttgtttttcagaaaatgtaagatcttggaaaatatctgcaaaggcagctgttctgtctacaagacaggaacataaaaagctggacaaagtttccactactttttgagaatgtctttaaaacatcagtttagtaaatgccagcccttttgaacggaaaatttcattttggcaggatttcaggcatagaatggcagagcagaggccaagaggctttgacatttatttgcttgtattttgaaatcccatttggattttgaaataagagttcttgagagaaagctacccccctccaaaaaaaagtccatttttgagtttggaaagtttttaggttgcatgtaaaactatttaaatttttatatttcccttgctgttatttaataaagtaaaataatattcattagtgacttctctacagttaacttactatggcattatgaagaaattgcacgttgttaaagaaagtgaatttctaaaagcagttacagaaaggcaacaagctaaaatggcgctgcttgttttaaatggttgctataattaaaatcaaatgaagtttgctcaaaattgagtagagtattaagtaaaacagtaacttttaaaatttgttgtattaaaacagtatgtaaggcaaattgttaaagatctagtttgcacag

SEQ ID NO: 586415 - DNA, 4001 bp, Homo sapiens
tctcttttctcactattaggttttaaacatcacgttaacaactttttacttacatcgtgattagataaattaacgtaaactgttttgaaaacgcttaaattattctaaaatgaaatcttatccatagtttgtaaatagtagtccacctgggaattcatataaaacactcatgattaattcctgaacttaattgaaattataattcttttctaagtaaaggtccatgttcttccaaatacactgatcattttctaggattattttttgtagtgctaaatcttcaggtttgatttacaggtatgttaataatcccggagaaagactattctctgcagagttttaaaagataaatttggataaattattgcaatcacttatctgagctacaagacacaaaacaagtaagtcaaaagttaaaaaaaaagtactgaaactgattataaaatggtaagagtctgtcacagattccacattttaaaattccaggaacagagttgctatgcacattcaaaatctgccagcaagtgcactgacttggaatcaatgagatttaaacatctaagaaccaacaaaccttccagaacaattaaaatagatattttaagttattttggagaagcaaataaattctctcataaaggtaatgttctcacaacctttgactttgcaaaactaataggcataagttaatacaagaatctccatgcaaattttccttgaaaaacttgtatctgaatatgacttatgttgcaataaaaagtaatgtattgcagtaagtttcatttacacagactagcaaaatgatccttaaatatagccaaaactttcagtaagtcttaccttcattaacatataaatacaatcatcctttcaaaggactattaggaaagctatttaactttaaagattgataaagattgaaaaagctctttggagaactagactatcagcaaaacaaagaaacttattttacatgctaacagcaacttgatcaactgcattcaagaccaccgataaaacacgtcagtctgcctcaaagtagctacagtaacacctgggttccatttaaagagacccactctctcctttttaaccatcttaaaatctgttccaaaatttgcatgtttcccatataatgtgaacacacaaataatactgttatacactcaatgcttaaatatctataatttttctctttgtatttcccacaaaccacaccataaaattaatgtttcacatttgtatgccaaatccaaaagaaaaatttcaaattatgaatgccaacagaagtccctcaacattaggcatttttgaagttgtataaagctttatgaagcaatctcattttcctataaagttgcatacgataaaagatataacagattgcaccacaaaattttaacaaaaaataattcaaaatgaaagtaatgcctttaaatgtatccttgctctattaaataaatcctaataaaactgacaaaatagcaaaggtcaatttcagcaaacataacatgaatagtaacacatggaaaacatttttaaaatcctcatatctcccatttattttaaacccatagatttcctaagcattagatacacacctaacgttctgtgttgtgaacaaggtggaaagaagacacttgcacttaaatcttgaagcatcccgtcctgatgaacccagagaaactaatttctgccatcagaaaagtcctccaccagaacaccaaataatgatatgcgctgctctaaaggaaacagcaagccagccgggttctggctctaggaggtctctggaggtacaataatataaacctgatcaattgcaattaaaatctgaacagaggcttagaacttgaagtcttggtgcattagttcttgccaaaagcagatgtgattgtgagctggaagcaatttctcctggtaatttgtgatgacactgggtagtacagccccagagtccccaaagacaaactcatcagaggctctaatgtatgcatgacacatgaggtggctcttttagagctcaattaattgggctgaatattaagacagcaagttcaggacttcttttctttctccttctagagttgctttccccccttttaaagcaaattttgccttaccttctgcaagccatgtttcctgtaattgacttagatcttgaaagagttctaaaaaacaagtcaaagacataaacataagatttgcaaatctttaatcttcattaaatggaaatatttgtcatgaaattggtattaaatataaatttaatttcaagagacgcagtcaacataaaaataaaaaaaagaggcataacttaaatatctcaataatactgcctacttttcatgcctattaagcaactctttaagaaattattttagtcaactaaagaataaagtcaatcatcttttcttctttttaacaaacagcttaataaataagctcagggataccagaattcacaaaaaggctgaggtgaatatgtgtctgttcactgaaatcttccttaaatatatttaactcttgctaaaatagtagtagggggaagattagaaagactgaaaagcattttatttatatcttctgaatcttacataaaatatataatggtacatggtacaactgtcaaagtattatgttttcaacttcaatacctcgaaactaaaagaaaccacttcaaatacaagtttttagaggaaaatttctacattaataggtttataaaagtcagaaagataattctttggcaccaggttctcatcaagttctaaactatatggtcatgttagggagggagagagggaggtatttaaatggtatgaagatttgaggaagtttcagaattcagtatatctaattaaaattgccaactaaactttgataattaaatctaagtatattaagtttattatgaatgtcctcatatggctaaaataatttgtaacatactgacatcctagcaacagttcataaaaagaatctgcaaactaatttcccaaatagtattataattattaaggaggccttaagtatgattcagtgaacacattatggtcgataaacaaggtattatgacctcacaatttagtcatcaaaatcacccttgaaaattctgttaatagtagatggttttagtgtaaaggaggtgggaaaccaaacaatcactaatactgtttaacttgtaataaaggagaaagaaaaaagtaagcagtgtacatagctgctgaatttgtcccactgtattggatatttttaaattgttatcttagtgaatggggtgagttatatgccccatggacaaaggtatttaaacacaaaacaatgattaaaagaaggttgtcattgagaagtttttatttccttctttcattactttgtgataggaccataaaatagtctcccatgcaaactgccgcattatgtaaatcgttccaagttaaagtcttagttagattcagtaatttcaaagtttattatttttaagataagactgaagtgctccttttcttttagcagggtggagagtgtaggtaaaaaaatggggattcagcccaaaatcaaacctcaccttctgaatcatgagccagatctctgttaatgaattttcttttcctgacatttgttggtttctcgttacaatttctcccacgctgactctacaaagggaaagataaaatcctttaaaagaatgtaaacctcagatcacacacacgcacacgcgcgcgcacacacacacacacagacatgcatacataagtctaatggatcttctctgaatagaaaaatagaagtccatagtatcaactctaatattcattttctcacttatttgacagtgaaagcttatgttaagcaggcagggagagttgcttcccagtgccgatcttagcacattactatttatcaatcatatattcatggtatctcagcatcaaaacaacctgaagcatttacacttaaagttgtttttaggctggttcaatgctagattaaaacag

SEQ ID NO: 586416 - DNA, 4001 bp, Homo sapiens
atgcatgttgagtatcttatttattaccttagtatatgtgagtggagtccaggttgttctgagggttatgggaaggaggctgggtgaaatcggtgataagatagtaaggggtaggtgcaggtattcaacaaggcgttggctgccaagaccagggggtggtctttctcccccccgcccccaggctctttccacccactcctacagttctgtggaggagtgtctgctggtgggctcccctctcctcccccccaccaacccgcgcccagttttctacccccttctggggaggtgattgttggcacagagggaaactcccttccgggctatccacccctttcccattagcctttggtggggaggggttctccagttaaaccagcccccctttgggcctacctctgagaagggtggggctccagccccctgcagctccttttcctttgggtggagaagtgggactaggaaggaaaggggaaggggggaggacccgatctctgccttttcaaatgcaaccggagaccaaaggcaattagaccattgggaccatttccgacctggcgccgcgaagcccgggaagtgacaaggtaatttggacctctgaccgacgtgcaaactggtcggagggctgcagcacccgggctgcccaagtgggccgcaattttacggtcctttatggactcctggcttccgcgcctccatgcctcttacaccctgccagccacaaactgcccggatcggcgtttgatcttgccctcgcctggggaaagtgtcttccccgagcaattgaagcattccccgagcagttgaaacactgggtgcttggggtgagcttcgaatcccccaagtccaggacttgcatccgccccctcagcaccccgcactcaaggcactgctgtcaccctcagtcccgccaatgccagaacacagtaggagacccccgccagaacgcagatagcagagagagttgctcaggtgggtccccccagccatcctgccctaggggaagggagtgtcttcctcctggcctgcgccgaagtgaagggtgggcgcagtgggaggcccggggagcggaggggcacggtggctacctttgctgtgctggtactcggcgttcccggtggcgcagtccggggtgcagctcacctcgatttcttcatagaaatccgactcggtgtccgagctactgggttgcccctgtccggagaggctgtcgactgagggggccgggggtcctgggccgagcatggccgccccagctacctggggctcggcgcccggccccgccgcgctgcctgcgagtccatctaccggctcctcctccgggcctcccccgccgcgctcccgggtggccggagggacggcccgagggctcaggcaaccacggggcaccattttctcgggcggctccggcagcgggctgcccacggcttcggacaaatttgagactctcttgccaaccagagtgccaagctgacccccatccagaaacacaaccatgtcctttcggctctccatcccggggctctccggtgggggaggggaaagccccaagtgagttcctaaccccggctccctgggtctccagcggccggacggatcttggttgcaagagggagaaagaaaggccgggtgcctgggagggcgcggagctgctggagcgcggtctggaccgcgaccgcggcggtggcggtgggagctagggtcaccttgtgaagcgagcgctcctctgtgccgcaccgcctctgggaggaagccccattgccctcttctttctaagctgtcatcctcctgctgcaatcgtcattacagtaccgctggtgacgccactcggcgagcgcaagtggataaatagaaacgtctgccacagcgaagatgaaaggaaacccgcagctaatggctcggcagtgatgcgccaggtgtgggcctcgctcgattggggaggagagtgtgaaaacagacagagagacacacacactgagagagggagacacccaggcagaggggatgcaaatggaattccgcagaaagaaaagagagcttaacgcgcgcggcgagttccgcaggggcagcgggactcggtaattaaataagcttttgattttttcttttattgttgttttgacttttgttttcttaacttggtgccttgatctaacaccgatgaaagaatccataactgcattttagaagtgtgaagcccggcttacaagcctcaattctgtcggcattattacaactgtctgcccctggcagctaacctcaaactggctgaaaagtctttttacaagctacggaaaaatgtattcccccgccccaagttgactggagagcttgaggctgggccatcttttcctcttttctcctccctctccctacccacctctgtctccttactcctgcgaaccaaactttgctatttttcttccctaaggggcaagaaataaataccttattattattttttaatttaaagacccgccttggcttctgtaagagtgtgtgctgatttcttttaaatacctccttcccatctagatggccttaagttttccacagcctggcttcatcttgagatggctattcgtacaagaagtcgctttcccgtttgcctggacctcgcctgcactccaggtatgttgggtggggagagtttctaagagttgtctttttttttcccttgcccatattttaaagtattcgttcagaatcagcgaagtctcctggaaagaggtttttcgaatgaagaggcgccaggaatgcggcccctgctgtggcagtactggaggcccctacttgggagaaggcagtagctttcaccgcgctattttgggcaggggttcagcctccccgagtacaaaaaggttggggttcatagaggtttgactcataaggtcctctcccaagtccctgcctaggggcagtggtacctgtctccaaaagtggatggcgtttgaggtagaagagagtgaagtcgctgaaaatgccctaaaacagcaagtaagtagggactctgatgaagggctggaggtgggggcaggggttgtggaacttaatatctggaagctgccataggcctctcttggctcctctcccagggaagaagctggtataaaactccttcaaactgaccctttttgagctccaagcaagtgtgctggggccaggtgggtgggctgagtctatccccacattgctgagagcaggaggtgggcaccttctatgctcaacccccctttctccgcctcctcccgaagagcttctagccctaggcagccagctgcaaagggcagcccagcacctccctcctttctgtgtccctagcaaagccccagcttttacaggtaagtcctcttccgtgacctttttatctgttatctcctacttttctctcctcctttttctctttctgtattcttctccttctttgcttctctcctccatcttcctatccatagggttaaggaaggtagaggaagtaaggggtccaaagaaagacaaagtttcctcttcactccggctttccacttctctttcagtctaagacgatgttcattaatcttgcctgggggcggaggcagcgggatccggaaggtagtgtccacatagatatttctactccttgggactcctgaagccactatatgctgagcactgctagccccaaaatccagggaaatgttttagaggtgagaggatcaattgggagtgaggggagtcaaatcctagaaccttttcctgccttggagagctgtccaggtattctatctttctctgtcctccctaccagcagccacagcctgagggagcacctggcttgctctctttcctgtcaatggcaagccccctgggcatctgtcttagagcttccaaggttgcctactctctatagggccctccagcactgggcctttgaggtgcccaccctcctttcctccttgagcgcttaaccttctcgtgagtagcctgctgcccccatctcctgggggctgggtcctcagagg

SEQ ID NO: 586417 - DNA, 4001 bp, Homo sapiens
gatggataaccacaaaatcttagccatcaagcagtagggggttcctcctggagaatattaaggaatggtcaagcaaaggcaatgtatgttctgaattagcattagtaaaaaaagctttaggttggctttcatgctgttttcaaaaatatgacatttagagtaaattcaactggccctgaggaaaatacaaatagcataaaagaaatgggaacagcctggagaatcaaaagtacacagatgagatgacacatttcactttcattagaaacagccactcctcctggatttccataacatttcatgtctctctcgtagtcttatgtcatcatttttactgacatgttttatcccccaggtaaactatactctcctcaagggtaacactgtgcctgcttcatctttgcaaaactcagggcatttactcattaagtcaacaaatattattcaatatgtaatacgtgccagacgccatactgtcaactggcactaaatacctattgtttaaataaatgttgactataaggtagaaaaaacaaacaagttcaaaaaaggatccaaataatgtcctggtattctaattccacaggaaattcagatgggaaacaacaaacattcttattggaattttagtatcatgagatacatctacactacctgcgtattgtcacagcgagaatgtgggcctatagattcacaatacaacagcacttcctctgtatggcctaccaagtatattaagcatttccacacagagatgtttttctcttaagcccaaaagaaaattaaagtaatgatttaataggccataatcttaaagcctcctaaataagacccataagatgtgtctttgtcagtgagtggtaagctgttctaatggtttgatacatgcattcattgaagtgcttagtacctaccagataatgttgggccctgggttttgaaaagatgatcaatacattccagaaaacttgcaagaactcaaacaaaagtttagtataggtggggaaaaatagagtgtttgtttatgaaaaataaacgagttgaaattcaaatgccaacaacgtaaaaaacgtgccataataaattttatttagattggttttagtcagtacctgcatcatatccaagattcttgaaagggttcccccatcctcaatatatttcgcttttttaaaaaaaagctcctaaaagatccaccgctcccactccacccccaccctaatcttctgggaggtgcagaggggcagtgcatggaggataatttgaaattggtttggttctgttttttaaggaatggaccagaatgcggaggcagggcaaaaaattgaaaaccgatgtgtgccttcaaacccagtcctcctaccagctcactgcagattcttgtatttgtggctgtggccacgcacaggtggttgaaagtatccagagtgtgaaaacacaaatctgcaactcgtgacaggaatctccggactccaaggccttacaccccaaagtccaggaaacaagacgcctttctcagtgagtgctgctacaggcaaacaataaacaagcattttaggaatcaataaacacacctttacacctggttttctctaccaaacccaaatagcgtgctttggggtcccgagactgtaatagaaggtgctgcccctaaagaaaagactgaggcggggctcctctctctatagctaaccccagaaaaaaaaggtggagggggaattgctggggccctggggaggggttagagccctggggaggggctgcgggaggcaaggaggaaaggggagagcagggtgggacccagctaacccttctcccttccaaagcggaggtcgagccgctgcccccagtccccagaccctgcctcctgcctccctcacctgatcacagagatgagcagccccgaggggtctttgcttttgctgactgtgcttctgtatttcccaccagctgcttctgccgccatcttggacgcggggagagccgctaggctccaaggaagccaagggtgcgtaaattctgtatttgaccccgcaggagtctccaccaatgggtgaagagaattccagaggcgcggaagtggaaaatccaatcactgaagtgaggaggcgggactaagggagcaagttttgaggccacgacgcgcgtgttctctctaagcactctgggagtcgtagttttccttctccgtctcctgggcgcgcaggaaagctaaaccagctgcaacttcctaagtcttgtaatgagtgtcttcatttatctttattctgacttccagcttttttcagtttccttgcttttagaattttgtcaggctttaaatcaaatttatctgatgatgccaaaatgtgttagggtttgtatttaaatgaaagaggggttctctgccggatgtctatgtgcgaagtttttgccttaagtgcaagtgattttttaaaaaatccaataaaatacgaaaatgaatataagcagaaatgcttttctttagtattctgtaaaactaatgtttctacattaggtttatgtggagttcaatttttcccaatgttcctatatttccagatagttctaaaaccacacgtacaggaataaatgaatattgatgaagaaaagacagtataagctaaaaacaaacagaccacactgcagattccttttttttttttttcaagctaaatgaaatacttagtagtaatgcacatttgtgttaatacttttaccggtaagtttttagtatttcctgcatttggttccgttggcttagtcattaattcataagaccaaatgaacaaaacaaaacaaaaaagaccagaatgtgcgtggaaagtggttagactgaggaacaagaataataataatttaaaagtaaggaaggaggtggcctgctcagtagcaataaagattgaagaacttaaaggaatagaaagcaaactaactcagaggtcatggagttgtgagcagcaagctcagaacacatcaattacttttattaaatagacatcgagctggtagaagttcacatttttaaaaattagttgaagataacacacacacacacacacacacgataacttaaaagtattcataacctttggcccaataattccagttctagggactttgttcctaaagaaatatagagtattgacattttttaaataacacagaagaattaaataaattatgtaacattcaaatgaggaaataacatatagcttctggaaatcataattttaatggcttttaaagaaaataagatttttgggccaagtgtgatggctcacacctgtaatcccaacactttttgagaggcagagccgagcagaccacttgaggccaggagtttaagacaagcctggccaacatggtgaaactccgtctctactaaaaatgcaaaagttagccggaccgtggtggtgtgtgcctgtaatcccagctgcttgggaggctgaggcatgagaattgcttgaacctagaaggcggaggctgcagtgagccaagatcgttccactgcacactgcacgccagcctgggcaacagagggaaactctgtctcaaaaaaaaaaaaaaaaaaaagatttttatggtataagtacaaaaactgggctataaaattaaataattcatagagaaagggagaggcagttgggcctagtggttaagaatgcaggacaggccgggcgccgggtggctcatgcctgtaatcccagcactttgggaggccgaggcgggcggatcacgaggtcaggagatcaagaccatcctggctaacacggtgaaaccctgtatctactaaaaaaaaatacaaaaaattagccgggcgtgttggcgggcgcctgtagtcccagctactcgggagcctgagtcaggagaatggcgtgaacccgggaggtggagcttgcagtgagtcgagatcgcgccactgcactccagcctgggcgacagagcaagactctgtctcaaaaaaaaaaaaaaaaaaaaaaaagaatgtaggacatagg

SEQ ID NO: 586418 - DNA, 4001 bp, Homo sapiens
ccacaaaaacgagaatttaagatgcagtgttcctgtttccgggaaaccttaaatattacatcacccaacacacctccgaaaagagagaacaagacgctttatatctatgactagaatcctacctattcctaactttagagaccatgaatagaaaattaaaatatatcttaaatacttgttttcctgcaaataaaattacaaataaacaagttaggattacacacttgtacagtattcctaaacatgaattagttgctaatgcttatgaagagtaatagaaaataaactccaaaacccctaaaagtataaactacattcaattgtgacagcattcgtgtttttcaaaggtttattaaatgctgttttatgatgacatcaaaacgccacaaaattaaactaataataacttgcttgaaccctaaaaagcaagcctttaagtaaatagcaaagacacatttttatttccaaatgaatttaaatgttacagatcctgtgtgataaaggaagtttaactgtggacagcacacgttaaatttcttaggcaacaaacatttctccatgcagtcttttctgaatcaccaaagctattgttcacagaaaacgagaccaattaataagaaactgctaaccgtataatctaaacacacatttgtcatagccattctattttgatcacctacttctaccacctcatcctcattcaacccgtcgggatttggggaataatctggctgaatgacagttgatttcgttagcacctgtcgccattctcagatgtatcacacaagttggccaaaacagcttgtaatgtttaaggattacgattctttagaaagtggcaactcactaggcgttcaccaagttttccaaaagatcgtgcttctcgattcctcccgctttcaaaaagtaaccctgtggcacagatttttggggggaacggaaggggatgtacacaatgaagtgggaattcaacaggacgccctccagaaacacaatcaatagagagcagagcagctcgactcttccctcaaacttagcataaagccagaccaggcggcgagggcagcccgcgaccgccggagctcagggggatttcggggtgcgtcgtggggaaacgtcagaggcgaagctactccgagttccccgccgcgaacgtcgtcccgcgagcgccgcggccccagcccggggtcggcgcgcccgggaccgggggcgtgcgcgaggcgagggccgagccctgcccaccccggcagcggcccgcgcctccccacgcccctctcccgcccgccggcgggcccgggtgtcatgccccttcccctcgcgccgagccctccggagacacagtccgtcctttgtctgagtgcggactcggcggctgggtcccaccaacttgtgtctgtcccgtcccacccgggcgctcccgccgcggccgcgccacacaaaggagacttgaggctcgagctgccaccctggaccgggcaccggaacgccccgaccccggccccggcgccccggccaggacaagcaccgggaaaggagccccccacacgccccccgccccgcagctccaggggtgtgcgctgcctcactcgcagggtcccgcgggccagcccgaagctcacagctccttccggggaggggggctctcccctcaccctccaccccccgcacgcctacaaacgcggcgccccggtgagccccgctcggcgatacccgggaccggcacagcagtggcggggaggtcctggcgccgccgccgccgcccggttcgcactcccggagccccgccggccgggccgcccgcagcggcgcgttaccttcgtcccgcgcgccgactcgcgttgttcccgcgcgtcgcccccgcgcgccgccgccgccgccgccggggctccactgccttctgagtcccaccgggtgtcggacgcgaccggaccgagcgccaaacgcggcagcccaatcgccatcgcttttatttggcccccccagcccaatcaagcgccgccccgattggcgggacgcgaggcgggcgcccgtccaatcacagggcccgccgggctcggaggcgccgagccagccccacgcagagtgcgctcagggctcgtgggcgggcgggcactggcagcgcgtgcgcgcgcgggcggcggcggggttcgctgtaagggacgccactggccgtgtggaagcgccgccgccgtctctttgttctttcgctgaacacacggcgcctctcaggaaggcggtgtgcaggcacgcggggaccgggagacatcgcgggggcccggagcccgccgcggacgggaggcggggaggataggtggcgggaaccggccgaagggcgggacgaagcgccggcggctcttggcgggaaccggcgccgcagagttcccgggcgggggaggggcggggcgggtgctggaagccaagtttgaaccagttcaaaactcgggggtggtaacggttttaaccgccgcgctcgtttccccgcgcgcggagccgaggcccgggctggccgctcctagtggtgcccggggaggggagggcgcgggccccggaggtcggctcagctgtggcgccgcgtttgccgggagacgctcgcccggcccgcgcgctgccgccggacccgttactacttttttttttttctcctgagacggagtttcgctctggttgtccaggctggagtgcaatggcgcgatctcgactcaccgcaacctccgccttccgggttcaagcgattctcatgcctcagcctcccgagtagctggattacaggcatgcgccaccacgcccggctaattttctatttttagtagagacgggtcttggtcaggctggtctcgaactcccgacttctggtgatccgcccgcctcggcctcccaaagtgctgggattacaggcgtgagccaccgccgccgacccgggccctgtttgattatgtctgctgctgccttggccgttttttcccccaccgctggactttggctggccgagcttgcagtgcttatcgccctagaaacctgtgaaagggcgacattgctgccatttcagacccttccactgttcgtagttctaagcacgtgtcagtgttaaaaatcctttatcaagatgagcactgttcacttgccgcctctgcaaagtgtgaggatatttgcaaggcgcggtggctcacgcctgtaatcccagcactttgggaggccgaggcgggcggatcataaggtcaggagatcgagaccatcctggctaataacggtgaaaccccgtctctactaaaaatacaaaaaattagccgggcgtggtggcgggcgcctgtagtcccagctactcgggaggctgaggcaggagaatggcgtgaacccgggaggcggagcttgcagtgagccgagatcacgccactgcactccagcctgggcgacagagcgagactccatctcaaaaaaaaaaaaaaaattgatcttggttatggggggtcaagctacctcaacccagaggaattagagggattctgcttaggatacagtctctcctattgcttcatgtggcaatgcagttaagagtattccgaatttatttttactaggatgtatctatggggtaaaataccattgtcatgtaaactgagattccatattgagagttcatactggaaactgaaaaaaggtcacctatgaactgttggggtaaaaatctgaagaaatatttttaatgaatttaataactagccagaattttttttttttttttttttttaagaaacggagtctcacactgtcgcccaggctggagtgcagtggcaccatctcagctcactgcaagccccgcctcccgggttcacaccattctcctgcctcagcctcccgagtagctggggaccacaggtgcctgccaccacacccgactaattttttgtgtttttagtagagacggggtttcaccgtgttagccaggatggtctcgatctcctgactttgtgatccgcccgtctcggcctcccaaagtgctggga

SEQ ID NO: 586419 - DNA, 4001 bp, Homo sapiens
aattgtaccagaaaataatttaatatgaatttttaaaccaattccccaaagagatgtttttcaaaatatctcatggcaagtacaaagaatagtaattatcaaatacagagaacactcaagggcaaagttagaaatttttatcctaggctgggcgtggtggctcacgtctggatcagcattttgggaggcggaggcgggtacatcacttcaggtcaggagttcgagaccagcctggccaacatggtgaaaccctgtctctgctaaaaatacaaaaattagccgggtgtcgtggtgcgtgcctgtagttccagctactcgggaggctgaggcaggggaattccttaaacccgggaggcagagattgtagtgagcccagatccagccactgcactccagcctggacgacagagcaaggctctgtctcaaaaaaaaaaaaacatatacacacacacacacgcgcgcgcacacacacacacacacacacacacacatatgtatcctaaaatatccgaatttctgccaaaaatctgcataactaccttatctcataatggacaagattattaataggattttttaaatacagaattaatagtaactaatataaacgttacttttttgttataatgtctcaacacttagaccagcacctggaatgcccgtacagtggtgtcaacactctccaaaatatatgtaataaatttatattgcatttatttgtctccatttttatgaaaccttaagttagcagatgcacattagatctttatcatataggacagtgcaaccagaagaacgcctatgtttttctaacttgttttcttggaatatattcactttccacaaaaacgagaatttaagatgcagtgttcctgtttccgggaaaccttaaatattacatcacccaacacacctccgaaaagagagaacaagacgctttatatctatgactagaatcctacctattcctaactttagagaccatgaatagaaaattaaaatatatcttaaatacttgttttcctgcaaataaaattacaaataaacaagttaggattacacacttgtacagtattcctaaacatgaattagttgctaatgcttatgaagagtaatagaaaataaactccaaaacccctaaaagtataaactacattcaattgtgacagcattcgtgtttttcaaaggtttattaaatgctgttttatgatgacatcaaaacgccacaaaattaaactaataataacttgcttgaaccctaaaaagcaagcctttaagtaaatagcaaagacacatttttatttccaaatgaatttaaatgttacagatcctgtgtgataaaggaagtttaactgtggacagcacacgttaaatttcttaggcaacaaacatttctccatgcagtcttttctgaatcaccaaagctattgttcacagaaaacgagaccaattaataagaaactgctaaccgtataatctaaacacacatttgtcatagccattctattttgatcacctacttctaccacctcatcctcattcaacccgtcgggatttggggaataatctggctgaatgacagttgatttcgttagcacctgtcgccattctcagatgtatcacacaagttggccaaaacagcttgtaatgtttaaggattacgattctttagaaagtggcaactcactaggcgttcaccaagttttccaaaagatcgtgcttctcgattcctcccgctttcaaaaagtaaccctgtggcacagatttttggggggaacggaaggggatgtacacaatgaagtgggaattcaacaggacgccctccagaaacacaatcaatagagagcagagcagctcgactcttccctcaaacttagcataaagccagaccaggcggcgagggcagcccgcgaccgccggagctcagggggatttcggggtgcgtcgtggggaaacgtcagaggcgaagctactccgagttccccgccgcgaacgtcgtcccgcgagcgccgcggccccagcccggggtcggcgcgcccgggaccgggggcgtgcgcgaggcgagggccgagccctgcccaccccggcagcggcccgcgcctccccacgcccctctcccgcccgccggcgggcccgggtgtcatgccccttcccctcgcgccgagccctccggagacacagtccgtcctttgtctgagtgcggactcggcggctgggtcccaccaacttgtgtctgtcccgtcccacccgggcgctcccgccgcggccgcgccacacaaaggagacttgaggctcgagctgccaccctggaccgggcaccggaacgccccgaccccggccccggcgccccggccaggacaagcaccgggaaaggagccccccacacgccccccgccccgcagctccaggggtgtgcgctgcctcactcgcagggtcccgcgggccagcccgaagctcacagctccttccggggaggggggctctcccctcaccctccaccccccgcacgcctacaaacgcggcgccccggtgagccccgctcggcgatacccgggaccggcacagcagtggcggggaggtcctggcgccgccgccgccgcccggttcgcactcccggagccccgccggccgggccgcccgcagcggcgcgttaccttcgtcccgcgcgccgactcgcgttgttcccgcgcgtcgcccccgcgcgccgccgccgccgccgccggggctccactgccttctgagtcccaccgggtgtcggacgcgaccggaccgagcgccaaacgcggcagcccaatcgccatcgcttttatttggcccccccagcccaatcaagcgccgccccgattggcgggacgcgaggcgggcgcccgtccaatcacagggcccgccgggctcggaggcgccgagccagccccacgcagagtgcgctcagggctcgtgggcgggcgggcactggcagcgcgtgcgcgcgcgggcggcggcggggttcgctgtaagggacgccactggccgtgtggaagcgccgccgccgtctctttgttctttcgctgaacacacggcgcctctcaggaaggcggtgtgcaggcacgcggggaccgggagacatcgcgggggcccggagcccgccgcggacgggaggcggggaggataggtggcgggaaccggccgaagggcgggacgaagcgccggcggctcttggcgggaaccggcgccgcagagttcccgggcgggggaggggcggggcgggtgctggaagccaagtttgaaccagttcaaaactcgggggtggtaacggttttaaccgccgcgctcgtttccccgcgcgcggagccgaggcccgggctggccgctcctagtggtgcccggggaggggagggcgcgggccccggaggtcggctcagctgtggcgccgcgtttgccgggagacgctcgcccggcccgcgcgctgccgccggacccgttactacttttttttttttctcctgagacggagtttcgctctggttgtccaggctggagtgcaatggcgcgatctcgactcaccgcaacctccgccttccgggttcaagcgattctcatgcctcagcctcccgagtagctggattacaggcatgcgccaccacgcccggctaattttctatttttagtagagacgggtcttggtcaggctggtctcgaactcccgacttctggtgatccgcccgcctcggcctcccaaagtgctgggattacaggcgtgagccaccgccgccgacccgggccctgtttgattatgtctgctgctgccttggccgttttttcccccaccgctggactttggctggccgagcttgcagtgcttatcgccctagaaacctgtgaaagggcgacattgctgccatttcagacccttccactgttcgtagttctaagcacgtgtcagtgttaaaaatcctttatcaagatgagcactgttcacttgccgcctctgcaaagtgtgaggatatttgcaaggcgcggtg

SEQ ID NO: 586420 - DNA, 4001 bp, Homo sapiens
gctttaaagtggccccgataatccctgcctccaggtgttcatgtccttgtgtcacccccttcccttcagtgtgagttgggcctagggactcacttctaatgaatataaaatggcaaaaataatgggatgtcgcttctgaggttacagaaagaatctgacttctgtctttctctttttctctgtgggagccttctctctggggggagtaagctgccatgttgcaaccattctttatacagaggcccatgtggcaaagaactgatgtgtacagccagggtcagtgaggccaatcggcctgccagcagtcatgtgagtaagcctgggagaggtcctcgaccctacgcctagccttgagatgactgaggcccagtcaataccttgattgttgatacagcttgtgagagaccctgagtcagagactcccagctaagcccctcctggattcctgatcacagaaactgtaagataggaggtaacaggacttgttttgtttgttcgctttggtttgaagctgctaggtgttggggtaatttgttacatagcttatagataaatcatacacctccaaaagtagaaacaatccaatgtccatcagcagtagaatggataaattatgtacatttacaccttaaatgacgaaaacgaaaatggaaggaagcatgaaagatgaatctataaaacttaagaatacgtacaggataatgtcattaatataatgtcattataatgagaaagccaatacatatgttttaggaatacacacacaaatatggtaaaactaaaaagaaaagcaagggattcattaaattaagacaaaaatcacgaaagatgtcacatctcagagaatggaggagaatggaccatgggcatcagttgggactcatgggcttctaaggtactgtgacgccctatttcttgacccaaggagatggtcaggcattcgtttcattattttttagaccattctgagatatttcatttactttttattcaacattttaaaacaaagtattgaaaccaattcatcaacaaatcactagtttggaggatgaaagtgatggaccgatggttggctggtcagctagacagacacattctgtcctttacgtctagttcgagctgtacttcttctaaatttccatgattatccaattggcaaagatctttttctcctgtacttaaggccttcttccgttgcaggttgggccaaactagcggccagctctcggctgtttaccagggaactgtatcacccagcacttgctgcttcaggccaaatgcattccagactaacattcagcctgaatccccgcgccgctctcaccgccacccctccccaggtcccttcccccaccacaaacccacactgcgcccgtgggcgcctagagcactggggtggatgagaacttccacctgggcttaacggagacaagctagcctagaagaatgcaagcccccagctggcgagatcaaatcgcctcgagggttcctgctagctcagatcttaatggctccttgcggagcaaaaaacaaatcctacgaaaatagggggggtcatcgcctcctgcccagcagagggcataacaatgcggcgagaatgaaataggcaccgagctgcagagaaaaatcatcaacggggtagagacgaaggaagggatcctcggtggaacggctctatcacctgggggcgcgcgcagaggccgcaatccacgcccggccctccccagacgctaaacgtcgcaccccgcccaccgctccccgccccggacactaacccggggcccaggcctcggtcaccgcgggcctctcctggtccagagtctacgctgaaccccactcactgtttgccccgctgttccctgcagcgcgggttcggggcagtagcaacctgctaggagcgggaggcggttgttcccaggaggaagcagcttctccgcccaggaggcaaagggcagcgggctcgaaactacaggacttggaaagtcttaggcggagactgcgggggtggggggtggtgaggaggggccttccagggagctgattggtcgacgcggacgggggcgggacttggccggcgccgtccctcccctagacctcagaggccctgcccgcagatgtggcgccaaatcccggatgcaggcctaggcgccagcccaggaatatagggagcaaattgttaagaacaaaacaaaacaaaacaaaagtgagaatacttctgaacaagtgacggccttgataaatagcgagagatgtttatataaaataatacaggactatttttaaggacgagtgaaatctatcggttctagctatagtttttaattaaaaaagcaagttgtattaaaatggagagtaggatctctctttccccctcccctcccctcccctcccctcccctcccctcccctcccctccagggggagggtctgcttctgccacccaggctggagtgcagtggtgccatcacagctcactgcagcttcaacctcccaggctcaagcgatccttccacctcagaggctgggaccacaagtgcgccgccaccacgcccagctaactttttgattttttgttagagacagggttttactttgttgcccaggctggtctcgaacgccagggctcaagtgatcctcccgcctcggcctcccaaagtgctgggatcacaggcctgagccactgcatcagctttagcattacattcgtgtatgaagaagacatgctgcatgtgcttctataagaggcggggctaacggtggagaaattgtctattgattcttaccttcacaaccactgaattgtttttttttaaaccaatacattgtttttataagtttaataaaacagtaaggcgttgagaatgttactaaccaatcaacagatgacagatattgggcatgagggaggaaagaaagaaaggagtagcagggaaaaagcctggactttgaagccaccacatcctctgcttacaagttgggcagtgtattcattgctaaggctgctgtgataaattttcacacatttagtggcttaaaacaacacagatttactactatcttccaggactgtaggtcctggaagtccagcacaggtctcactgggctatcatccaggtgtaggcagggatgtgtttctctttgcaggatctagggacaaatctattttccttgctttttccagcttccagaggctcccgcattccctggcttgcagccctttccttcatcttcaaagtcagcaatctcatggctccagcctctgcttctgtgtcacatctccttctttgagtctcctgcttccttctttcacttagaaggaccttgtgattacattgtgcctatccagataatctagataatttcccatctcaaggtcagctaattagcagccttcattctgtctgcaaccttaattctcccttgccatgtagcattgcgtatcacaaattctgggaattaggatctggacatctgtattaatccattttcacactgcagataaagacattccccagactgggcaatttacaaaagaaagaggtttaattggactcacagtttcacgtggttggggaggcctcacaatcatggcagaaggcaaggagaagcaagtcacatcttatgtggatggcggcaggcaaagagacagcttgttcagggaaactgccgtttttaaaaccatcggatctcctgcgacctctccactatcatgagaacggttggggaaagacccacccccatgattcaatcatctcccaccagatccctcccataacacgtgggaattatgggagctgcaagatgagatttgggtgggggcacatagccaaaccatatcaacatctttagggagctatttttctgcctatcacagagggcttgttaacttctatcttagtgttttcatctgtaacattggggataataattgtctctacttcatggaatttttatgaagattaaatgacttaatacagataaagctcttaaagcagtgtctgg

SEQ ID NO: 586421 - DNA, 4001 bp, Homo sapiens
ctctgcactgtttgcagttacgtgtcttacttttgtaaattaaaaataatatacagttcaaacaatagttaaccaaaatgtatttttcggtgtacagttcaaatcgcatttctttctttcctttttctttttttttttttttttttttttgagacggagtctcgctctgtcgcccaggctgcagtgcaatggcgcgatctcggctcactgcaacctccgcctcccgagttcaagagattctcctgcctcagcctcccaaatagctgggattacaggcgcccgccatcacgcctggctaatttttttatttttgtagagacgggatttcaccatgttggccaggctgatctcaaatcactgacctcaagtgatccgcccgcctcggcctcccaaagtgttgggattacaggcgtgagccaccatcgtgcccgctccccatttctttcctttatgatatcagctgagagctgctcctctctcttgtgtatgtggccacttcacctttctcacaggtgctggctccagcatgggaaatgcagggtggtgacagggacccagactaagtggactggattcaaatcccagagctacactttaccaacggtgtgactttggggaagttacctaattcctctgtgcctcagtgttattacctatacaacggggatgagaaaagtaatacctatactaagccttattataaggcttaagttaggtgagtttatgcttgtaaagttcttgaatcaatgtctggtatacggtaagactggatgagtgcctcataaataaatattcaaatcatcctaaaattcaatatttcatatttcaggaaaatgcataccttttaatcctaactggggtttgagtcccaacccaagccatactccctttccccatctcccttcaactccctttctccaaattggatcattaggaacaagtcagaaggccatgtagataggtgagctccgcggcaggttttatgtaaaggaaatggcagggagagaaatcaagagaacctgaattcaagattctgccaagtcaaggcccacctgagagacagtgagcacatcttttatcttctccagtgttcagatttttcagctaaatgaagcgggctagtgactggcactcactaagtcccttccgggtctgcaatgtcaggactaacagcaccgcaagttaaaaccctgtaatactgaatctcgtgcaaaaattttaaattcagaacaaaaacgcatacctaaaaataaacattaataataaaggacaaaatatacaaggtaagggatgcaagctaacttacctctcaggatgggggcatgagatttggtggggggaaggggtttttaagtgttttatttcttagaaagaaaggggggtggaggaagagagggagcgctgaagcaaaggtgataaaatgtcagcatataataaatctgtcatattatctcctgcgcgtagctttgaaatatatttcataataaaataaaatatgttgctggttatgttcctggagaagaaatgcagtatgaaagaaataagagactggtagaaagaagctgaaatagaaacagcaatggagaaagcgcaggcaaccctttttgaaagacatctacctccctggacccaaaacccaagggggtcccaggccaaaaacgcgaccactttggcagccccgcgtgcgcccccctcggccgcgctccccaaggaccccgacccagtgcctccttctcccacccgcacctcagcggactgcatcgggagccgcccctgaattggtccgtgtgcccgggcctggtctggtccccgaaaccagctttggacgagactcaccctttcgtccagcaatttccacaccaggctactttggagtggggagtcttccacagagatgtgggaaggcgctggggcagacgccttgggaatttgcaaattggtagtgaagtggctaggaggaggcgtgtggggggaggtgggctgcagtgcagacggttgggggttggggcgtccccgggagctgattggctgccgcgggtggaggcggagcttggccgccgcccccggaccgcagaggcccggctttgtgtcagtttctaccccaagatgccgccccagatccgggatggagacccagacgcccgccctcagagtgcagcaggacgatttgtttcaaagtaaatcgttgagactgttcattaacaagggagcgatggataaataatgatgatctctgtgtaaaataatatacaactatttccaaggatgggttaaatctacttatataaatctacttatatattgcctctatctatatatttatatattatttttaaaataaacatctaacatagtaaaaaacgttccattttgtgtaaaaaaaacttcaaaactgttcatatgtacttatataaacacagaaattgtatggaagataaactattagaaccagttacttcagacaggaaagtggattacttgttatttttttcttgatacacctcattagcgtttcaatagtcacacgcattattttgtaataaaaataaatttaatcaactaaaaaactacataaaatatcctcacccaagcagctggcagcggcttctctacaaatatgatttctccctgtggagaactttgttgctagttctgatccatgttatttgagtggaacacgagacttgaccatggagcaggaactggctttatgcctgaccaggtcctgcactcgcatctactcatctaacctggagagctcaactgtaaaacctggaggaaccactcatctctttttatggctggtccccagggccccagggagatttgcatggcccctgtcctgtctccagattcctcacccctcactgccctggcccctgtttgctgggtacctaaggaagggttgtcctgggaccaaactgttctctggaagagaccatcacaaagctttctcccttactacaaaagtgtagtgtccagagtggaccttccaggggaaggtggcttcagtggtgaaagggacagggtacgacatcccatataaattaagggtttcatttcaactgctccaactacaggaagcataggttaagaactctattttattctttctattccccacttcaactaggtcacaaacaggtgctctgtaatgtccactggatggatggatgaaatggggtaagaaagaaaatccttaggatcattcctcaaaaaaacaaacagcagcctaaagcagaaaatggatgaaattacacacctcctgtgctgtaagtaagttttctccttccttcatgctcttttaatgcttcctcaaattttacctttttttttttttttttttttttgagacagggtcttgtgctggagtgcagtggagcgaggctcactgcaacctcgaactcctgggctcaatcgatccgcccacctcagcctccccagtagctgggactacagatgtgcgcgccatcatgcccagggagtttttgtatttttttttttttttttttctgtagagatggggtctcactttgttgcccagactggtcttgaagtcctgggctcaagtgatcctcctgcttccgctcccaaagtactgggattacaggcataagccaccctgtctggctgcttcctcaaattttgagctggttctatctcctctttctcagtctcagacaccacattataagctaaattttaaatgctggatcctttcttatttctacttccccttgagtttgttttcctttctaatgttctgcctggagtagctctgagtaacgaagactgctatgaaatcctgaaagtattcaaataacttttgagatactaagtttggtaaatattctgaaacatgtgaataaatgaacaattaaaaatccatatcaaaaatattacgcaattctttaaaatgagctcaattcataccttgagaaattgtcttaatgtatattttcagcaataaaagtatgatcctactttttgcagggaaaaaa

SEQ ID NO: 586422 - DNA, 4001 bp, Homo sapiens
aaaattgaatacacataaatcttataactccgcaattctactcccagctatatactctagggaagctcccacacaagtgtacttgaatattagaggacatgggcaggctttaaagtggccccgataatccctgcctccaggtgttcatgtccttgtgtcacccccttcccttcagtgtgagttgggcctagggactcacttctaatgaatataaaatggcaaaaataatgggatgtcgcttctgaggttacagaaagaatctgacttctgtctttctctttttctctgtgggagccttctctctggggggagtaagctgccatgttgcaaccattctttatacagaggcccatgtggcaaagaactgatgtgtacagccagggtcagtgaggccaatcggcctgccagcagtcatgtgagtaagcctgggagaggtcctcgaccctacgcctagccttgagatgactgaggcccagtcaataccttgattgttgatacagcttgtgagagaccctgagtcagagactcccagctaagcccctcctggattcctgatcacagaaactgtaagataggaggtaacaggacttgttttgtttgttcgctttggtttgaagctgctaggtgttggggtaatttgttacatagcttatagataaatcatacacctccaaaagtagaaacaatccaatgtccatcagcagtagaatggataaattatgtacatttacaccttaaatgacgaaaacgaaaatggaaggaagcatgaaagatgaatctataaaacttaagaatacgtacaggataatgtcattaatataatgtcattataatgagaaagccaatacatatgttttaggaatacacacacaaatatggtaaaactaaaaagaaaagcaagggattcattaaattaagacaaaaatcacgaaagatgtcacatctcagagaatggaggagaatggaccatgggcatcagttgggactcatgggcttctaaggtactgtgacgccctatttcttgacccaaggagatggtcaggcattcgtttcattattttttagaccattctgagatatttcatttactttttattcaacattttaaaacaaagtattgaaaccaattcatcaacaaatcactagtttggaggatgaaagtgatggaccgatggttggctggtcagctagacagacacattctgtcctttacgtctagttcgagctgtacttcttctaaatttccatgattatccaattggcaaagatctttttctcctgtacttaaggccttcttccgttgcaggttgggccaaactagcggccagctctcggctgtttaccagggaactgtatcacccagcacttgctgcttcaggccaaatgcattccagactaacattcagcctgaatccccgcgccgctctcaccgccacccctccccaggtcccttcccccaccacaaacccacactgcgcccgtgggcgcctagagcactggggtggatgagaacttccacctgggcttaacggagacaagctagcctagaagaatgcaagcccccagctggcgagatcaaatcgcctcgagggttcctgctagctcagatcttaatggctccttgcggagcaaaaaacaaatcctacgaaaatagggggggtcatcgcctcctgcccagcagagggcataacaatgcggcgagaatgaaataggcaccgagctgcagagaaaaatcatcaacggggtagagacgaaggaagggatcctcggtggaacggctctatcacctgggggcgcgcgcagaggccgcaatccacgcccggccctccccagacgctaaacgtcgcaccccgcccaccgctccccgccccggacactaacccggggcccaggcctcggtcaccgcgggcctctcctggtccagagtctacgctgaaccccactcactgtttgccccgctgttccctgcagcgcgggttcggggcagtagcaacctgctaggagcgggaggcggttgttcccaggaggaagcagcttctccgcccaggaggcaaagggcagcgggctcgaaactacaggacttggaaagtcttaggcggagactgcgggggtggggggtggtgaggaggggccttccagggagctgattggtcgacgcggacgggggcgggacttggccggcgccgtccctcccctagacctcagaggccctgcccgcagatgtggcgccaaatcccggatgcaggcctaggcgccagcccaggaatatagggagcaaattgttaagaacaaaacaaaacaaaacaaaagtgagaatacttctgaacaagtgacggccttgataaatagcgagagatgtttatataaaataatacaggactatttttaaggacgagtgaaatctatcggttctagctatagtttttaattaaaaaagcaagttgtattaaaatggagagtaggatctctctttccccctcccctcccctcccctcccctcccctcccctcccctcccctccagggggagggtctgcttctgccacccaggctggagtgcagtggtgccatcacagctcactgcagcttcaacctcccaggctcaagcgatccttccacctcagaggctgggaccacaagtgcgccgccaccacgcccagctaactttttgattttttgttagagacagggttttactttgttgcccaggctggtctcgaacgccagggctcaagtgatcctcccgcctcggcctcccaaagtgctgggatcacaggcctgagccactgcatcagctttagcattacattcgtgtatgaagaagacatgctgcatgtgcttctataagaggcggggctaacggtggagaaattgtctattgattcttaccttcacaaccactgaattgtttttttttaaaccaatacattgtttttataagtttaataaaacagtaaggcgttgagaatgttactaaccaatcaacagatgacagatattgggcatgagggaggaaagaaagaaaggagtagcagggaaaaagcctggactttgaagccaccacatcctctgcttacaagttgggcagtgtattcattgctaaggctgctgtgataaattttcacacatttagtggcttaaaacaacacagatttactactatcttccaggactgtaggtcctggaagtccagcacaggtctcactgggctatcatccaggtgtaggcagggatgtgtttctctttgcaggatctagggacaaatctattttccttgctttttccagcttccagaggctcccgcattccctggcttgcagccctttccttcatcttcaaagtcagcaatctcatggctccagcctctgcttctgtgtcacatctccttctttgagtctcctgcttccttctttcacttagaaggaccttgtgattacattgtgcctatccagataatctagataatttcccatctcaaggtcagctaattagcagccttcattctgtctgcaaccttaattctcccttgccatgtagcattgcgtatcacaaattctgggaattaggatctggacatctgtattaatccattttcacactgcagataaagacattccccagactgggcaatttacaaaagaaagaggtttaattggactcacagtttcacgtggttggggaggcctcacaatcatggcagaaggcaaggagaagcaagtcacatcttatgtggatggcggcaggcaaagagacagcttgttcagggaaactgccgtttttaaaaccatcggatctcctgcgacctctccactatcatgagaacggttggggaaagacccacccccatgattcaatcatctcccaccagatccctcccataacacgtgggaattatgggagctgcaagatgagatttgggtgggggcacatagccaaaccatatcaacatctttagggagctatttttctgcctatcacagagggcttgttaacttctatctt

SEQ ID NO: 586423 - DNA, 4001 bp, Homo sapiens
ataatacagccatgggaagattgtttttgaagattaaaggaatatggataggccaggcgcagtggcttatgtctgtaatcccagcactttaggaggccgaggccggtggatcacctgagctcaggagtttgagaccagcctggccaacatggcgaaacctgtctctactaaatctacaaaaaatagctgggcatggtggcgtgcacctgtaatcccagccacttggggaggctgagtcatgagaatttcttgaaccctgacggtggggggcggaggttgcagtgagccgatatcgcaccagtggactctagcctgtgcgagagaacaagactctgcctcaaaaaataaaataaaataaaataaaataaaataaagtaaagtaaaataaaataaagcaaagaatatgtctaaaaatgccttgtctggggttggtacacatacagtgagcacggaataaacgagagtgtctgtccctttgctgtccttttaagtttcccgggttgccgagggcagcgttgcagattgcagtagtgcagtagtcccctggctgcctgtgccgcctccctttgcgcgtctctgacgagcccactgtaagggactttcctctgtgctctgatggcttctcacctctgcaggtgcacaaggcagccctgaagtagcggtgagttgacactagggtgagcttcgcccagtagagcggggattcacagaagagtgccccgtggctttcccgaggtgcccatcagaggtcctcggaaggcacccggaggaaaggagcgccatgtggaagaccctcagccacatgctcctcctggctttcccttttttccttgtctcattctctccacttcctcatttgggctttttggtctcacttacccccaaaaaattacctgcaggtaagcccttgcataaggctttgctttagggcagaatctaaactaaaacacacaccaagcccttgagccacaagtgcctccttcctctctccctcctgcttctatatgcagtcaaccacctcatttggttaatctctcaccatctctctcaaacatcagtccctttagttggcaatcattccagactaaaccaatatggttttagtccccaggatgtattctcatccacaatcgtcctctacaagaactctaacaagaaccgttacatttcgtccactctctctaaggtgaaacttgcagagcgcctcagcctggcttctccagggtctggcatgccagtgattactggacgtttttcctgctactttcttccactaaatctctccaagctcggaaaggttggcattctgagcatgccctgcatttcctgtagaattccatctcttcccctcttcccttcctatccgccacctttttcttaatactgctcgcgggaaagaaattcacaaaagagagccaatactcggcagagcattgagaatgcgggtacctgatctcagcctcagaagttaccagtggaaaaaagcagccgagagagatccggaagcctgagctcaagatcgtgctagctacctcccagaagacaagcgacgtctttcacttctggggcagtaccagtttgacaggataaacaaaaacagacaaaaaacctcagatgagtaatatgtcccggaaagctgacccagcattccgcaacgaaatgtgccctcgtgcacgcacacaccatgcacatctttgtcaaattcgtaatttacaagttcaaataggagggagaaacgtgttttgagacaaactgcaaatagcaccagactaacaaaacgaaatgaaaccaaagacctagacctaagaagggagggacaccccctgacgccgggtatggtctggggcctccagcactttgcggcgacccccagtgccctaggtgctcagctaccgcccccaccccaggacccgctgggattggaaaactcacccctgagcagtgcggatacctagggactgacggacaggctctgcagtggcgcgcgggggacgggtcggaggcgaggcggggcggggcggtcccggaggcggggcggtctcggaggtaggggccgtcctggaggcggggccgtctcggaggcgggactgtcctggggactgagctgtctcggaggtggagtcctgcggtcccggaggcgggttgtaccgtaggcggggctctctcgtaggctggccggtcctggaggagaggctgttctggcggcggggctgtcttggaggctaggaggtctcggaaactgggctgtcccggaggcggggcacaggctggggtgaggcggagccgaccctgaggcgggcccggggcgcggctaccgctccctgagccacgcccgtggtctcccgttccatcggtggaccccacctcgggccgtgctgcgggctctcggggcgcctaccaggtgagcgaccccgccttcccggagggatgctttggcctgcatggggccccaaaccggctccctcagggtctctgcgggttcttggatgcgagaggggacccagccagtttgctgtcgcacttgataagaaaagcaaaccctaagtctccaataaaccatatttggggcgaatagttccctaacaacaacgtatgccacgggggaggccccgcgtggaatcaggctcccttccctccgatcttggggtgggctcagcagagccggtagccgccgcgtcgcctccgtcgctcgagcctctgcgtggagggctgccccctagtggtcagctgcgggccatgcacttcgagcccggtggatgcttatggccatggtgcggggtgctcaactagggcatttttctctcaaagtatccacagaaatgctgcccagcaagttatattcttgctgggagggaaacgtgcctgtggcatcactaacacagattcgtccgtgcatggctggagaaattaagctaaagctatagagtggctggtgctcgaatttctacgcaagagaggtcagaaggtgaaaatcaaggtggaagggtgtggtcaggaggaggatttggtgtagtctggagtttaggaacgtcttacctaggaaagtgatgactgtgctagaatgaggggaaaaaagtagtctgtctgcattttgcccaccattgagtcctcattgcctattttcatttctgacatagaataggctttagtttcttaataaataactaaatatatgctaaataaataaggatatagtgaacgtccaaaaatatctgtcgaattagtgagttaataactgactcttcggaggactagtggaaatctgattggcagaggaccaaatacattcaggtttcagaaataaagagcaaggagaaacttacacagaaaagaaattgtggataagacttgccagaatttggaataattccggctagaaatccaacgtgcggtgaagtacgttgagttcttaggcttcatatcagggaacaactgacctttgggagctgaagtgggagatggacatcaaagaaagtgggtcagtaaagttccacgttaaaagctgattcaggcccgggtgcgggggctcactcctgtaatcccagcactttgggaggccgaggtgggtggatcacctgaggtcaggagttcaagaccagcctggccaacatggagaaaccccgtctctcctaaaaatacaaaaattagccgggcgtggtggcacaggcctgtaatcccagctactcgggaggctgaggcaggagaattgcttgaacccgggaggcggatgttgcagtgagcagagatcatgccactgccctccagcctgggcgacagagcgagactccgtctcaacaacaacaacaaaaagctggctcggtatcttttgtgtgtttgtactcttaggttttaaccagtctccacctacatcaacctcactcctcatggtaaagtactactattgttctaaattaactcctgagagtattttggtgttgctctaatagaagaaaggggctttaaacaaaggtgatttttccagggtcagagagcagaaagta

SEQ ID NO: 586424 - DNA, 4001 bp, Homo sapiens
ccacagctaattaaaatgactgcatatattcatccacatgcccacacacacaaactacagtagcattgggaatctaggaagtgactagaatggttgacaaaagctgcaagaaccacatagaattaaagaaaaaaaccaacaacttcttagcataaaggcagcataaataaagttaaagaaggtgaggtcactgagagacaaatatttgtaacagactgaacagatacaaaattagaattcagaatatatgagtaatttctaaggataaacagaaaagcaaaaaacagaaaatatttttaaagtatattctcaaacagttcatgaaagatgaaatccaagtgagatattcagcatttgaaaagatataatcacacaaatgcaaattatatataataacatattttacccagaaaattagtaaatgtttcaaaagctgacaatattaagtgttggcaagagtgtggagaaaactaatctttcataaaaactggagatcattttggcagtatccaataacattaaaaagagaaacagcctatagtagtataaatggaggcagtactaggaagttcattgcaaattgttggtaatagtgaaaaaatatgaagaagttaaatgtttactaatatgaatgcaaataaaaattggcatttaatcatatgatggattactatttatcagtcaataagaataggtccacctatgttaattaacaaggaaagatgttcaaaatatatttgttgagtaaaacaatttcaaaaatagcagaacttggtgatgcaacttatggaagacacaatataaagcaaagtaaacatacgtcaatatatgtccaaaatgtcagggaacaaccacaataaactgataagagtgttttcttttggattgtgagatagagagaaaggactgacattgaaggagatgatgaaaagggcttttgcctcaataatttgtttcttcaaataaggagaatgtacaattatatttctcaggtaatcaaacattaaatttaaaatttaagataactgctccaaaaatagaagtaaaatgtataatctacaaatgtgttgaggaaatttaagaaatggataaagcttagtagcaaccaaggaaaaatgtaaaaagaaataaagcataaaaatagaaaataaaattaaaagggggtaagagcaagaaatacatttgaatcatcacagtatatatgaatgcattgaatttccatctcacagaagctgtcagattgggttaaaaacatctggatataagctgcttataaaagacacacctgaaactaaacataaaagcattgaaaatgacaaaatcaacaaagttttattttaaaaaatacaaaaacacaaaagcagacatatcagcattaataagggatgcaagtgatttcaaagaggaaaaattaaaaatgaacattttctatggattaaagttacactctaacaaaaataaaatttttattaatttttatgccctgcaaaaacacaatactgaaagcaagaactgctacaaagaaaataaaaatatgaattgacattacatttggagatggtaatgtattcacagcatccattggaaaaaaaaaaaggatggagatgatttgatcagaatgacttacaagcttacttacagccagaagacaattgtcctgcatcctgaagacaagacattgagaccctagaaggttgtgttctgctaacttgttgcaaaaatatgaagtaaaaaggcagacattctccaacatgatacattaactaaaaaatcaatgtgcagagcacacacacacacatagataagcatctgagatgatccatgtcaaacttttaggattggctaccttggtccagaggcatgagactggagctggtggtgtggtgaggaggatgagttgccattttcctctctatatttctgtattggtgtgcattttttcaaaataaacttgaattccttttgaaatattttcataaaaaggcatttcttaaaagaaaactaaagaaagaaaggaaaggaggaaagaaggaaggaaggggatgacagagggagggagggggaagggagggggaagcagggagggagggagggaaaagtgagtaagcatagcagttagtatatcaggtaaatttcaacagctgatttgacaatatcctaagggcaatattaatgatctcagacagctagttaccaatatttaaatcttgtataatatctgtttacaatgtttaagtgtggaaaacaatgaaagtagctgctatttaataaggtttaatatatgttaggtatttaacatatgtattatctctttcaatcattataataaacctgaaagttactattctcactttaaagatggagtttggaaaagctaagcaattttccccacgtttcctagctaataactggcagggacaggaagcaaacctgacaaagcaggagcatcgtcatcttggataaacaccgctaatttatgtttcagctccctttctagccccatgcatttccaggaaatcacttctcttctaactacaagcagccggaaagagcagaacggtaaaacacagatgagacagctcgggcacagagggaggagggagcaaagtctcttgggtaactgccaaacttcatcctcatacaatgggccccagttaaacagtgggccttaataagaacattcctttccctttgggtgcactaagttagggaagttaaaagataggaagctaaaagtggggtatgcctgcagctgcagaaagatatatgggaacagagatacaactctccctctcagataagcacaacaaagagacacagaagcagtcgaggcctctgataaactctcccaccttgaatccttaaaaactcttagtctgtaagggagtatgcctctgacctaactcggccagatgcccctcccatgtttattttctctaaattaaacctgtctgtgactgtcaagccaccttttgtatttctttcctatttctttaatttttactaaacccaggctggcttgcttccaaagccaccgttgtctacacaccagaactctctcactcaattactgagtctttgacggaacctacatctgggtacatggttttcgacaggtatatcttgtgcaaaggaagctttacaggatgcaaaggtgcgaacaatactgtgtttaagaaaggaaaagcatgtgttacttcagagctggaagtgcaggggaagccactgaggactaaaggaaagggatgggatggtatggttaggaaatgttcgcaaaccacatctgagcagacaggtaacatgggcgataggtttctgaatgccaattaaaaaactgccaaattaggaaggtacagcactaaataaaaaggtaagtgtgaagtgcgctgctgtcattttcaccatattgaaggtaaaacatctaacaatttatatattttttcttgaaaataaaagtaatgaagtctactggtagtaatcaaatacatcttcacttagcttgttttgtttttctgttgagattgtatagaatgtaaaaatactcttctggatttatttcactctctgataaatataaacaggacagaaatactagaatctagaaacgatgttttcttaggatctataacatcaaaaaaaggactagagagaactatgttgatcagatgctgtaaaaaacattttgaagacctgcagcccccaacacttgagtatctttttttttgtatttttaatttcttaaatacagataaatcatagtaaataagaaaactttaaaaactgtctccatcatcactgaacaatatgggcattgataatcagagaggtgccttgaaattgtaaatctattttttttcttttattttaagctggtaaatacagggtaaaatctctttagatctcaatcatgcctattagacacacaattttatttaaactatttaacctgtcagatttaagaaaataatttggaaaactcacttttgtaacaaattgcaggt

SEQ ID NO: 586425 - DNA, 4001 bp, Homo sapiens
gaggaactggaagactactttagattgggtgataggaaaggactctgacaaagtggcattgaagctgaaacctgaaatgcagtgagcaaagggcattccagcaacgagaccactttggggtggctgagagccaggagcagggaggagcaggaccccaggaggagggagggacgggctagatcctgcagggccagtaaatcaaggtgatagttaagttcgtgtgcctgagtggacacagtgcttgatttttttgaacagaaaggtcatagacctgtcaaaacatgcctttcttctgacagctttgctaagttggaaagtgccccctaatttatcaaatctgccctaatggagaggaccctcctctatttggtagcattatgcagtttccggaggtcttttaaaattggctgtgcctaacactgagactatttgtccctttaagcagcccctcttggataaatgacttcagtctcagtttccccatctacaaaaagagaataatacagccatgggaagattgtttttgaagattaaaggaatatggataggccaggcgcagtggcttatgtctgtaatcccagcactttaggaggccgaggccggtggatcacctgagctcaggagtttgagaccagcctggccaacatggcgaaacctgtctctactaaatctacaaaaaatagctgggcatggtggcgtgcacctgtaatcccagccacttggggaggctgagtcatgagaatttcttgaaccctgacggtggggggcggaggttgcagtgagccgatatcgcaccagtggactctagcctgtgcgagagaacaagactctgcctcaaaaaataaaataaaataaaataaaataaaataaagtaaagtaaaataaaataaagcaaagaatatgtctaaaaatgccttgtctggggttggtacacatacagtgagcacggaataaacgagagtgtctgtccctttgctgtccttttaagtttcccgggttgccgagggcagcgttgcagattgcagtagtgcagtagtcccctggctgcctgtgccgcctccctttgcgcgtctctgacgagcccactgtaagggactttcctctgtgctctgatggcttctcacctctgcaggtgcacaaggcagccctgaagtagcggtgagttgacactagggtgagcttcgcccagtagagcggggattcacagaagagtgccccgtggctttcccgaggtgcccatcagaggtcctcggaaggcacccggaggaaaggagcgccatgtggaagaccctcagccacatgctcctcctggctttcccttttttccttgtctcattctctccacttcctcatttgggctttttggtctcacttacccccaaaaaattacctgcaggtaagcccttgcataaggctttgctttagggcagaatctaaactaaaacacacaccaagcccttgagccacaagtgcctccttcctctctccctcctgcttctatatgcagtcaaccacctcatttggttaatctctcaccatctctctcaaacatcagtccctttagttggcaatcattccagactaaaccaatatggttttagtccccaggatgtattctcatccacaatcgtcctctacaagaactctaacaagaaccgttacatttcgtccactctctctaaggtgaaacttgcagagcgcctcagcctggcttctccagggtctggcatgccagtgattactggacgtttttcctgctactttcttccactaaatctctccaagctcggaaaggttggcattctgagcatgccctgcatttcctgtagaattccatctcttcccctcttcccttcctatccgccacctttttcttaatactgctcgcgggaaagaaattcacaaaagagagccaatactcggcagagcattgagaatgcgggtacctgatctcagcctcagaagttaccagtggaaaaaagcagccgagagagatccggaagcctgagctcaagatcgtgctagctacctcccagaagacaagcgacgtctttcacttctggggcagtaccagtttgacaggataaacaaaaacagacaaaaaacctcagatgagtaatatgtcccggaaagctgacccagcattccgcaacgaaatgtgccctcgtgcacgcacacaccatgcacatctttgtcaaattcgtaatttacaagttcaaataggagggagaaacgtgttttgagacaaactgcaaatagcaccagactaacaaaacgaaatgaaaccaaagacctagacctaagaagggagggacaccccctgacgccgggtatggtctggggcctccagcactttgcggcgacccccagtgccctaggtgctcagctaccgcccccaccccaggacccgctgggattggaaaactcacccctgagcagtgcggatacctagggactgacggacaggctctgcagtggcgcgcgggggacgggtcggaggcgaggcggggcggggcggtcccggaggcggggcggtctcggaggtaggggccgtcctggaggcggggccgtctcggaggcgggactgtcctggggactgagctgtctcggaggtggagtcctgcggtcccggaggcgggttgtaccgtaggcggggctctctcgtaggctggccggtcctggaggagaggctgttctggcggcggggctgtcttggaggctaggaggtctcggaaactgggctgtcccggaggcggggcacaggctggggtgaggcggagccgaccctgaggcgggcccggggcgcggctaccgctccctgagccacgcccgtggtctcccgttccatcggtggaccccacctcgggccgtgctgcgggctctcggggcgcctaccaggtgagcgaccccgccttcccggagggatgctttggcctgcatggggccccaaaccggctccctcagggtctctgcgggttcttggatgcgagaggggacccagccagtttgctgtcgcacttgataagaaaagcaaaccctaagtctccaataaaccatatttggggcgaatagttccctaacaacaacgtatgccacgggggaggccccgcgtggaatcaggctcccttccctccgatcttggggtgggctcagcagagccggtagccgccgcgtcgcctccgtcgctcgagcctctgcgtggagggctgccccctagtggtcagctgcgggccatgcacttcgagcccggtggatgcttatggccatggtgcggggtgctcaactagggcatttttctctcaaagtatccacagaaatgctgcccagcaagttatattcttgctgggagggaaacgtgcctgtggcatcactaacacagattcgtccgtgcatggctggagaaattaagctaaagctatagagtggctggtgctcgaatttctacgcaagagaggtcagaaggtgaaaatcaaggtggaagggtgtggtcaggaggaggatttggtgtagtctggagtttaggaacgtcttacctaggaaagtgatgactgtgctagaatgaggggaaaaaagtagtctgtctgcattttgcccaccattgagtcctcattgcctattttcatttctgacatagaataggctttagtttcttaataaataactaaatatatgctaaataaataaggatatagtgaacgtccaaaaatatctgtcgaattagtgagttaataactgactcttcggaggactagtggaaatctgattggcagaggaccaaatacattcaggtttcagaaataaagagcaaggagaaacttacacagaaaagaaattgtggataagacttgccagaatttggaataattccggctagaaatccaacgtgcggtgaagtacgttgagttcttaggcttcatatcagggaacaactgacctttgggagctgaagtgggagatggacatcaaagaaagtgggtcagtaaagttccacgttaaaagct

SEQ ID NO: 586426 - DNA, 4001 bp, Homo sapiens
cgataccccaaaataggtcttgaatactaagatttcttaaaatttcttaagatccattataaaataaatattaggcaacaggatgctgaataaaacagtacatatatttaaactcaccgtcaaagacaccagtctaaaaaatacaacccagagcaaatttcataaaacagaaatacaacaatgaaaggaagcagagcaaggataaacgctgacccagctaatgccttatcgggtgtctgtatccaggtactgctaatgccgatgactaagaaggtttctaatccttctaatccctcatggtaatttcaataaatcgaataaggataaacgagccaaatccagaatttgtttcctaaatatgtgatgcttttcccccttgccacttggtttgattgaactgattatttgaatagctgactttgaagccactattggccaagcagatcttaaatgtttttccttccttgtctttgcctgcacttcaaaaatatggtggtttagactactattcatcctgtaaaccttaaaatgtattcacctaaagaaaaaaaaatacttggaaatgtcgggggaggtggggtgcctgtggatgttagcagtagaatgttttcatggaaaacaagcctcccagtctttctgactttatggcaataagatttgaaagctgaaaacctcaaactgtaaagtgttacatgaaccaaagaggtggcccacctgctccaaaaactactgtgtgatccaaggataaataatttgcaaaaggtcagcttggccctactgcctgtagggcagtctctgagataagaagtagctgccggtggaacaaattccccctacctgaagagcgccgcggctgccaggcttgtgatagtgtatttctcagagagcagattctgtgcagtactaaaccacttaggcaaaattaaaatctttcaggaatgtctaaactcacaaagcacacatgtgcaagctgacgggcagacagcaaatttcggggaagcgtacaaacttgggggtgttttaatgcaaccattttcagccaaacccccgaggattcccgagtatgttaaaatgagcctcaggagaggaataactcatagaaagaaggggcaagggctcaagaagagatcttcagcgaaataaccaaggaaggaagcgtggctgctgtctgaacctctccgccctgcaggggaccaaagaccgactcgggccaacgctgctctccagggggcgagggcggggggtcgacagtgaccattgtggccaccagaccggacggacagtggcggcctcgccgaagtagagggcgcgagtgggagaggaggcagaggccagagcatccgccgcggcagggaggggacggggggctcccgccccaggcccacccggcagaggggcggccggtggggccgaggcggcggcacccgggtcacagcaggaggctggactgctcctcgccgggaaggaaagacccgagtcgcgcgcacaaagctgccgccctccaggcagcgggcaggctgcgcccaacttcggggcgagcagcgccggccgcagcccacccgcccgccagccgcccccagcgccccgcgccgcctcgcacccacccatggcgcctcgcgcgggagccgttacccccagtggagccgcggccccagggacaaagtcccggtcctgtcctcgccgccgcctcgccccggctcctccctgacaaaaaaaagttatccgttgccggacgccctgggggcccggcgtgggtctctcggctggactcaccagggcggctgccggagctccacctgcaggacctcgactcgtgaggctctcagcgacagcgacggaggctgctctgcttcctcccgagtagcagcaccacctgctccccttcttcctagcagaacgggtcccggtgagccatcttccccctcctctcactgactgacaacccagccgggagagccaccactgccgccagcctctctgacaggcacgaccagggacccgtcctcaagcagccaaccaccaccgccccacgccagttcagcctatcgccgtcctccggggcgggatcagaacaacttctccaccaatgagaatcttcttctgctgggcctggggcggagccatgaggcgccttgagtgggcgtggtctgagcaatgggcgtgatccgggcgtccgagggaagttgattgactgtaaggtttgcggtggccgctaggcgatgacaatcagcgaaggtctcttagattctgagccgttagggcttatggccttctcagaaaaaaataaaccttaccggatgatgtgaagggtatcaatttgtttctcttttgtgagaaaagagaaacaaattgataatttactagtcagtaggatttacttccctgtaattaaattcacaagaatttatcaaaatcttatcaaatcccgggaggaaaaaaaaattacgtttttgcaaaatggaaatacaaacttccccctcactacatcattgcttttgggcttagcctggaaaaagtcaaatacgatgcctcagttttctttccatgggggttgtttttattttttccatcattcctccctactttttctctgaacatatactaaatgttttgtataataactggaacccgagaacacctgaacctgcgcctgcagacagtactgctgtttttgaccttgtaaacctctcctaccacatccttctcaagactggtcaggattaattagaagaaaaactgacctccaccctagaagacaggaagttcattctagctttacactagaaatgggcaggatttctccagaaacactaagtgaacttttcaaacatgctgaactcataaataacaagcacataaataagaagatatattacttgatatcaaaagggtatcaagcaaacaatttcaggtaattattagggcagattgctaaaacagataggatccccctccaaagggaggatcagattaatgagtaaataataacaaactacagtgataaggacaatagagattggttcaatgagcaatggaaacagaggacaagaaatgactgtttaggaaagtcagcgaactccacaaggaaggtaatgtttgagttggatcttaaaaggtaaatgggagtttgccagagaagaaagtcaaagggtatttcagaaagggagaacaccatgttcaaaggcatggagctgtgaaagggcacagagccattgtggaatgttgagaaggtagatggggttaaatgatgaggaacggccaaaaattgggctggagcaaaaggttgaggtgagattgtaaaagacctcacaagctacactaagatattcagacaagcactgtccagcagagctttctgcactggtgaaaatgttctatatttgtgttgtccaaaatagtagccattagccacatgtggctatcaaatacttgaaatgtggtgtgactgaagagctcaatgtatttatttatttatttatttatttttgagacaaggtctcactctgtcacccaaactggggtagagtgcttaagtgatcctcccacctcagcctcccaaagtgctgggattacagacatgaactaccatacacggctgaaactcaatttttaattttttttttttttggcagagtctccctctgtcacccaggctggagtacagtggtgggatcttacctcactgcacttccacttcccaggttcaagcaattctcctgcctcagcctcctgagtagctggggttacatgaactcaccaccacacccagctaatttttgtattttttgtagagacaggggttcaccatgttggccaggctggtctcgaactcctgacctcaggtgctccacccacctcagcctcccaaagtgctgggattacaggtgtgaaccaccatgtctggcattaatttttaattttaactttaacaactcccatattggatagctcaggtttagattttcttcttaaggcaatgagggacagacaacagcttttaa

SEQ ID NO: 586427 - DNA, 4001 bp, Homo sapiens
gagggaagctggtgagcaggaggagaaaagagaactttttaaaataggaattaagaaaataggaattcaagtcagagagaagacagaagatggtgggaggggtggacagggtctgagggctgagtgggaaactgcaggactcaggggaaggagggtccttgttacagccgggccagagctcctggtggagggagactcctggactgagggcaggatggtgccgcggagagtcttgcggaagaactgcttgggtcttcataaagggactattcaagcagcagatggctgcctgaaccatctgaccgtacaggccctttatactcatgaggttttacaattgtgagtttaggggtcggctccatttttgggaaggggagcattgaatggggctgggcacgaggaggcattcagcacatcagcagggctgggggaaaggaaggggcttgtggtgaaccggactgaggagggaggaccctccaaagttggcctgctgtcccctggggctccgcggggtggtgactgggggaaaagaggaaagatggccctccggacacagcaggaatggggcaggtggagaagagcctgaggagaagggagacaggggagggcggggtgcggggggagaggggagcgggaggtggcctttgtgagagacggagagctgagtcagagctgtggggggcagcggggagggagagagccgcggagaaggggtgaaagcagaggaggagggggtatccatggaaataaaccgggtctcagggaaatcaggcttctggagagtgagtttgtttgtaataataatacgaattattctctcagcctgaggtcaccgggaggtgtaggcgggagaaattgggagttggaaaggggaagaatgggggagggggtgggagagggccggatgaattcgctgagcggcgagagtggagtgggtgcctgggtgggggtcaggggcggtagccaggcagaagctggagggagaagatggattaggaggcgcctctcttccctccccgcgtcaaaggtaaataaagagccggccccgccccgccggcccccgctgacaggtgcaggcgggtccccggccgccgaggcagggccggccccaccctcccgggccgcgggctcccgacccctcccagcgcctcgaagcccccatctcctccccgcgtcccccagccccttccctccacccggccctggccctgtccctccgggcgtggaacccgggctcatcccgcccccgccccagagggaaaacgcacgtgaacaaagcgaatcggaggaggcaggaacgacagtaaaaggcaacggagagggagagagagatggggcaaagcacccgagccagatggaggcggcggcggggggtggcgtggggggcgtgcgaaagaaactcggggctggcgcggaggccgagggtccttcgcggggggctgctccggagtgggggatgcgaggaggcgctggggacggcggagcagaggcggatggcctggaggggcagggatgaggggaccgagcgtcgggccgagaggcagaggagaggagggcgatggagaggatggagaggaccgcgcctgcgggagggcgacggggagaaggaagcgagccgagcgggatggcagccccggaggcgcaagacgagagcgggcaggaaggagggacagagggaccgcgggcggacggaaggaaagtgaaggagctagcagggcaaggcgggtgcggagcggggcgcccggaggcgcgaggagagggatgggggagggggtcggagggcggcccggggggcccagccctgcccccgcccggccgcggtacccacccacagtccgggagccgatgcagcccatggctccgggggccgcagagccgggccctcaccgactcggggcgcgcgccggggggagcaccgggagccgcgccgccgccccagccgctctgcagcgccgcggctgtctccgctcggctccgctcccccctcccctctccatccctccccacggcagctccgtcgccgccgccgccgccgccgccgccgccgcctggctcccccgccccggctcggctcgccgcggccggggagggggcggcccggggattggctgcgccccgcgcctccccgcccctgctccggccgtgccggggcgctccctcggggatctggggccgccgtcgccgcccccctcctcccgcccgtgccaagccccgctcccggggctctctcctggagaaccccggcttgggtttcaggagccgaggcacgaacccagggcctaccccgaggttctggttgatggattttgcgggccggggtcaggggatgccctgagagaaagtggggtggtggtgagaataaagccaggcccaagggcctttggccaccaaattccgcaaacacttgttttcctcctggggccgcatctgggacacacacaggaacgtgattggacacagctttgggctctgttgtttcgagtgcgctattttgtccatccaaacagaaggtgaagtctttgcaagtgaatcgtgtagtccacttctctgtgctcgctggacattcaggggtgggtgtggggatgtgcagatagttgacctccaggcctggttggggattggagaatatgaggaggacagttcattcgcagtagactaacaacaatgtcaggacccgaggctggctaggagacatcgtcttgaatccagtttaacttttctgagacgtgatcttctcggacaaatgaaagcaaggcggtcccgaagcagcaaagagagagaaagattggcctctggctagtgggactgggccaggtagatacctcaagccccatggggaggagatgaaggtctaagttgcaagggttaaatgagcactgtggttacagcaggtaagaagtggagtccagaaaagatgcatgagaaagggcaaggagacccttttgtctaaggtgtacccagaaagcccaaagtgtgagagagtgggcaggtgggcattcacagaagcaagtgcccatccaggctctgactgcacctcgcccacttttaggtctctccgaggttgcagagagagaaggcaatgggccaggggtccctggtgtgggctcctaacagggaggctaagtcttatggatgcaactttctaacctttagattatgaatggagagctacatcccatggggtggcagatgaagatgtgcaagaagaagacactaacaactgaattgcagattgaggagatgagattatggtgacagaatccatcttcggtgtatgtgcatgaagaaataagccaaatctacatctataaaaccgcgggaaggaatgagataataatcagttgcaggtctgcttagattttaatcgtttagtgtagttcgtggcagggtctgataccctatttcaatagtggagagaattagaaagcattttcttttttcatatctactattattggttatataaaagaagtatcaaatagtttctgctttcatggaatatactgtccagtcgcaaaggaaagaagatggagagatgattaaaaaaaaaaaaaagaacaaacagcttccattattctagcaatgcccacacacccctattgtttgagcagagaaaacgctgacaggggactggccaggtaaggaggaacagaccacgtggccattatgctcttgccttcccacctgaaacttctgtctccttatggctctccctgagtaatacatatatttatatatgactacgtatctcttactgtggttccaacttggatgcaaacctctccccttggtctccttaacacaactatataaggctgcatttatccaaatgatttaacatgagggattccaggtcttggagactcagtcccatcttgcattctgtcttgaaggtatttccagtccctccccactacccacacaaaaaaagtaaaatattctaggcatattcctggccagcttccttcctgctccctataggtcttcttatacaaggattc

SEQ ID NO: 586428 - DNA, 4001 bp, Homo sapiens
tggtgctgtccatgttgatttgatcgacatccttcaggcccttccaatccactgcaatcacctcattccctgagggggccagaaggttagccgccggccctcacctccctgtgcagccgaggcgacaccctggggccagcccttcacaccccttccttaccccagctgcccatttcctcttatatccctgcactctccaaattctaggggagacaagtagtaatgctgagcccaaatattcagttttagctcaacccagaatagtgcactcagaaaaagtgatgtatggccttatttgttgttgtttatgtggaggggtcagaggttgggttttatcagaaaaccaattattccgtcctgaggactcttggagggtttctgtatgggagctgggctttttctctattacaagtctacagataagggcagagctgctctatgaggaacttttctctatgcttagggtggaagggatgtgtctcccccggtgggcccttcctaagagtccatgagtctgactgactggaagaggacttcctgggaatcgaggcaggagttggatagcaaggagttgggtgtgtcctcccaaaaacagtgagcagagaaaccaagggtgagctggaggcatttcacctgactgtggggagagaagtgatggattaaagtggagggaagctggtgagcaggaggagaaaagagaactttttaaaataggaattaagaaaataggaattcaagtcagagagaagacagaagatggtgggaggggtggacagggtctgagggctgagtgggaaactgcaggactcaggggaaggagggtccttgttacagccgggccagagctcctggtggagggagactcctggactgagggcaggatggtgccgcggagagtcttgcggaagaactgcttgggtcttcataaagggactattcaagcagcagatggctgcctgaaccatctgaccgtacaggccctttatactcatgaggttttacaattgtgagtttaggggtcggctccatttttgggaaggggagcattgaatggggctgggcacgaggaggcattcagcacatcagcagggctgggggaaaggaaggggcttgtggtgaaccggactgaggagggaggaccctccaaagttggcctgctgtcccctggggctccgcggggtggtgactgggggaaaagaggaaagatggccctccggacacagcaggaatggggcaggtggagaagagcctgaggagaagggagacaggggagggcggggtgcggggggagaggggagcgggaggtggcctttgtgagagacggagagctgagtcagagctgtggggggcagcggggagggagagagccgcggagaaggggtgaaagcagaggaggagggggtatccatggaaataaaccgggtctcagggaaatcaggcttctggagagtgagtttgtttgtaataataatacgaattattctctcagcctgaggtcaccgggaggtgtaggcgggagaaattgggagttggaaaggggaagaatgggggagggggtgggagagggccggatgaattcgctgagcggcgagagtggagtgggtgcctgggtgggggtcaggggcggtagccaggcagaagctggagggagaagatggattaggaggcgcctctcttccctccccgcgtcaaaggtaaataaagagccggccccgccccgccggcccccgctgacaggtgcaggcgggtccccggccgccgaggcagggccggccccaccctcccgggccgcgggctcccgacccctcccagcgcctcgaagcccccatctcctccccgcgtcccccagccccttccctccacccggccctggccctgtccctccgggcgtggaacccgggctcatcccgcccccgccccagagggaaaacgcacgtgaacaaagcgaatcggaggaggcaggaacgacagtaaaaggcaacggagagggagagagagatggggcaaagcacccgagccagatggaggcggcggcggggggtggcgtggggggcgtgcgaaagaaactcggggctggcgcggaggccgagggtccttcgcggggggctgctccggagtgggggatgcgaggaggcgctggggacggcggagcagaggcggatggcctggaggggcagggatgaggggaccgagcgtcgggccgagaggcagaggagaggagggcgatggagaggatggagaggaccgcgcctgcgggagggcgacggggagaaggaagcgagccgagcgggatggcagccccggaggcgcaagacgagagcgggcaggaaggagggacagagggaccgcgggcggacggaaggaaagtgaaggagctagcagggcaaggcgggtgcggagcggggcgcccggaggcgcgaggagagggatgggggagggggtcggagggcggcccggggggcccagccctgcccccgcccggccgcggtacccacccacagtccgggagccgatgcagcccatggctccgggggccgcagagccgggccctcaccgactcggggcgcgcgccggggggagcaccgggagccgcgccgccgccccagccgctctgcagcgccgcggctgtctccgctcggctccgctcccccctcccctctccatccctccccacggcagctccgtcgccgccgccgccgccgccgccgccgccgcctggctcccccgccccggctcggctcgccgcggccggggagggggcggcccggggattggctgcgccccgcgcctccccgcccctgctccggccgtgccggggcgctccctcggggatctggggccgccgtcgccgcccccctcctcccgcccgtgccaagccccgctcccggggctctctcctggagaaccccggcttgggtttcaggagccgaggcacgaacccagggcctaccccgaggttctggttgatggattttgcgggccggggtcaggggatgccctgagagaaagtggggtggtggtgagaataaagccaggcccaagggcctttggccaccaaattccgcaaacacttgttttcctcctggggccgcatctgggacacacacaggaacgtgattggacacagctttgggctctgttgtttcgagtgcgctattttgtccatccaaacagaaggtgaagtctttgcaagtgaatcgtgtagtccacttctctgtgctcgctggacattcaggggtgggtgtggggatgtgcagatagttgacctccaggcctggttggggattggagaatatgaggaggacagttcattcgcagtagactaacaacaatgtcaggacccgaggctggctaggagacatcgtcttgaatccagtttaacttttctgagacgtgatcttctcggacaaatgaaagcaaggcggtcccgaagcagcaaagagagagaaagattggcctctggctagtgggactgggccaggtagatacctcaagccccatggggaggagatgaaggtctaagttgcaagggttaaatgagcactgtggttacagcaggtaagaagtggagtccagaaaagatgcatgagaaagggcaaggagacccttttgtctaaggtgtacccagaaagcccaaagtgtgagagagtgggcaggtgggcattcacagaagcaagtgcccatccaggctctgactgcacctcgcccacttttaggtctctccgaggttgcagagagagaaggcaatgggccaggggtccctggtgtgggctcctaacagggaggctaagtcttatggatgcaactttctaacctttagattatgaatggagagctacatcccatggggtggcagatgaagatgtgcaagaagaagacactaacaactgaattgcagattgaggagatgagattatggtgacagaatccatcttcggtgtatgtgcatgaagaaataagccaaatctacatctataaaaccgcgggaaggaatgagataa

SEQ ID NO: 586429 - DNA, 4001 bp, Homo sapiens
agagcccaaaatactcaaacacctaaggatgctcctatgctgaaatggtgttatgctacataatttcaacgccatgacaatcaagatagcacaacaaagtctcacctacagccaggagaaagaacaacccgctatcttgtaatcaagattcactaccacagtggttcctagacattttccattataaagactatacagaactacaaagtttttaagatggtgaaatggtttggatctgtgtccccgcccaaatctcatgtcgaattgtaatccccaatgttggaggtggggcctggtgggaggtgactggatcatgggggcggagttctcatgaatggcttagcatcctcctctccccagcactgcatagagatgatttctcaacagatgcggttgtttaaaactgtgtagcaactctccccgtccctctcttggtcccgctcctgccatgtaagacgcctgctcctgctttgccttccaccatgagtaacagctccctgaggcctccccagaagcagatgccgctaagcttcctgtacagcccatagaaccgtgagccaattaaacacttttctttataaattacccagcctcaggtttttctttataaaagccatgcaagaactggctactacagatggcaagtgtcatcatttcgtaaatgttaagtctcctttggtgtgagacacacacagcttgcaaataattgttgaataaaaaagcgagttcaagaaacgtagcacattcgttttacgtgcattttcctcattttgctactcagtggctaaaactttgtcacaggcaagcccagaaattgtcaggctgcaacctaagcttattgttatttcattatgtttactactcattcaatctgattcataacctgagtttttcagccccctccccgccccagcggtctagaatactttcctcccatctccgcttctcaaaagcaccttttcttttgaatgcctttagaatctctaacaactatcaaggaccatttcctactctttctgctgtaagttatttatgcatctcttttatctcattcactagagtaataattttcatgcccagtactcgctcacacatcttgccttttgtgatttcaattaatctgtaaggttgtagataataatgatccccttttataaacgacggcacagagaagaaaagtaacttgttctaggtcacccaacttccgacggaacaaaactgacattccagttttgtgttggactcgaaagccaactattttcacgccattcattccctcacagtgtctatgggggccaggtcctacagggcgctggagacacgaaagcaaatgctgccatcccattttcaaacgggagcctgcttgtcgctaaaaccaggcgcgctgctggctctccggcacagggaccgcgtcgaggcctctgtgcctccctcccacttgggtgcgcaggagaggggtgcggacctggggcggccgataccaaggggcgggtgagtcggatgcgtccaagggcctaagtcttcggagttacatggcggggccaggtgtggggggggttccccgagccctcgcggttctaagtgggcactgggggcccgcgtacagcaggcaagagtgcaaaccagcagcgccagaaagagcgacgaggtgagggaagaaaaaaggggcgggcaagagagagctgggaaccctaaagcgccaactgcgtgcgcggcgcacgcgcatctgggatcggcggagggtgctgggtctccaggccccacgtctgagggctgccgcttgccctccggcccggccgggaacagcgagggttctcgctgtcctgccgccgggccctgcgtcgccccactgttttcccggctgagtactcaccacccgattgtcccgcttccccatggtgctggatcgagcgcacagtagcacgccgagggaaaccgggccggagagactgccgaagagggcctgccgcaggtcctcttgccgcctccccactccgcctagagagcggcaccacgcggactcgacggccgcgctctgctacagcgccccctatctctgtggaggacaggccggctccagagatcgctgcagttggcggagcgcctgcaggagtccggtcgttcattaggcacccaagagcaggcgacgctgcgcttctgcaccggagccccaccaaggcagctcgcttcagtttggccttggattgttttgctttcttccattcttttttttttttttttttttttttttttttttagacagactctcgctccgtcgcccaggctggagtgcagtggcacgatctaggctcactgcagcctccacctcccgggttcaagcgattttcctgcctcagcatcccgagtagctgagattacaggcggccgtcaacacgccgggctaaattttttgtatttttagtagagacagggttttaccacgttggccaggctggtctataactcctgacctcaagtgatccgcccgcctcgacccaaagtgctgggattacaggcatgagccactgcgcttggcctttcttccattcttgatacactgaaatactcattcgaggggacacaaagattctcccgatgcttattttgtgcttgacagagtgcaagtgctggggacaaagtgaggaccaaagagccttggtccctcacggagcccatcagctggtggggggaaaggcagtgctgtcatagacgctgctaacgaaatcaccctttaatttcaatcccattcattcatcacctgtgcattcatttcacactaatttttgaacatgtagtttgtacagttttcactaactgggtggctggaagctggagctgggtagggcacaaagatgattaagaaaaatccctatcgtcaaggagcctgtttataaactcgtaagggcaataaacacacacagggccaactttactgcatagcatatcgtaatattggcactactgcactgcaactttaaggaagatgatctgggctccagagaagataatcatatttagtaagtatttatagataaagcgacccctctgggttcatcttagcaagtatcattaggaagtagttgaaaatcaattaggatcttctccggactcttggaaatggcaaaatgggaattacactaattacatacaagaacatgctttaaaatcatctttcccgatctctgcctccctccctccctgcatttttcatgctacactatatgacagatgctcccaactaccatcttctgtctcaaaacttttccaaactctcacatgcagtccttggtggttctgctccctactaagtgttgattcttcctcagtaacccactttccaaaatgaggcctccagtctctcatttctcctcctcctccattacccccgacttaagctggggactctgactgaagacaggcttctttttatacacaagaggaagaggagaacctattaatattaagttattctttctttcctggcttatttttcatgttttaaatattctaggcatttgacagatattatttttaatactccaacatgataagcatgataatacctgtgagagaatatagttttttttttccctcttcagctccttcttacctttcacttccttggttggctgattgtacagaacacagagatttttaaaaatatggtataagtcaacagaaaggttgtgtttcctttagaagtctctctctctctgcgagtgtacacaacccctcctggatgaaacgtgaatccctggggggacagagaaacaagaaaatgaccaggggcctgtgaagataaggaagatggcaagagctatcgggagctcatctgagtggactacataaagaacaaatcagtccaagacttctcaggatataattcagtgacagtagaaatctttacacattctctgcacatgtgtgatctgctaataaatacatttctgtcctagcagtgggcctacatgccctcccgaatgttctaggcataaccagga

SEQ ID NO: 586430 - DNA, 4001 bp, Homo sapiens
ctcctctatgcaatgaggagactgaattagacaatccgtgtcttctacctcttaatttcttgttcttaatcccaatctttgaagtgcacacaaaatgttaccagaatactctgtgccatagctgcataccaaaagtagtaagtagagcccagagctatcaaaatgttctagtaaatgaagctaatttggtaagtttttcaaatgttttagaggaatgtttcaaccaaaacgttttttcagtaatatgaaacattttaggtctgtatatgaaactgcatccaaggtcaggtgatctctaaacattcaaggcccaagggtattagaagagcccaaaatactcaaacacctaaggatgctcctatgctgaaatggtgttatgctacataatttcaacgccatgacaatcaagatagcacaacaaagtctcacctacagccaggagaaagaacaacccgctatcttgtaatcaagattcactaccacagtggttcctagacattttccattataaagactatacagaactacaaagtttttaagatggtgaaatggtttggatctgtgtccccgcccaaatctcatgtcgaattgtaatccccaatgttggaggtggggcctggtgggaggtgactggatcatgggggcggagttctcatgaatggcttagcatcctcctctccccagcactgcatagagatgatttctcaacagatgcggttgtttaaaactgtgtagcaactctccccgtccctctcttggtcccgctcctgccatgtaagacgcctgctcctgctttgccttccaccatgagtaacagctccctgaggcctccccagaagcagatgccgctaagcttcctgtacagcccatagaaccgtgagccaattaaacacttttctttataaattacccagcctcaggtttttctttataaaagccatgcaagaactggctactacagatggcaagtgtcatcatttcgtaaatgttaagtctcctttggtgtgagacacacacagcttgcaaataattgttgaataaaaaagcgagttcaagaaacgtagcacattcgttttacgtgcattttcctcattttgctactcagtggctaaaactttgtcacaggcaagcccagaaattgtcaggctgcaacctaagcttattgttatttcattatgtttactactcattcaatctgattcataacctgagtttttcagccccctccccgccccagcggtctagaatactttcctcccatctccgcttctcaaaagcaccttttcttttgaatgcctttagaatctctaacaactatcaaggaccatttcctactctttctgctgtaagttatttatgcatctcttttatctcattcactagagtaataattttcatgcccagtactcgctcacacatcttgccttttgtgatttcaattaatctgtaaggttgtagataataatgatccccttttataaacgacggcacagagaagaaaagtaacttgttctaggtcacccaacttccgacggaacaaaactgacattccagttttgtgttggactcgaaagccaactattttcacgccattcattccctcacagtgtctatgggggccaggtcctacagggcgctggagacacgaaagcaaatgctgccatcccattttcaaacgggagcctgcttgtcgctaaaaccaggcgcgctgctggctctccggcacagggaccgcgtcgaggcctctgtgcctccctcccacttgggtgcgcaggagaggggtgcggacctggggcggccgataccaaggggcgggtgagtcggatgcgtccaagggcctaagtcttcggagttacatggcggggccaggtgtggggggggttccccgagccctcgcggttctaagtgggcactgggggcccgcgtacagcaggcaagagtgcaaaccagcagcgccagaaagagcgacgaggtgagggaagaaaaaaggggcgggcaagagagagctgggaaccctaaagcgccaactgcgtgcgcggcgcacgcgcatctgggatcggcggagggtgctgggtctccaggccccacgtctgagggctgccgcttgccctccggcccggccgggaacagcgagggttctcgctgtcctgccgccgggccctgcgtcgccccactgttttcccggctgagtactcaccacccgattgtcccgcttccccatggtgctggatcgagcgcacagtagcacgccgagggaaaccgggccggagagactgccgaagagggcctgccgcaggtcctcttgccgcctccccactccgcctagagagcggcaccacgcggactcgacggccgcgctctgctacagcgccccctatctctgtggaggacaggccggctccagagatcgctgcagttggcggagcgcctgcaggagtccggtcgttcattaggcacccaagagcaggcgacgctgcgcttctgcaccggagccccaccaaggcagctcgcttcagtttggccttggattgttttgctttcttccattcttttttttttttttttttttttttttttttttagacagactctcgctccgtcgcccaggctggagtgcagtggcacgatctaggctcactgcagcctccacctcccgggttcaagcgattttcctgcctcagcatcccgagtagctgagattacaggcggccgtcaacacgccgggctaaattttttgtatttttagtagagacagggttttaccacgttggccaggctggtctataactcctgacctcaagtgatccgcccgcctcgacccaaagtgctgggattacaggcatgagccactgcgcttggcctttcttccattcttgatacactgaaatactcattcgaggggacacaaagattctcccgatgcttattttgtgcttgacagagtgcaagtgctggggacaaagtgaggaccaaagagccttggtccctcacggagcccatcagctggtggggggaaaggcagtgctgtcatagacgctgctaacgaaatcaccctttaatttcaatcccattcattcatcacctgtgcattcatttcacactaatttttgaacatgtagtttgtacagttttcactaactgggtggctggaagctggagctgggtagggcacaaagatgattaagaaaaatccctatcgtcaaggagcctgtttataaactcgtaagggcaataaacacacacagggccaactttactgcatagcatatcgtaatattggcactactgcactgcaactttaaggaagatgatctgggctccagagaagataatcatatttagtaagtatttatagataaagcgacccctctgggttcatcttagcaagtatcattaggaagtagttgaaaatcaattaggatcttctccggactcttggaaatggcaaaatgggaattacactaattacatacaagaacatgctttaaaatcatctttcccgatctctgcctccctccctccctgcatttttcatgctacactatatgacagatgctcccaactaccatcttctgtctcaaaacttttccaaactctcacatgcagtccttggtggttctgctccctactaagtgttgattcttcctcagtaacccactttccaaaatgaggcctccagtctctcatttctcctcctcctccattacccccgacttaagctggggactctgactgaagacaggcttctttttatacacaagaggaagaggagaacctattaatattaagttattctttctttcctggcttatttttcatgttttaaatattctaggcatttgacagatattatttttaatactccaacatgataagcatgataatacctgtgagagaatatagttttttttttccctcttcagctccttcttacctttcacttccttggttggctgattgtacagaacacagagatttttaaaaatatggtataagtcaac

SEQ ID NO: 586431 - DNA, 4001 bp, Homo sapiens
cccagaactttgggaggctgaggtgggcagatcacttgaggtcaggagtttgagagcagcctggccaacatggtgaaaccccatctctactaaaaatacaaaaattagccaggcgtggtggtgcgcacctgtaactccagctactcaggagactgaggcacgagaatcgcttgaacctgggaggcggaggttgcagtgaaccaagattgcacccctgcattccagcctgggcaacagagtgagactccgtctcaaaaataaataaataagtaaataaataacaaataaaagtaactaaaagggtatcactggattgtttgtaacacaaaggctaaatgcttgaggggatggataccccatcttccatgatgtgacgtgcctgtatcaaaacatctcataggccccataaatatgtatacctactatgtgcccacagaaattaaaaattaaaaattaaaaaaagaaaagggaggggtgtacgtgtgtatgtgcatgtgtatgcaaggttgttatgagaaaaatgaagaatgctgtattatttgtttctgggcaacgatcacttcacagctcagctcaaaagacttatatccctgttagagatgtaagtccctaatgtcacgtttaaccatgaggaaataaaacccagcataagtacagtagcttttgcctccctcccatttcagatccttctctcgcgctgctctatccccactccggccactccttccttccctgacactgtccttgagaagcaagcaggaggcgcatccatgccaccatgccagttgccttccaattttgcatctctagaaacacctactggcctgacttgaaggagcctgttcttcttgcggttctttctaggagagtgaactcagttgactttaggcagtggaaagatttccgttcatattggtgaagagtgggcagtgccgtgggtccctcctttcctaacagtgataaactctggctcgaggtgctcccagtgtctaccaagcagagccactcccagggaaatggagaaaagatgccatccagctaggaggaactacatcctgagggggaggaagtcagtgataagagaacagcctttgctggggccccttcctttgtgaggaggtggcggagctggtgggtgcagtggaggttgaagggttgctctcctcacctgcccacctctggctgcagagatgcatcccctcccggtgaggaggcaacgttctgcagagcttctgctctggttcccccagggagcaggcctttggcatcccagtgcccatcactccatcattttagcagcaggtctcagcacctgctctccagacggtctggcccaactgctgcaggtggtgggggcagtcgaagaaatgagttctactttctatgaagcagaaatgagttctctctgggatgccagaaaggggtactctctgggttctccacctcaacctaattccctcaggagctttgattttttccagtgtcatttccccatcaccctctaagaagggggaacacgtcaagaagcatcaaggaattgacagagattagacaaaaggagagtgcggggcttctaatgtccttccctccaaattttgaattgcattgaagaaagtataatgagcatcaaacaaacaaatgaataaaaagcaactcacccctgctccacctgtggcacatagaagcctcagcattgtaatacaacagcagaagcagcaacatcttccaatgcatcttgtccttcaaaaggtgaaaaatcgaccctcaagcccagtggaaccccagtagctgcaggtatgcccgtgccgttcttcccagtgagatgatggagtgcttccctcccttccttttgcagacgtgcagaaatgcctactctgcctcagaaggctggaggctgaaggctgcgtcctgggtgggacaggagtcggtacctctcttcatttgacgctctctgggattggggaactggccttccacagagagactctgtttttgagcacatctggagtgactcacggggcatgtgatctccttggcagtggggcggataaatataatttctgtacttgagttccatgtgttggatgcacccactggaatttttctttaacaaacagacccgcggaacttgttagagagcccggcgaagagttggctgctctccccgtccacacatacgataccagagccaggggcgagggctggaggcagagttgggagcctgcctggcagacaccagggctggttgagcctaagttgccttcaggacagcaaaatcattgtggtgcctgggctgagtgtcactgttgcctggccctggagctagactaggacattggcgcctagagcctgtgtctggtctgcccaggttctgggtgggtggggagttggcaggttgtgaccgagccgaagtggagaggtgacatggtgcatcggtattgtctgtgtgaacgtgcgtaggtaatgatccaggagcccacggggacccccaactcacattggtgatgctcccatttctgggctgtgcctagacctggggccaagccccacaactcacattggtgatgctcccatttctgggctgtgcctagacctggggccaagccactttgattttcccaagcaaaatgggagtgtttttccatagtcgttgtaatatactgccatagacaccttaattctttcccaatcacttcctcaacttctctgaaatgatagggaatgctaaagcttgaaggacacttaaagattatgtcatcctgtgggttttccagtttgtggaggtggtgcccagggtgaatgggctccccaagagggctcctcaaagctctactctactgcaaaagctcctcttttatctgctataagaagttgtttgggagccgggcatggtggttcacgcctgtaatcccaacactttgggaggccgaagtgggggaattgcttgaggccagaagttcaagaccaacctagagaaaatagaccctgtctctacaaaaaattaaaaaattagctgggcgtggtggcatgtgcctgtagtcctagtcactcaggtggctgaggcagaaggattgtttaggcccaggagttcaaggctgcagtgagctatgatcacaacactctactccagcctgggtgacagagtaagaactttcctcttaaaaaaattaaaaaaaaaacaaccagtttttttgggggaaaaaatactagactacaacatttgaaaaccagtacgctcactaatattaataatagctattaggtgcttaatttgcttcagacagcgtgctaggtgccctccttgcattaactgatttaatgcatccaccgaactaggaggttagggcactagccagcagcactctccaacagaaatgtaacgtgaatcacaaacgtcacttaacattttctacaactcatactaaaaaaaagtaaaaagaggctgggtgcagtggctcacgcctgtaatcctagcactttgggaggccgaggcaggcggatcacctgaggtcaggagttcgtgaccagcctggccaacatggcaaaacctcgtctctcctaaaaatacaaaaattagccgggcatggtggtgcacacctgtaatcccagctactcgagaggctgaggcaggagagtctcttgagcctgcgaggtgaaggttgtggtgaggcgagatggtgccactgcactctagcctgggcaacacgagtgaaactccatctcaaaaaaataaaaaatagaaaaagtaaaaagaaacaagtgcaatgaatagtaataatatctttcatttaattcaatatatccaagatattatcatttctacaagtaagtgatatagtattagcaagatattttatatatatatatataatatttacatgaggtctttgaaatctaatgtgtatttcacacttatagcacttctcaagtcacaccagccctgtttcaagtacctgatagctccatgcagccagtggctcctgtatcgggcagtgcagagc

SEQ ID NO: 586432 - DNA, 4001 bp, Homo sapiens
ggcagagtgagtgagatgcagtctcaaaaaaaaccaaaacaaacaaacaaaaaaccccacaagattgtggacaaatggcagtggtatatgaagcaagtttggaaaataaggaattacaaatgccatccttggctgtctatttaagatgtaactgcaggcatctctgtatacaaattttaaaaattaaaaacgctgatatttaatttggaattaacataaatattgatgatttctcttaaagtaggcaagacccgcccccccacttgattcctgaaaccacaaatagtaccaaatcctatatattctatgttttttcctgtatacatatcaatgatcaagtttaatttataaactaggcatagtaagagatgaacaataataacaaatacagcaattataacaatatactgtaataaaagttatattactgtgatctgtcaaaatatcttaatattttcctacaacagctgaggcaggtaacaaactgagacagccaaacggtggataagggaggactacggcatctactatttgggcaactctaagcattataaaagatgatcttaaaaatgctaaatgctattattattactatcatcatcatcatcaatatcttccatcagtcccaggaagaatgacagtctggggagcccttcctagaaaagtgtgtgtacacagtggcttgccatttaggaaaagctaagaaaggtatcttgcaggcattattattgaagcttcctaggcaggcttaccatgtgtttttcttcaaagcttgctactcatggaaaacttaggccaaaaagaatggaaatataacagtaagaagctgggcgcccgtctaaaaccaaatactcaaaccaggtgatacccggaacatcctattgacagggctgttttgggacagacccccaggctgtgagcaagatgaaatgtagatggactgccataccattgaatgaattgtcaagaaacttcaaccttgaaaaataagccagtttgctaatgacaacgggataaaggagaacacaagcggctccagaaatagaatttgacctggattataccaaatcatgtttccattcgatgtataaaatttctataattgggaacctaatttttaaatactactcggacactcaagaacagaacagaggaaaaggtgcatttccgaaggggccaactgtaaattaggtttagagagccaggaccaattaaaagtgcacgtcgaccacatttattaagttcactgtgcgttccctgggacccaaacccgttttcacttcacttcacttgccaaacttcaggggcgcgttcacctccacggacgcctgggggtggatagtatcagacacaatggccatctcctccagatcctcgtcgtacttcacctgcaggccgtccaggccccgcacgccgccctccacgccgcacaccgcgaccagcacgcggtcgccatccgggtaggtgagggggtccaggggcctcacggccaggtggcacgggagccgcgcccgcagccgaccaaacgggctcacctgcagtgtccactccttcagagttcggcgccccgggccaggcggagggacctcagtctccgatccgggccagcgctcgctcccacctgagctgtacggcctggcttggcaagcccagcaagcccagcgcccagcgccagcccacagtcggacctgacggagacagagacggaagcagccaagctcccaacctgagcagggggcaagcatggcgcgcctctctcgccagtcctcagaacacttcagccacagggagggtcacttgccacggccaatcgacttggccactgtgccgcctcaagtcaaataggagacgtaagtcagggtttgctgaaacaagagcgagccggttggcttgactaggcgttctaaacatcagccgcgcaatccccaggggcaagttgggatttgaaagctctaaactctgacctggaccccttgcctaagtccaccccctttcgctaaggccgacgggataggtagttctaagtcgcagagctctgcctcttagaaaccacatttcccaggaggcaatgcgcaggggagcacgggtaagagggtaggtgttagaatcgctggaaaggcgggcgccctttgtctcaagaccattggctattggaggggcggtacatgggagtccactggccaatgggaagcacggaaggggcaacgcgggtaaagctgcgtggtcaccttggataccaagcacgcgacttcttggttggagagggtggagctttggagtgagacccaggacgccaaatcccaaagagaaaaataggagcctaaataaggatcaggaccaagggaaggggtaagaaactgcgctttttaagatgacaactaggtgcaaactaggagtaacctctgtggatgtcaacatccaagcttcactaacttagtgagggcatctccagggcatggagaatgccttggtaagaaagtaaagagcaagattggtgctttttgagggaattgcctctttggaagtgtattccctcctatattccaaatataggaatagagtacttgctccgtcctgaccctaagtgaccttactttgggttttaatttgctcactttaaaaatgtagataataataccttccttgccttgcctcaaagggtttttgtaaggatcaagtaagaaaatggatgggaccgtggtgcacagtctacaaaattaccgtgtaaagaactgtatttttatttcaacgtacttaacattgattctgagttaccaagaaaattatgagagatcagaacttgttttgagaatagcattgatctctttgactacaaatgatcctcagttttagagtgaaaaaaaaaaaaaagacacaaaaaagagagtcaccatggtgcggtggaaagagcagggacaagggtcaggttattttcctggctctgccactgcttcatctgtgtcacctagacctgtttctttagttttaaaatgaagaaagatggttctaaatgaccctataaggggtgtgtgtgtgtgtgtgtgtgtgtgtgtgtgtgtgtttaccttttataattctataggcagtaaaataatgggaacagaaagatttattttcttcttttttctttttttcttctttcctgcctggtttctctctccccctctgtgcccctacttcctcctaaaatgtattccctaaattatttagccaagacacctgcaaacactaacatttcataaaatgcaagtgccttaaaaaatagaagcccttacccaagtacaatgaccagaattcttggggctatcgtgatagatagactgggctaaagttctcatgggtacaagtctcaggttctctgctagccactacctttttaaaatttttaaaaattcagtgttctcttaagttatcattgcctcttttctgtccttctagtccttcctccctccttattcttttggtgaagactcactcattataggtgctagctcaggttcagcaagggcccactgcaatagttcttttcttgtctttgtgtttcattggttataattattcagaataatcttcaaactattttttatgaaaattgagaggtgtaactttgaaaagaaatttgaaaaaggcactggtttaaggaagttgagaaggtactcaaattttctgtagaaacactagacatttttagattaaatattaattctaatagttaattctgtgtctatggtaatttttccttttctgagacaaactaagttaatggaattggcaactgaactataattttctatgttgcatgatcattattttactttttcaaataaaaaccaaatagaattgactgaaaatttactttgctgatcatacaatgttgaaaatggagaaaattattaatattaagattggcataaaatatttaaagttatagacacttaaaaacagtataatgagtatcaaatctgtccacatatcaacagtgattaataaaagttgtatct

SEQ ID NO: 586433 - DNA, 4001 bp, Homo sapiens
gccagtagaggggtttgagcaggggaattacatggtctgacctgctcaccctgggcaagtttcttggcctcctggtctcacaataatcttatgtgaaagggaatacttatacctatctttcaggactgttacgaggatctgagacaacaaaccagcaccttctaggtacctggcaccaaggtggcagctctcttggttacgactgctgggtgcaatgactgcctgtgcaaaaccctgtggggagcacgtggtctctgccctagagcagaaggcgatgagaaagcagtatacctgggctgcagtcccagctcactgtgaccttctgagtaactgtgggcaactcctttctactcttagggccttagtgtgcccagataaaacatgcgagggagaggagaccaggggaactcggccatgtcaagtggggggtggtggggagggatgtgggagaggctagaaatgaaattgagatggtaagctggggtcaagctacagggcaggcttggatgtcagtgaggacactggatttcatttgtactcaagaaagaacacgaggaagccctctctaagagtttttttcagtgacccagacttaaaagaaatgatgttaacagtcagctttccagggtgtgtcaattgatatccaacatgcagccaggacaggtgatggcaggtcaattagccataaagacagggcagatgcgacaaagccaaacgcatttaaaattttttcaaataaaaataaatcataaaaaacacacaaagacactttccaaacaggtgcacttcagagacacctgtttggtgtcagaaacagtgagggtgggaggaggtataaagttgaacacctacgtgcacattgtatctatatgtcagatccaatgcttggaagctgcccatatgttaatattaatcctcattataaatctgcaaagagtaggtcttactttcctgttttacagataacgaaattgagacagtgagtaaagtactgaggttcacactgcaaactagtagcaaatatttgaattgtctccgtctgacttcaaagtccttcccctttcctccattcaaaaaattacgtgtatgtgttttcatacaagacaagtacccatcgccctagcccagtatgacactgcaaggacagacaaaacacacagagtgcagccctcagtcaccatgtgctgaatgagctaatgtatgtccccctccactaccacgcccaagaccccccggcgagctccttccccaccgaggtccccatctccaccctgaggccagatgacagctaaggaccttccaagcttgtgaacactgcaaaaactctcctgggacaagacaataggaaaacttacaaaaattaaagcaaccactggaattcccactgttgactaaaatgactaagggtttgaccgtcaagaacttttctgggcttttggggttccctctgggagaagttctttccgagtgggaccctgacttgcgtgggtagcgcacggaggccggcagccaggctagggcgcaggcctgcccgctgtgcgcccgcgctaggattgcttggcgcggcccccaggccccctccccagctgccgccgccccggagcgcggatgccccaggagggcagcggacggggtccaaaccgtgccttgcggaagcgcccggtgacgacggcagaaacgcctcgtgggaaatgtagtttcccctgtcccgggaaagcggcgctcttctggggcatctctggagcaggcagtaggtagggaacgggcgccctcccagaagctgcaaagccttcaggggagaccccgatgatccccccaaattagagccacttcctgggctttggagggggcgagccgttacctttctgctgaggaactccctgaccaaggaggcggccacctcctccacgaagaggctgtccatggctctggctctggctctgcccacgaggcccacgccgggccgcagcaccaggcaactgggtctgtccggcgcagtatggccgcgttgccgtggcgacggcggcgtcggcgcggcaagaactcctccccttccctggggctggcgggctggggcgggagggaaggggtggagcgtcccgcaaactcgcgtctcggagtgggaggccgcagtcagggcgccctggtgtcgcctagggccccgtccacggctccggactcggggcctcactctgaccctggccctggtcatctgagaggcctaggacaaattaccgctccgctccgaggctccattttcctagacataaaatgggaagaatacctgcctccttgtttctggaggactaaactcacagggaagtgaccccctcaggtccaccctcagcaccacggccccctctggggccaccaacgctactgaccttggcgggccttgacggtgggggcaaggaagcccagcattctgcttcttgggcaccgaaattaaaggagatgttcctcgcccccttggtgcctgctttcccgtaatgagactgccatttattgatcaccaagctcttaactcacggttgcacttttaatccttacaacttcctggctaggtagttactgttggccccattctttaaaacgggacactgagattcagaaaggctaagattttgctgaggcccacacagctgggtactgggaaagttgggtttctaaccaagcccagtacattttccccgaacttagtcacctgggttccaccttcacaatctttgccacttccgcatgttacctattgtattcctttgcttgggctgccatacaaagtaccacagaccatgtggcttaaacaacacatttattgtctcccagttctgagggctacagaccaagatcgaggtgtcagctggatggtttctcctgaggcctctctccctggcctctattatagatggccaccttctcccagtgtcttcacgtggctagccgtccgtgtgtgcctgtgtcctaatctcttcttataaagacatcagttgtattggaatagggtccaccctaatgactgcatttccacttcatcacctctttaaagaccctatccaacacagtcacattctggaataccaggcattaggacttcaacacgggaatttttttttctttttttttttttttttttgagacagagtcccgctcaggtgcccgggctggaatgcagtggcgcaatctcggctcactgccaagtgaacaaccacctcccggattcaaaccattctcctccctcagcctcctgagtagctgggatttcaggcgcccaccaccgtgcccagctaatatttgtacttttagtagagacggggtttcaccatgttgccagactggtcttgaactcctgacctcaggcagtccgcccacctcggcctcccaaagtgctgggattacaggcgtgagccaccgcacccggcccaacacaggagttttgaaagacacaattcagcccttaacccctatacagttacttatgtattattttctttaaatccacatacatgttttacaatttattttaaaaggaaagtgttcccaagcagtaatagccacaagatcttgggttttatgtgcttattaaatctctaatacacattaaaacaaacacaaaaccagaaaggtatgcattcacctaaatcaccttacaaccaccactggcacatgtaccacacttgggaagcaactatctcaccctatacagtctccataggacgtagctttaatgtggcagattgcaccataatctccaggcaatttcccctctcaacgtgcaatggttctttgagaagcctcttttgaacatgttgtgctatgtgagaaagagccatgtgctcttatatgtagagagagaagggcagagttgcaggagacagtatgatgcttggtccaggggccctcatgttccagctgtgaagacacactgatggatgatgtgtaataatgaaagaataacatgagacagatttatgctccataagagattgtgtatcaggggtccc

SEQ ID NO: 586434 - DNA, 4001 bp, Homo sapiens
gagtctagctctgttgctgaggctggactgcagtggcacgatctcagctcactgcaacctccgcctccagggttcaagtgattcttccgcctcagcctcccgagtagctgggattataggcgcccaacaccaggcccagctaatttttgtctttttagtagatacggggtttcactgtgttggccaggctagtctcaaactcctgacctcgtgatccacccacctcggcctcccaaagtgctgggattacaagcctgagccacagcacctggccaacgaaccccttttctttggtactgtgtcacttagcctctctcaataatgcaagtaactttctgtatgttggtggcacaaatggaaatgaatgtggggccataggttttgcttagctgaatgttaaattcagtctatcggcagattccaaaattggaagagaccttgagataatctattttactttacttaggacacatttgagacttggtgggtctatgtgtttcatccaagaacatcaatggcagaactggtaccagtccccaatggtccgctgcaccgtccacaaattcccttctctcctttatccctcgatgtcaagcatagatacctcccacaactgaaaaccccccatgtccgaaattgctcatttaaaacccttcctggcagggcgtggtggctgacccctgtaattgcagcactttgggaggccgaggcgggcggatcacctgaggtcaggagttcattttcccagcctggccaacatggcgaaaccccgtctctactaaaagtacaaaaattagccgggcatggtggcaggcgcctgtaattccagctactcaggaagctgaggcaggagaagcttgaactcgggcgctggaggttgcagtgagccgagatcgcaccactgcactccagcctgggcgactctgtctcaaaaacaaaaaaaccaaccaaagaaacaaaaagaccccttcctaaagtcttgaaaggaaagggtgaagtgtaaatgagcttttcctattatatccaaatcacttctttattcagtaggcttcaaacattctctttttttgtttttgagacagagtctcactctctctctctgtctcccaggctggagtgcagtgacgcgatcctggctcactgcaacctccgcctcccgggttcaagcgattcccctgcctcagcctcccaagcagctgggattacaggcgtgtgccgccacgtctaattttctgtatttctagtagagacagggtttctctaggttggcaaggctgatctcagaactcctggcctcaaacgattcgcctgcctaggcttcccaaagtgctgggattatgggcgtgagccactgcgcccggccttcactctaatcaccaccataatggtactgggtttgagggtgaacatatcatccgcggacactggcttaacgagcccatccgaataaaacaaattataaggccaatggcacttggtatcgtgtaagatcgccagaattttacaactcggggtacccaggaaaccagaaaagcccccaccacaagaaaaaccagtgggcacaactggggagcacagatatctgactggggtcattttgtccgcgcgtctttggggtaaaacaccaggactgggggtccagaagggacacgcagaccgcctctctccagtcccaggggtgtctccaatccggaaaccaaaacttcgttcccttcccacctgtatccagggacacctctgctgggggacagcgcttgccaccgccgaggctggcgcgaggaacgggggcacggacccgcttccactccgtcccgggcggtcgtggcgaggggattgcaggacacagccatgcacgtccaactctgtccccgcccggagaagtctgggatgctgggatagaaggggttgtgactttggggaccaggagcactagactcacatccaagccccctggccttcagagcccagggaaagcgtcacaaaagccggaagtgcgtcacacccgccttccggagctgcgctccgcttcggggtcctctctaggatcgcgggaggactttgcatccctgtgtagggctctaatctcgggtttggggatcttgctcctcagcttgtccgctccgaggaggtgcacagggcggggaaaaagggatgaatttccctttataccgccctgctcagatatttatatgttccttctatttttcttgatgacaataattgtaatagttacaataaaaatagtgattgtctgtggcagaggagctgaatgaaacgagggtggagacaggaagatcaagaataaatggtttcacaaatcgaagggattgtctcttgagacgctgattatgtacgtattgccagttgaatgggcagtattttcaaatacttgatctataggcaacagacgttctttccaacactagatagttataaaattctgagtttgccttatgtttccagggagttttcagattagcaacggtgaaataagttgaatttgaggcgtttttgctgtccaagtgttattgtaataattagggcttctatgattagatcaagaataacttcaccttttataaaacagtaactgagaccttgaatggctggggcatgactctaaaagttctgggcaagtctgtggtacagcccaataagataaaagcctacaaaaggaacggctacctgatacagagcctatgattacgtggtatcccgaattaccttctagaccctcactaatgctccattccttagggggtttgatcttgctatggttgccattttctacctacccacgagtcttctcaataatccacttaagtgcatctttgctccatatatatatatacacacatatatatacacacacatatatatacacatatatatacatgtatatatatatacacacacatatatatatatacacacacatatatatatatatatatatatatatatatttttttttttttttttttcctcctagggcaccgtcaaatccaatctttgctcctttatcactggctggctttctaacctacagtcctccgtgatgacatcatagtctcaacttattcctccagatacatcctcatatttccttccagggttccaagtcatcgctaagagtcattacattgctacacactgtatttttcttctttgtctaaagtctctcctccccacccgtccccattcctacactgaagtgcctaaagggtccaggaaggcagattactgaatgcagttgactgggtatatgattttgtatttatgttgtgtgtgtggcaggaattgtaggcatctctataacgactcctttctttgcctacggacctactggcacaagaaactcaaagtggcctggtggtattctgttttcagttcagtggcacgatttaatgtttcctagaggaaatgttcttcctggaaatgaggatcataacccagctggctccagatttcggagcgaggaggcacaaattctacaggtgagtggctgggtgtgatagtaatagaggctactcctgtatgcacatagtcctactggagacacaatactatatatccattttggcccaatgcatttcagcgcatataccatattctgaagaactgctcccaactttgcaaggcattacatcttaatcgcaatttagcccagtcttcaacaggccattccaaaaccctatctggctagctgcttctggatgatgagtatgcaccatgaattttgtagcttcgagttcactgtcacacctccttggctatcggtgggttccttagtttcaggtatgtcaatggataaggcaccctgtaagctctcagatggtggtgctgctggaggcaaagtagttggggaagacaagctcatttagagcatatatcaattctggtaagaacaaattgatgcccattccaaggtaaaagggatctgatgcactcaacctggtggtagctggtatctctaagactcagtgttggtctctaatgct

SEQ ID NO: 586435 - DNA, 4001 bp, Homo sapiens
atggaggacccgccgcccacgcagcctgtcctcacatctctggggtcaagggaccgttctggaggagggacagaccctccgtctgcctgctgggctggagggaaacgcggaacttgtcctagctcgaattcacctaaagctgaggtgctttctgccgaagctctgtcctgcggtggacacgggggcggggtggggggctaggatacacttcctggccactcgctgctctgggcggccgtctctccctgccgagagccacagcccaggccaatgctctggttctcaaatttccaagcatttccttgaacctgaccagcaggcaaggctcagaggcttccaaacagccagtgtgtttagacagaagacactgggcctggacatttcagggaagaagggactttcaaccagatcttttggaaggctggtctccccctctgctgctggggtaaccttcggcaggtagttacttattctggccttgtcgtggttaatgttccactgcttcggtgtagcatctgcttgttttgatctgtgtggcggagggaggggccggggggtggggaaagggcttagccaggacagtttaaagagaggttcctgccgtggcttctcgccctttatcgagccatcatctctttgcagccagcacacccaccgcccttgctggctgggccgccttgttgcacctcacggctgccagcaagcccctctgataattctgctccagccactgggtttaaaagactcaataggcacatccagaccttctccaaggtgcccacccagagcaccctcgccaagtgtctgaaagcccagcggcagcctggctccttccctcaccaactcattcattcattgcctgaccccatttcccaagctggtgaccacggctggtcaggactcgcttctaaagggcgcggggtctggcttcctcaccagcagccacagggcacagctcccggaccagccggcagcccctcccaaggaggaggttattctggagacaaaggcagcgccctgaggtaggcggctgcctcctcccgcaccacactccctgcccggcctcttccatggggggcggccctctggggcccctgaacctctctacaccatgccttgggctcacggctcccttgggggtgggcacctgccagcccccactcaccagtccgggttctccgccgctttggggctgagcctggtgtcgctgttcacattgaacaggacgtcctcctccgtgagcggcggaaccgccacccggtaaagcgggtgctcgaacagcctggccaggagggaggcgtctccgccggggccggggggcgactcggaccgacgcgggccggggtctcgcagcagcggccggtgcgcggggtcgtggggtcttagggcgccgggatcccgcccccgcaaggcgcgctcggccggctcggccgcgggcggcagtttctccagcgagtgggacgagaggttggaggaggggtcggagctgaagtcctgcaggatgcggagcgtgtgcttgttgggccagcccgcgtcgccggcggcggaggaggcggccgggggctccccggggcggccccgaacctgggcccagccgggcgcggccacctcggcggcgggctgcgcgcacgaacagccgggctcccccgagggccgcgcgccgcgtcgctccagcctgggcagcaggtccagggcgatgtgcagcgcgcaggccaccaggaacaccatcaggatgagcacgcggaaccggcgcaccagcatcatcttcatggccgcgcgggccggcccgggcctggagcgcgttctgcccgcgcgcccctctagctgcagctgggcacgagcgcggcgccgcctcgcgggtcaaggtccatcggtgccgggcggctaccagctccggggctgtccccgggcccgggccgcgtgcagggcgcccgccgccggagcgctgggtccccgcgccatctcgggcccgtccccgctcggcctctccggagcggccgcgccctcagccggggagcccaggggtcctggtccgcggagccgggcgcgcggggggcggctggggccgcagcagggggaggctcggcgctcgcagccgccggcgcggggctcatcgggcgtgtgggtccatcccggccggggcgcgacgggcctgggcggtggcggcggccgcaggcgtcccgatcctcagcgcgctcctctccaggcgccgggcgggcgggcggggaaggggcggctcctccgggccgggctctgctctcacgccgcgcccgggagaccggggctggggggaaggggggggcgaagggcggaaggggtgggcgcggggagcggccggcggggtcccgggcaggtgcagcggccgccccgagcgcagctcccgcctggccgagcctctcggcgccccgcgtcccgggcgggcagatatcgagcgccgcggagccgccccccgcgtcagcgcccacagattggcggagccgccgccccacgagtcacggctgggcccgggccggctgcgctcccgctctccttcctcctcccctcggccgcgccccgcgacgcctctgagctccgggcccgctaaggagagggctcctcctgcccgcggtttgcagagggaagcggcggagaccgggagggcgcgctcggttctggccaggccagcagctgcggccgagtggggggctccggcctggccgcttcctgggaccccctcccgcccggggccgccgccgccagctgcagcctctcggctcctccccagaggagcgcggggccggggcccaggccaagtccctccccggagccgcggggcgtctgcgccgccggatgagctccccgccgggcggcgaccccgtgccccacgcccgtctcggcaaggaggaggcggaggcggccccgcgagagaggcccaaggagcgactgggcctggacccaggggacgccagggcagcggagctcccggcaccggtcccgtccccccccccccgcccacccgcgggacgcgcccgccttaaccctccaggcgccgggcccgctgggggcgctgagaggggctggtgtgccgggggcgccttcctgcttggggccgacgggggtgtgtgagtgcaggcgtgtgcgtgtgtgtgcgcatgtgtgtgtgtggatgtgcgtgtgcgtgtgtatgcctgtgtgtgtttgtgtgtgcgtctgtgtgcatgtgtgtgtgcacatgcatgtgtgttcacgtgagtgcatctcatctgtcacccacaaccaggggagcggtgcttgtacaaccagctggtggcttctgcaaccagcagcttctggccgtgcagctccctgtagggaatatgagttaatctggatgtcagcctaagatgtagtcagggaggtaagtgtgtgggaggaggccacatcccctgtgcctcaagccggctgcttccacagtgcccagactgcctgggccagcagcctcgccagcaagcccaggcgggtgggccgggagcagggcctgggccccccctcttactttcaccggctggctgtgttaccagggccctctccgccctctctgagcctcagtttcctctgatgtgaattaagggcgttgagcccattgttcctgaggaatcactcatctctgagcctggcccattgcctggcattccgtgggcacccactagatacttataaggggagaagttgttccagtccggctggccagtggaatccatgcgtcttgggccatttgaagtgagtgaagggctgggtgcggcccacctggagctggactggaggctgtgttgggtggggcggtgtgacctggaggtgggctgccccctcaggagacagcttcacccctgtgagtggacctcatccttccttccttccactcacatggacagcacatctgtgtgtagacagggtcactgagagaggccaaggagggtgaggaggaagatcccgggtgtggggggagtcctgggggagcagacagcagggacagaagcctgtgg

SEQ ID NO: 586436 - DNA, 4001 bp, Homo sapiens
agaggggctcaggacttggccagctttctttgagaaagaattctcgagttgacaacctttccttccactagaaaaagtcatctgaggctgggctcactgggttctgactgtaatcctagtgctttgggagggcaaggcaggaggatcacttgaggccagaagttcaagaccagccttggcaacatgggaagaccctgtctctaccaaaaaggaaaatataaaagaaagaaaaaggcaactggaattcaagggatgtagaaatatcagtctcttggctgggcgctgtggctgacgcctataatcccagcactttgggaggtcgaggcgggcagatcacttgaagtcaggattttgagaccagcctggccaacatggtgaaaacccaactctacttaaaaatacaaaaattagcctggcgtggtggcgggcacctgtagtcccagctactcaggaggctgagtcaggagaatcgcttgaactcgggaggcagaggttgcagtgagctgagatggcgccaccgcactccagcttgggcaagagtaagactctgtctcagggaaaaaaaaaaaagagataccaattttttacagcaaaggcggtctccagggtgctggggtgtgagcatactctaagatcagctgaatggttccaggcctctgagacgttttgtgcttccacgtcttccactttattttccctggtcttcaccctcacaactcagttccacctctggccaaaatacggtacatttatcaaaacgctgttaacttccaatccatttttagcttcaaggataacataaaacgtctatgcaggccagatgtggtggctcatgcctataatcccagcactgggaggccaagatgggaggatctcttgaggccaggagttcgagaccagcctgggcaacataacgagacccctttattattattattattattattattattattattattattattgagatggagtttccctcttgctgcccaggctggagcgcaatggagcgatctcggctcaccgcaacctgcgcctcccaggttccagcgattctgccgcctcagcctcccgagtagctgggattacaggcacgcgccaccacgcccggctaattctgtatttttagtagagacggggtttctccgtgttggtcaggctggtctcgaactcctgacctcaggtaatccgcccgcctcagcctcccaaagtgcattacaggagtaagccaccgcgcccggccgagacccgtctttacaattaaaaataagggggggggttgcaaagtttgggaactagaaaattcacccaacatttaataaaggtcctcttcaacacctttccagcccatgcagtctcggaccccacctcccgagctgcgggaccttccccaaggcaagtcgcttaacctgacccccagtgccgcgtttgcagaacggggataaggaccacctcagtggatctccccaaagtagggtcgcacgggaaaatgcacggtgcttgacatacactcagcttctaggcagtggcagctgccgtggcgtctgcatcccgcgggcgaggcgggcgctcggggagggccgggggccgggcaggcacggctcacccacctgcaggcggacgttgagcatcatggaagccacgatgtagaggtaggggaagttgatacgcagccgccaggccaggtcgaagaagatgagcagcgtgcgagtcagccccttgcagaagaccccataggagcgggcggcggccgagcgcgagagccggacagccaggcccgacagagccgccgccatatagagaccggcgctcccacagcccccccgcccgccctctccgcgccgcgtcgccccggcagctgaccctcgcctggcgtgctcagggagcgaaggaggcggcggctagaccggcgggcgggcgggccgcagtggagcggagtccgcacgtcacgctcggagaagtgcctccgcgagcagccgcctgtaccagcctggccgcgcagcctgacgtcacaaagccagccacgcgcctgcgcggcccacaggccccgcccctggacacgcccttgccacctttctttttggcaggtaagacgcgcatgcgcgggagaggaggcgtgggggtcgaggctgatgcgctgtctccgtccgccccctactggtgagtctgaaaatgaagacaaagggaggcgatggacggtagcgacggttgcagacaaagtgaatgtatttaacgccgctgaactatacatttaaaaatggttgcagtaggccaagcgcggtggctcatgcctgtaatcccagcactttgggaggccgaggcgggcggatcacgaggtcagcagatcgagaccatcctggctaacacggcgaaaccccgtctctactaaaaatacaaaacatcagccaggcgtagtggcgggcgcctgtagtcccagctactcgggaggctgaggcgggagaatggcgtgaactcaggaggcggagcttgcagtgagccgagatcgagccactgcactccagcctgggcgacagagcaagactccgtctcaaaaaaaaaaaaaaaaaaaaaaaggttgcagtactaaatctttttttttctttttatttgagatggagtttcgctcttgttgcccaggctggagtgcaatggcatgatctcgcctcctgcaacctccgcctcccgagttcaagtgattccccaggctcagcctcctgagtagctgggattacaggtgcacgtcaccatgcccagctaatttttgtatttttagtagacaggggttttcaccattttggccaggctggtctcgaactcctgacctcaggtgatctgcccacctcggcctcccaaagtgctgggattagcattttttaaataaatcaaataaaataggccagttgcggtgcccgactcctgtaatcccagcatttgggaggccaaggcaggtccatcctttgagcccaggagttcaagaccagcctgggcaacatagcaaaatcctgtctctacaaaaagtgaaaaaaactagccgggcatggtggtgcacgcctgtggtcccagctacttgggaggctgaggtgagaggaatccttgagcccaggagttcaaggctgcaatgtggtatgatcacaccagtgtactccagtctggaaaacagagtgagaacctgtctcaaaaaaaaaaaaaaaaaaaaacctttagtttcccttatttttgcagcattatattttgccacatttatcattgacattaaaaagctcacttcctttttttggaagctattttttcctttcagtgcacattgcatgccctccttgagcaccgcagtgcacatgctgcagaattgttgtttttcaagctatcctcttgataaaaagtagaatgaaaatgtctttatgcagtatctaggcaaataatttaaacattttaaagggtagagtcttcagtggaacatttgccagaaaacacagaatcaatctggtaatgtgtaaacaggcttgaagatcagctaaatttattcttaggcttgtagagattttcactggtggaagtttgtcagtcctgtttatttgaactatgtggaaagaccagatgggctgaggtaacatgtgattatatataaagagagagataggtatatgtatatgtacagacacacacacacacacacacccagaatcatacacacatgcatacatatcctccctggttactcatttttattgtctctaaatgccattgtggcagggaggcatttaaaaattttatttcaagatgagaggtcttgctattttgcccagtctggagtgcagtggcatgatcacagctcactgcaccctgaacctccctcgctcaagccattctcctgccacagccttctgaatagctgggactacagatatgcgccaccatgctcggctaatttttttttttttttcgggggacggagtttcactcttgttgcccaggctggagtgccatgatgcaatcttggc

SEQ ID NO: 586437 - DNA, 4001 bp, Homo sapiens
cagcctgggtgacagagcgagactctaaataataataataataataggtctgcagtgggcctgagattctgcttttctaacaagctaacaggtgatgccaggacactggtcagggcctcccacagtgtgagtaacaaggctgcatgcttcccctcccaaccgactcccaccgaagtacctaggcaagagcaaatccaggaaaactcttcggaaggaaagtttgtttccttctaaactcatattttgactcatcttcccaccccaccttcccagcccaccttttcatatctaggtactcaagtcctgttttccccacttttctaaaattctgacgtcagtaaaggacctgataatctctttcagagggaagtgttgcaagttatttacgattgcaaaaataatttcccagccgggcgcggtggcccaggcctgtaatcccaacactttaggaggccgaggcaggtggatagcttgagtccaggagttcaagaccagcctgggcaacgtggtgaaatcccgtctctacagaaaatacaaaaattagctggccgcctgtagtcccagctactcgggaggctgaggcaggagaatcacttgaacccaggaagcggagattgcggtgagccgagatcgcgccactgcactccagcctgggaaagagtcagaccccgtctcaataaaataaataactaaataatttctcaataaaataaataactacatacataggtctgccctaacatgttcggagctaggcaagagtcaactggaggcccacaattcacatatctaaatatccaagttatcagtcaacaccagctccagcaacttgctcccaggcaaaagctctggagaactggaggctaaaggagccggctctgctctgggagaggacgggatggtggttgttctgaccctgaaccgggcgtgggaactgaccccatcaagctcctagcccttattcttctggctcagaatatccaggcagttctaagggttacccaaaactacacaaacagggcagtcagagcaggggagaacagtcagctggggggccgtctgcgcgcacacctctgggtcatctgggccacccacgatgccgcagaggagcccctgtcgctcgctccggcctccctggcggagcctggagcgtctcccctccgcttgtacacacacatcctcccgccccaactccgcgtcctcaggcggtcctctccaggacttcccatccgcccagattccggacgatcaaaaaccccaggaagcggaaaaagagcgcgtcgctgcaggtgcaccagcctcggtcaggatccaggacaatgaaccgcgtcctcaggccaaaggagcgactccgtttccagtttcggaaggggtttctccagaataccaaacaccagtcggtgcctttctcctaaaaccagcacctcggggtggggagcgcgttcagaagttcacggttgactcaattactgggttaatttgatgtatgctaacttctatagccccgagtactcgatgtgcctgttttcaatggccatttaaaaaacagctggacctctgtatcaatctagagttagtcatccttcttggaagggagcagaggggcctcttaaatgttattggaagactcatcactgcatagaaccgcgtggccctacaatatttaattaggcaaagactaaactggaattcatctaggcctcccccaacagcccaggcacagattccgggaacccccgcggacgcccgccgggcccctgctcgcgcccccagcccagggatcctggcccctcggagcggcgggggggcaggcccggagccacagcctcacctccggtactccaggtactcgtccaccgccgccgcgccgccgagaggcaacgtcaaccgctccattgccggtggggaagccaaaggcttccctgcggaccagctgacctcgaagcccgacccgccccgttccctcccggtaccgcgccccctcccgcccgcctcctgattggcccggcctgaagcccgaggaggccgcgcgcggcaactgcgcaggacgcgcgcccctactggctgccggcgccaggcaccagaacccggatctccgcaagcgcagcctcgcgccacatggagtgcagtttgccgccctccacaaaccttgcacctattcccctctcccttccctggaccggcgagtcttcttgtaaattaacaagtgacaagggagtgcagtgccttgcatataacaggcgcatagaaaatggcttatttctttgtacagctcttttcgcttaatccatctcttgaaatataagtagttttgagaaggttctgctttagtttgaggcctgcctctccttaactgtcggcctgtttccagtattggcgttttcaaaaactctgatgtaacaatcagtagtcctgggtatctgggttcactttgggggttgctaaagctacatgttcttcaaaggaaccgaataactgatttaaggtgaagcaagtaaaaacaatttaggtgaagttttgttgttgttttttaacttttggaaacactctgcaaaatatatttagaagctgaattaccatgcgattggtaatttggccataatttgacttagcacgttgtggaaaagaataggaaatcttcaggcgaagtcattaaactctgaagctcccaggggatcagctttagcgccctctgtaaagtatctgggagggagaatatgcaaacaataagaaaaataattaaacttcagtacagtactttagtttcaaagtactgttctacatatttcaggtccataaaacattatgtaaacaaattgtttgggtaccacccacctcccttctcggtaccctttcaacaaaccccaccctctccccaaagtcttcctcctgttcagaggcgttcttgacagtcagataaatgagtgatcctgaaatcggattcatattttaggaaactgatctcagctcagtattctctcctatcacacgtgtggtttgctgctgtccattttacctcttccacccgacacctcccagatggggtcttgctccgtctccaaggctggagtgcagtggcgggatctcgactcactgcaatctctgcctcctaggttcaagcaattctcctgcctcagcctcctgagtagctgggattacaggcactagccaccacgcctggcttttgtgtgtgtgtgtgtgtgtgtatttttagtagagacagggtttcaccatgttggccaggctggtcttgatctcctgacctcgtgatttgcccgcctcagcctcccaaagtgctgggattacaggcgtgagccaccacgcccagccccattctacctctatgagagcctagtcttgcttttaggcagcaactgaactaacaaagaaaaatagaagaaaatgccaggctctgcaggcttacagaaaagtggcaggggaatgtctgtgtaggcaagtacaatttaaaaatctagagggaaatggttaaaatagatttagcccaattgtggactcttccaggaagatgctggagcagtaaactcttctggccaaagaagtcaacaaaaatattgagcgtgacgaataagagtatggaacaaactagaaaatgttatcctgaccttacataaagctgacagatttgcaaattaaaatactgtatatggtactcacctctgctttaataaaaaggtataatcaaactataacttcctcccaatgtgtagctaaattgatctaggaagtagggtggacagaggaacatgtaaattgcctaggcaagtgttaggcattttatttattcaatcctcatgaaagtttatgagataggatttgccagcattttgctgtgatgtataggttaagaatgctttcttctgaaaataacagaataattcaactaacagtggcttaattaaacataaattttattttttattgctttaaagaagagtgggggtaggtagttgctcacattggtttagagcattttcctcatg

SEQ ID NO: 586438 - DNA, 4001 bp, Homo sapiens
gcagcaatccacattaaaaatctgtaattgtaataaaacatccattaagtttatttttaaagtcactttaagccagtagtgtcttatttttactcccttttgaaacagaagccccttacaatgaggattttgaggaacctgtcctgtgtccctcttacaaagttcccattggtaattcagagaggtcctcaggttgagaactgctggactgaactccttttattggctccaactcttcttatttcttcctatgaagaaatgctagtctttattgagttgagaaaacattacaagaatctgtgaaacaaagcttctaatacctgtataaaactgaaaaccttgtgactttattggtaaacagccaagaaacacaagagactactagtagcctctagaaagaggtacaggtcgatgaagtgaccaaaaccggatgctgatttgctgattctgccaatttcttgttaaatggctttcagtaagtgattaacttttattttctaaattcaatagagatctgctggtactctgtaagatactgtatgactaatagtaacggttcccaagacttaagaaaacgtaactgcaaattggccacaagtccaaggggtcggggcctctgctatcagcattgacctttactctcgggagttcatatttccatctgtaaaactagaaaagataaagggacttattcactgagctgttgtgagaataaatgagcacacgaaaccatttggcagtgcctagtacacagtaagcaatctaatattatttatgtcattgtatccatatatatatggatacatacatatatatggatacatggatacatacatatatacggatacatacatatatatggatacatacatacatatatatggatacatacatatatatggatacatacatatatatggatacatacatatatatggatacatacatacatatatatatatggatacatacacctggctaatttttttattttttagtagagacgaggtttcaccatgttggccaaaaagaaacaaaggaaaagtcctatcaattagatagcagttctatattacaggcaataatattttttcttaaaaaaaaaaaaggtagaggatgatggaaaccgctcctcccacaagtaaaacagctggagctctcaatctcaaattgccaatccgtcactcacatattcagatctagggccactaatcatcatccgtggtcccgagctgtgagagcagtagcaaacaaataggaagaaaaagaagagacaccaaacatcaaagggctggatagcttgtaaaaaaccaaaagtacctctagtataggcgacactaaaactttacaagtgagtcaaaacggccccctatggagttggaatgcaacacccaactccgtccccacctctcggagctctcagcctacacgctgcaggggcgcgagccacagccaacctggggaagatgcgacccaggtgcccgccccaggccggggcgccgagtgccagcgccaggtgcagacgccgccccgtctccgcggagcccggggatgcccacgccggggcggcggccgggaaccccggccagcggctctccgggaccccagtcccgcctgcgccctctccaacgtccggacacgccgtgacaacgcggccgggcccggggcccgcccccggccggtgaccgcagtgcgcggaggctgaagtcgtaggtgggcgtctggcttccccggcctcctccatccctccccgaacctgagccccggctccgtccgcctcccagccgtctcaccggcctcccgcccgcctctccgccgcgcgcgcccgccttccggcctcccagcgctcagtcctgccggaggccgacgggagccgccgcctccagctcgcgcctccgcttcctctcggactcctccggctgcccctcaccccggcaagtggccaggagaaagccagctcgccgctgggcctcctcccacgcttcccggccgcgaccaatgggcccccgccgccgggaagccgcgcccgccccctggcggtggaggaccaagcgggcgcccgggccggccagagggaagggccggagagcggagggaggggtctgcggtcccgcccaccgcccccggccaggcgctgcacaatctgaacttgccacgtgggagctgccgccgccgcagcggccctgcgccgggtggcactacgggagggagaaaaatgtgtcaccgccgtctccccaccgtttacacgcacaaaatcccagcctcaagggcagaacattttaaatgacccacccatcctagagatgcgccagttaggtcatcttatatatcttgagatagctgagatggtcagatcaaccaaggaccttgggttatttgccgtttgacttcttgaaccctaggaaactgattctgaaaatcctactgtccagcgtcattagaattctgatcacctttaatgcaccacccaagaagaacagtagtccttgcattttccaagtcacgtttattttttaaattataagatacacaatcgttagaaatattttttctcaggagatttcctacaattgtgttgataattgggaagttaatccaaatcttactacataagaccttagaatgcaaaattatttcataattcagatccatattctaaaataatgaataactgttacctagtatttgacagaatattgggatcatcagtggttgcagaaattaaattgcatttaaaaatagggtttgactatagtgtgttaatatagaattaataatctaccaaattttagctttcctccaaaaatataaaacacacaaactaatagtaactatgaattctggagtttgtgatccgtgatcaggggagaaagcatgaaatgaattctcattgtcttccatgtgccaatattatgctatttgtgtattacttaaatcaaaaaactaagactccaaaactgagtttaaatatcttgctcaaaaatacaagatagtaagttatgaagctggaattccggcctagcttcatgtagctccaaataaacaaaaaggcactttgcttattatagtaccaaaaaatcataacacttactgtacacatgcctctcctagactgctatgtctcactgaaagagtttatgaagcctcttgagtagggaggtcacggtgtatttctgaaagagcaatctgctctgtaaccgagccaaccagattggaaattacatgtgacatattcttatagcaccacacctgaaacaattcctgtgcataaagtttaatgtgttagtagcctattctccactgaccataagatatagcttagaaccctttggtaggtaatgaaattaataacaatgggtcacaaccaacattttgttgctgttgattcactgaaaaatagaaaaaaaaaacagttcaaagcataaattcaggataagtattcttcatgaaacatttgtacagcatcatgtgtgggtgagtgtctgtgtgtctatgtcctggatacagtagaaattatatttcttaatatgggtttcaatttttttaacattggtaaatcacttctttaggactcctgttaatcagccagttcttacacctataaacgagtaaggataacttcctacttttacttggcaggaggtaggggagccaggagaagtattcaggattaatgattaagcttaataaaaccacagagctttacagctccaggaggtataagccaaaggtgttggctattacaataactaccgataatttatattatataataatagctactgataatgtatatttctaaagctgatatttattgtgtgcttattgtgcaccaggcacttttctaagcactttatatatatagacttatttaattctcacaataatcctataaatacagcggagaaaagtgaaacttgctcaaggtccttctgctatgaccagacagagctaagattcaaactcacgtgctcaacttcaaagcccaacttttttgttga

SEQ ID NO: 586439 - DNA, 4001 bp, Homo sapiens
atctcctttccccaaccagtgctccatctgccagactcactgcctccttgcccttgggcccaatgctgagagatttcctatgaattcagtggcgtctgtgcagcgagaaagaaagtgggcaggtagactagcccctgactcctgtccacatgacatctccctttgtcccacttggcctctgtccttccagtgcaacacctgtcttaggatactctgttgtctaaaaaaatcaatgtcactgctgatgacatctctatcttctccttgagtttagtagtcaagcaacctccactttgcatccacccctcacccctcttgtcctccattctcatctgcattgctcacctcttcaggaagatgttgggggctatggatggtctgttccatgtctggttctgcccctggtgccatttgacactggccatgagtaggatgttggggaggggcaggcagggtaccgaggaggtcacccccagggccatggtgttggaagctttgtagacgtctctccaattcctgccccttttgacctgcaacacagcccccaggcacaacctgagcatttggcaaaagctgcagtctgtttcagcccagggtttctcaacctcgacactattaatgttttgggttggatattctttgttgagggtaggatactgccctgcacactaaagaatgcttagtagcatccttgacctctacctactagttctagtagcactaccagccaaatcgtgacaataaaaaatgtctccagacatcgtcaaatgttccctggcagttggggccaaaaatcaattcttgttgatagccactatattgattaaacaactactagtatttaaacaatatttcaaccacccatttgttaacaattgcccacaggaattacaacccaggagttccctgccatctgtcatttctgccaatcctccctggactgtttcctggccttctttgaaaaatgtatcctcttggtccttccccgaggtgccctattatctcctgcaccttcactgaacaggaaggtcctctctaactccaaagtgctgttcattctcgcttccatccaaccagaggagagcccaggcaaggagacgaacgtgcaccgagtgcctgttagacaaggtacttttcttgctgtatttgcatttcatcctcaggtcagttcaacccttttacaatcaaggggccagattcaggctgcacaggttacttgcacagtcacctcccaaggagaaggcagaggactggaatctgagcccagctgtctctgggaccccaggtgctgttctttcgccaatccgcattattgttctcaagaagcgtctctttttactgcctctttgttcatctacttcaggtgacagcctgggggctgaagtaaactgggggattagataccaaattctccactcagagcagaggacccctgacctttctccctgggtgacagctgtctgtaggagaagccccgtctggggctcagcaaagcccaggtcagtgagggtggccttgcattccaggtccactagcttctccttgcctcaattctcactctgccccagtttcagggatggactctctcagtcatatcttgggaacaggtttcgaagaatcaaagagtgctattctgcgccacccaagaatacctggatgaagttgctttcaaacaccacggagtcaagaaacaggttgaattctggagaatgaaccacccggcagagcagtccctcctccacacctaggcccgctccagggttcggctctccatccacaggcaagaggcccctgaattcttcccaggcattcagggaagggaaggttggataggatcttgtgacttttactgtcttctttgatttcctccaagtctttctatgtggaaatgatgacaacatttctacacatgctcaggggcctgctgcacatttgtcctgggatctctgtctcccctcctggccttgggcagctggccaagccctgggaccaccagtcagctcacaatgatgaatggatgacatcatgaaaaaccaggacagacctgcaggaaggggaagtgcaaaggagcctcccttttcctccagagagcttgtgtgccttatccgtgcctggacattccccagcccttttcggaaccccaggacatagtcctcccggaacttgctgagaaagcagtgagccaggcagaaagcaagcaaggagggctgtcaggaagatccttccactgctaagaggaaaatgcccttcctgcctttcaacccttccttactctgaatgcaacctatctcacacaactttaaaagctgcatgtccattgaaaaccccatcttcctaagctttgcagcatgtgggcccccgacaccctggtggatctgcaggttatggaagcagttgcagggcagttggtgcctgctctgcattctgccgcggcaggctggttacttctgcaggacttacttcccttaggaggtcaaactgaagaagcaggagaagtaattagtttcttatccagaggctggctttgtcagggcgctggctgggaggaatagaaccccgatgagcagctctgctaggtcccaagctgttccccctcttggagagtgacagcatccctcacccctgaaccagaggaggaaagagcccaaatcatgggctgctaggtcaggaagaaagaaccaagcaggctgaccactattcaaggccattcctgggagaaactgttttctaatttggaccaaattctaaattttttttttttttgagatggagtctcgctcttgttgctcaggctggagtacaatgtgcgcgatctcggctcaccacaacctctgcctcccgagttcaagcgattctcctgcctcagcctcccgagtagctgggattacaggcatgtgccatcacgcctggctaattttttgtatttttagtagagacagggtttctccatgttggtcaggctggtctcgaactcctgacctcagatgatccgcccacctcgacctcccaaagtgctgggattacaggcatgagccactgtgtctgtcccaaattctgaacttattacataatgaattaaccatcaaggtcaaatgtaacacatatagacagagtttgacaatcattacacacaaaggacaagcatggaggctgacttttgtatttcattataaagtcagggagaagcctaaagggcctggaggctctcaccatccaattccatcagtccttccctctggtcattcagatcacacccctgctccagcacctgttatagctcctggctcagtaaaccaacttccaacctcacttttctcattatcttttgtttaccaggtaggaaaagtgtcttcatggtcacattctctaaggattagatcagagaccacatcctttggtttgcatttccctggaaataacctagaaagggaacacacagcacaaaagcgtagtaattaataaattgatacgttgctgttcacagttaaagcttaaccacaacaataaagctcattggtttagatatacaatttgagtatacttggccactgagacatccaagagtcagttggggagatgacttcttctcttttccatacaagtctgttaagcccacttctatggtgttcaaccctcagaggaagaaggcttgggtgcccagtctagaaagctgattgtgagcaaaggattttttagctctaaacaagatgctaagcagttttgtaaatggtgctttaaggtggctcacatctgtaattctagtgctttgggaagcctaggctcctgggaggatcactctaggacaggagttcaaggctacagtgagctgtgatcttgccactgcactcaagcctgcacgagagaatgagatcctgtctctattaaacaaaaaaatgatgtgcaccccttcctacttcccctgcaaacctcaaaaacaagcatattgaatctttttagaaaccatgtgacagatacttagttgtctattagttgtctgtccc

SEQ ID NO: 586440 - DNA, 4001 bp, Homo sapiens
aggaaattaaatataatatggaccctctgaaacaaaaatatagagataccaaaataagatgaaattaagaccgaaagaggtaagcaaagaaacaagaaaaaccaggccaggcgcagtggctcacgcctgtaatctcagcactttggaaggctgaggcgggcggatcacctgaggttgggagttcgagaccagcctgaccaacatggagaaaccccgtctcttctctactaaaaatacaaaattagctgggcgtggtggcacatggctgtaatcccaactactcagggaggcggaggttgcggtgagcccagattgcgtcattgcactccagcttgggcaacaagaccaaaactctgtctcaaaaaaaaaaaggaaaagaaaagaaaaaaagaaacaagaaaaactcactaaagatctggaagtcatgttagaagccataagaagtagagctggcatgacagaaaactgagtcagcaacatggatgacaggcttgagaatatgacacaataaagctgggataaatatcatacaataaagctggggagagagatgaactgactggggagaaatgagagatatagaaaatagttatgttgatccaacatacagattgagtccttagtgactagggaacaaatgaaattcaaaaaagtaatgaaaaacataaaaagaaacagccatttctgaaacaaaccaaaaaaagtcctgatttagcaaaagaacagaatgtactatattgcaggtaaagtgagcaaagaagccactggctcttgtgaagttcctaaatcttaggcataaagaatgcactagctaagtgttactgctcttttagaatttgtctagcagggctgggtgtggtggctcacacctgtaatcccagcactttgggaggctgaggcgggcagatcacttgaggccagtttgagaccagcctggccaacatgacaaaaccctgtctctacaaacaatacaaaaattagccaggtgtagtggcaggcaactgtagtcccagctactcaggagattgaggcaggagaattgcttgaacccaggagatggaggcgggtggatcatgaggttaggagttcgagaccagcctggccaacatggtgaaaccccatctttactaaagatactaaaaattagccgggcgtggtggcacacgcctgtaatcccagctactcaggaggctgaggcaggagaatcgcttgaacccaggaggcagaggttgcagtgagctgagatcacgccattgcactccagcctgggtgacagggtgagactccgtctaaaaaaaaaaaaaaaaaaaagagagagagagagagagagagaatttgtctagcatgttttctggtttccactggaaaaccccatattaaaacaacaacaacaacaacattatactacaaacatccagaaagaagaagcagacagtctacccaggggataaaaggatactggcctcagacctctttccagcaagtttagatggcataggacaatgaaacaatggagaaagaatgttgagaagaaaagtatgtgaccccatgattctataaatggcttaaaattcattcaaatataacaaaaataatctcaaaacactaagcacactaaaataaatccataagctggttctttgaaaaaaattagttggaccactaaacattttactttgtaaaaacatggacataaaacatgaaataagaaaacataagtatgtgcaaataaaggagaggtacaggcttctgggtgcaggtagtggcatgaagctgtactacttaagatgtagtccaggtagtcaaagaccccaaagtattgtgacttaaaatagaattttgattttctcttacataatagttcaaaggtcagcagtccagagtggatacagttatctctgcccttctcaacatgtggctttgagctctgggtcctcaggtggctgctccagctcctgccatcattatgtctgcatcctggccggtgagaagggggaaaagaatggggagttcacactcattccttttaaggctatgacctgaaaatggcataatcacttttgctcacatcccattggtcggaattcaaacacagggccacacccagatacaagggaagctgggaaatgtagcttttcactgggtggccatgagcccacctacaactggagaattatttattatttaaggatgagggatattgatggacaattagcaacccgtgggaagaagctatgtcacagaatgactccccttgccatacgcattaagtatgtagtttatttaaaaaacaaaagattaactattgataacctaacaaagaaagaggttaagtcaggtggccaaagggtagaaaagacataaaatctggagatagcctgataataaagaatgctaattaataatattgtccgtgttctcacaaattactccctccctctccccaaattggagaagagcagtctgagggagtgagaaatcagctcaggaaaacaattcaagaaaacccttcaagagtagaagaaaacaattcaagaaaaaccttcagaaatcccctatcagtcacagcactgtctcattagagacagaaaagcccagctgggttcaccattgttcagttcttcaggctgatttgacgaaggattacctcatgagaataggatacacctccaaatagaaaagagagctttttaaaatttttcaggagacactcagccttaaaaaagaaagaaattggcccggtgcaatgactcacacctataatcccaacactttcagaggccgaggtgggagaactgtttgagctcaggagtttgagatcagcctgggcaacatagtgagaacttgtctctactaaaaattaaaaaaaaaaaaaaaaaaaattgtccaggtgcagtggcatgtgcctgtagccccagctacctgagaggctgaggcaaaaggatcgcttgagcctgggaaagcaaggctgcagtgagccatgacataccattgcactcttgcctaggccacagagatcctggaaagagggaaataaaagaaaacaaaagaaaagaaggagagaaaggaaggagaaagagagagagagaaataaaggaggaaggaagtaaggaagggagaagggaagggaaggaaggaaaggaaggaaggaaggaagaaaaagcaagaaaggaaggaaggaaggaaaagaaagaaaggaagaaaggaaatcctgccataggcaagagcatgcatggacctaatgaaataaaccagacacaaaaagacaaatactgtatgatgtcacttatacacagaatcaaaaatatttggccgggcagggtgctcacatctgtaatcccagtactttgggaggccaaggcgggaggatcatttgaacccaggagttcaagactagcctgggcaacatagtgagaccccatctctaaaaataaaatatagtaataataaaaattagcagggcctgtgttcccaggctgaggtgggaggattgcttgaagccaggagattgaggctgcagtgagccatgatggtgccacactgtactccagcctgggtgacagagaaagaccctttctcaaagaaaagaaattagtcaaactcatagaagcagagtgtagaacagtgattgccaggggctgggtagggaggtgaagatgaggagatgatggtcaaagagtacaaagtttcagttgtaggatagatgaatgagttctagagatttactatgaggcatcatgcctaccactaacaatgctgtactatatagttaaaatttcccaagagggtagatcttatattgaacattcttcacacacacacacacacacacacacacacatacatacacacaataataataataatagggcagaaggaaaattcgggaggtgatgggtatgtctatggccttgatggtagtaaggttggcttcacaggtatatacctaacccacattcatcaagttgtatacattaaatatatacagctttttacatctc

SEQ ID NO: 586441 - DNA, 4001 bp, Homo sapiens
tgtgcgggtcagcctctccctagcacattctaagtttgctgctacccaggtcacttagtgtccattcagagaatctaaacagttttaatattaggccaaagaaaacagcactttgggaggccaaggcgggcagatcatgaggtcaagagatcaagaccatcttggccaacatggtgaaaccccatctctactaaaacacaaaaaaattagctgggcgaggtggtgcacgcctgtggtcctagctactcgggaggctgagataggagaattgcttgaacccaggaggcagaggttgcagtgagcctagaccatgccagggcaacggagtgagactccatctcaaaaaaaaagcacacattaagagaagaaatttgcagctgaatcattacacccaaatagaaatgactagaaattggatcctgagactggacttcccatgttattgctctgtctccaccaagggtatgttaggaatgagctcgcctcaggtttgccagctgatcacccaactacacatctcctggggcacagtaaagggaccgtggagcggcaggagccataaacacagctctccaaaatccggggactccattagggagcagctcgctgctctgtgaagagtctccaaattaagcccaagacccacctcaaactgttcccaccttctctcctataacccctggctactttcccattccatttgaatgggtctgtgtcttgcagaccttgcattccagcctccctgcctttccttaggtactttgaagcccctctgtctgggatatcctccccgctgctcttccacttaccaaaatctcagcagtctctcaaagaatggcttaagacccttctggaaagccttcttcaactgccaaagtccagagagaatgccttgaatgaatgcccccagcacctgctctctgcagtcatgcctggtgcatcagctggcccaagctctctgacatagagcttgcttagacagttaccaaataacaggtaaaccaaactcataggcttcctggccagggacactctgatttttctctgcacctcctgccctgcactcagtagatgtttagtgtgtgcttactggctgattaactggttatgctctcctgcgcaggagcatgggttcaggctagaccgctagagggaggcaggcagcacccgcgttaagacttgatacttacgaaaacgaccaccttccactcccagtggccccatcccaggctcacttccattggtcatgtcaccaccatccttttagggaatggtaggatctgggcaacacctatttacccagtgtctttgctttcaaacaaggctgtttctaaaccatcccagactgaggaggatggatttcagagcagagtttctaacagcaaccttcattccctgtaaccatccactttggacaagtggcccagaaagggcctgtgaaccctgcctggagactgagctctgatctctcatttgtaaagcataaatcaatttccctagaacagatgacctgcaggtagctctatcatacggtaggcacaaatggaggtgaacttgggacccagaccttctggttttctctagctttggtggcttctttgtccccccgcccccccctcccccagggctttaaaaggccacagcatctcctaaccaacccctaggaacaggttttggaaacagaaagacagctggccctgagctccacgagggtacctggataaagttgctttcaaacaccaccgagttggagaacaaattgaattctggagaatgaatcagttgacaaagaaggccattttccaccccaagttccactccagggcctggttccctgacctcaggtgggaggcccctgattttactcattggttcttggtaagaatgggcttgggaacatttctggggctccacgccgacccagcccaatgccaggatgttgatgtgatctgcccccacctccccagcatttcctccccatttacttacgggctgtccaccagggctgggagggcctgtcagctcacaatggcaggaatgacatcaaggaatgtgatggtgacaacagaaaagggaaaaaaaaaagaagaggaaggacagaggatgtgccaggctcttttctccctctttccaccaactacaaaccagcagtaatgcagcctattccactttgtaaacattcagccttaccccacatggaaaaaatgaccctcccaaagttatgccaaggcagcagtgagctggccagatgcaaggaaggctctcgggaacatacaggctttaatcctcttggctccccttgaagcccctcaccaaacttccatgggacttgttcacctgcccagggaagtctaaggataggaaaaagggagttcatcttccctaccccatctcatgggagaaaaggagatttttttttttttttaaagaaatggacacctgttaactaaactgagaagcttatttatttggaaacagtgggcaaaggagaaggcagtggcacagttgtatgctggagccagaccaaaacaggtcacgagagctggttgttacattttcaggaatgctacaaaccagttgttaaacacagcaattattaaaacttttttttttttttttttgagacagagttttgctcttgttgcccaggctagagtgcagtggcgtgatctcggctcaccacaacctccgcctcccatcttcaagcaattctcctgcctcagcctcccgagtagctgggattacaggcatgcaccaccacacccggataattttgtatttttagtagagacagggtttctccatgttggtcaggctggtctggaacacctgacctcaggcgatccacccacctcggcctcccaaagtgctgggattacagtcatgagccaccaagcccagcctttaaaacttaaatgatataaacttggctgggcttggtggctcatgactgtaatcccagcactttgggaggccgaggtgggtggatcgcctgaggtcaggtgttcgagactagcctggtcaacgggtgaaaccccgtctcaactaaaactacaaaaattagccgggtgtggtgtgggtacctgtagtccagctacttgggaggctggggcagggcgatcgcttgaatctgggaggtggaggttgtgatgagccaagatggtgccactgcactccagcctaagcgacaaagcaagactctgtctcaaaaaaaagaaaagaaaagaaacagtatacagtggtgggctgctgcatatctcttcccagggtgtgttcaggaacttcatcttgttagctagcttgaaatcagcaagtgctacaaatcagggtttgatttattgttctgttgattgtctaaactaaagtgatagagaaaatgttaattatgcagattaaacttaaagatgtgtctgtagctattatattttgggcatagaaaaatctgagaaaatagccttccagtatttgaagacttacctaatttagcgaagaagttgcccacgtcattgacaaatgagtaaagttccaatacacaactttgttatttcacttttgccttgctcattaatgtaaatcaaaatatcaaccaatattcatgtcagaactatacttgcttgtcagttgcaatcataggttggctagaaatatcagcgtttgacaaaaatcaacaaaagcttttggtaagaatcaactggtcatatgaaatttacaataaagagtattataaggccaggtgcagtggctcacgcctgtaatcccagcacttcaggaggccaaggtgggtggattgtttgaacttaggagttcaagatcagcctgggcaacatggtaaaacctcgtctctacaaaaaatacaaaaattacccgggtgtggtggcacgccctgtggtcccagctatttgggaggctgaggtgggaggatcacttgagtccagaaggcagaggttgcagtgagcagagattgtgccactgcgctccagcttgggtgacagaatgagact

SEQ ID NO: 586442 - DNA, 4001 bp, Homo sapiens
tcaaactttgaacttttctgtgcgggtcagcctctccctagcacattctaagtttgctgctacccaggtcacttagtgtccattcagagaatctaaacagttttaatattaggccaaagaaaacagcactttgggaggccaaggcgggcagatcatgaggtcaagagatcaagaccatcttggccaacatggtgaaaccccatctctactaaaacacaaaaaaattagctgggcgaggtggtgcacgcctgtggtcctagctactcgggaggctgagataggagaattgcttgaacccaggaggcagaggttgcagtgagcctagaccatgccagggcaacggagtgagactccatctcaaaaaaaaagcacacattaagagaagaaatttgcagctgaatcattacacccaaatagaaatgactagaaattggatcctgagactggacttcccatgttattgctctgtctccaccaagggtatgttaggaatgagctcgcctcaggtttgccagctgatcacccaactacacatctcctggggcacagtaaagggaccgtggagcggcaggagccataaacacagctctccaaaatccggggactccattagggagcagctcgctgctctgtgaagagtctccaaattaagcccaagacccacctcaaactgttcccaccttctctcctataacccctggctactttcccattccatttgaatgggtctgtgtcttgcagaccttgcattccagcctccctgcctttccttaggtactttgaagcccctctgtctgggatatcctccccgctgctcttccacttaccaaaatctcagcagtctctcaaagaatggcttaagacccttctggaaagccttcttcaactgccaaagtccagagagaatgccttgaatgaatgcccccagcacctgctctctgcagtcatgcctggtgcatcagctggcccaagctctctgacatagagcttgcttagacagttaccaaataacaggtaaaccaaactcataggcttcctggccagggacactctgatttttctctgcacctcctgccctgcactcagtagatgtttagtgtgtgcttactggctgattaactggttatgctctcctgcgcaggagcatgggttcaggctagaccgctagagggaggcaggcagcacccgcgttaagacttgatacttacgaaaacgaccaccttccactcccagtggccccatcccaggctcacttccattggtcatgtcaccaccatccttttagggaatggtaggatctgggcaacacctatttacccagtgtctttgctttcaaacaaggctgtttctaaaccatcccagactgaggaggatggatttcagagcagagtttctaacagcaaccttcattccctgtaaccatccactttggacaagtggcccagaaagggcctgtgaaccctgcctggagactgagctctgatctctcatttgtaaagcataaatcaatttccctagaacagatgacctgcaggtagctctatcatacggtaggcacaaatggaggtgaacttgggacccagaccttctggttttctctagctttggtggcttctttgtccccccgcccccccctcccccagggctttaaaaggccacagcatctcctaaccaacccctaggaacaggttttggaaacagaaagacagctggccctgagctccacgagggtacctggataaagttgctttcaaacaccaccgagttggagaacaaattgaattctggagaatgaatcagttgacaaagaaggccattttccaccccaagttccactccagggcctggttccctgacctcaggtgggaggcccctgattttactcattggttcttggtaagaatgggcttgggaacatttctggggctccacgccgacccagcccaatgccaggatgttgatgtgatctgcccccacctccccagcatttcctccccatttacttacgggctgtccaccagggctgggagggcctgtcagctcacaatggcaggaatgacatcaaggaatgtgatggtgacaacagaaaagggaaaaaaaaaagaagaggaaggacagaggatgtgccaggctcttttctccctctttccaccaactacaaaccagcagtaatgcagcctattccactttgtaaacattcagccttaccccacatggaaaaaatgaccctcccaaagttatgccaaggcagcagtgagctggccagatgcaaggaaggctctcgggaacatacaggctttaatcctcttggctccccttgaagcccctcaccaaacttccatgggacttgttcacctgcccagggaagtctaaggataggaaaaagggagttcatcttccctaccccatctcatgggagaaaaggagatttttttttttttttaaagaaatggacacctgttaactaaactgagaagcttatttatttggaaacagtgggcaaaggagaaggcagtggcacagttgtatgctggagccagaccaaaacaggtcacgagagctggttgttacattttcaggaatgctacaaaccagttgttaaacacagcaattattaaaacttttttttttttttttttgagacagagttttgctcttgttgcccaggctagagtgcagtggcgtgatctcggctcaccacaacctccgcctcccatcttcaagcaattctcctgcctcagcctcccgagtagctgggattacaggcatgcaccaccacacccggataattttgtatttttagtagagacagggtttctccatgttggtcaggctggtctggaacacctgacctcaggcgatccacccacctcggcctcccaaagtgctgggattacagtcatgagccaccaagcccagcctttaaaacttaaatgatataaacttggctgggcttggtggctcatgactgtaatcccagcactttgggaggccgaggtgggtggatcgcctgaggtcaggtgttcgagactagcctggtcaacgggtgaaaccccgtctcaactaaaactacaaaaattagccgggtgtggtgtgggtacctgtagtccagctacttgggaggctggggcagggcgatcgcttgaatctgggaggtggaggttgtgatgagccaagatggtgccactgcactccagcctaagcgacaaagcaagactctgtctcaaaaaaaagaaaagaaaagaaacagtatacagtggtgggctgctgcatatctcttcccagggtgtgttcaggaacttcatcttgttagctagcttgaaatcagcaagtgctacaaatcagggtttgatttattgttctgttgattgtctaaactaaagtgatagagaaaatgttaattatgcagattaaacttaaagatgtgtctgtagctattatattttgggcatagaaaaatctgagaaaatagccttccagtatttgaagacttacctaatttagcgaagaagttgcccacgtcattgacaaatgagtaaagttccaatacacaactttgttatttcacttttgccttgctcattaatgtaaatcaaaatatcaaccaatattcatgtcagaactatacttgcttgtcagttgcaatcataggttggctagaaatatcagcgtttgacaaaaatcaacaaaagcttttggtaagaatcaactggtcatatgaaatttacaataaagagtattataaggccaggtgcagtggctcacgcctgtaatcccagcacttcaggaggccaaggtgggtggattgtttgaacttaggagttcaagatcagcctgggcaacatggtaaaacctcgtctctacaaaaaatacaaaaattacccgggtgtggtggcacgccctgtggtcccagctatttgggaggctgaggtgggaggatcacttgagtccagaaggcagaggttgcagtgagcagagattgtgccactgcgctccagctt

SEQ ID NO: 586443 - DNA, 4001 bp, Homo sapiens
aacgggggcagcttagagcagcttccaacccttgcccacctcggagaaggggctgcaaagggggaggtggcttcggagggaggcggagccttcgctcctgttccagggcacacaccaggggaccatcagatggaaagcctgagggggagaggtaaaaggcagcctggtaacagagctgtgctgctgttcttatcatggggttacttggtgaattctccacctttctcctctcccgtttcctgagcgggaaggtgtgctagagtttaagtgcaaacactagagacatgtaaagtatcatgtggctatgaggtatcgaaacggtttgtagggagtacatacaaagatggcaaataggctttcatctcataccaattgtgacaaattatggtggcttcctagggcactctattagcaggaatctggggtggcaccctagcgaggccggaaggagtgcgttcgactcatgatgtctgccgcagacataggacgggagcaggagcaagcgttcctgggcaaacgcctgagaggctgggtctctgtccgtggtcctctactgttctccctattcttcattaacacctagccccccaggcgcccacctcaagcccctcctcaccaagtaagactgcaaggtgcagacacacgtggatggtgtgaatgtcaaaggaggggcagtttcggatgatgagctgactcaagtcctgcagtgtgacctgctccacaggagggggccgtggccgagaccccaagagctggcccagacgacgaagcgccaccgagtagtggtgggcgcgcaccttgctggggttctggcccagccagcgcagcagctccccagggctcttcgcctgttccagaagccgctgcagtccttgcacaggacctgcactggggcctcctccaacaggccggtccccccatttgctgggccccaaacagcagggctgtactggagggatcagcagcaggccagacagccgagcaggggaggtctgagcagagagcaggactcgaagcatggagttgggtgatggagaccctgaggggcagcccaaaaaagggggtgaggttttctccaaaggggagaaagacctgctacctactgcttacctcactcctcatttagggggcctgtggtcagagcaagcctttgtgactgctctgggcctcttccccaccccgcccctctgcctccttccacgcctttgaaacagcaatcataatcctcagtgcgctcagcgcagcactacttgcaaagcaattccacatgcaccatctctgatgctccttacacgcccatgaagagtaggcagggctggcattacctcatttcaccggtggagaaacgcaggcccagagcagcgaaggggttaagttaagcccgaggtcattaaccgggttagtggtcgcgcccagtctggagcccaggcggcaccggcgtgcactctcccgaccacctccctctcccacaggaggcggcggcggcacagagggtggaacgcgggctccgcggctggacggtgctgggttccatgctgggcgctcccactcaccagcggcgtgaccttggacaagtggcttcgtctctctaagtctcctcacccgtgaaatgaaaacgcagcgcccacctcgcagggcgcgcgtggagcccgagtgcaccgctttgcgatggcgcggagtcggcgaagtcgggggccccaacacccaccccggcccagggacgccaggagaccgtggccgctgccgctaacaccagctcccgctgccctcccgcagccctccccgcaggcgccacccctacatgactccccgggccctgcgcaggtcgctccctcagtcggtctcggggcccgggggccgggttccccccgcggcctcctcatcggctagccaccgagtccgccatcttcccagcagcccctagatagccgcccggacgccaatcccgaagcagctatcggtcttcggagacgtggctcccggcaggcactgcgagccagggagccgcgagccccgcccgcgggaagtgcgcgcccggcgccgagggcggggccacggaggccggcgccaaagccagagcagaacgctggggagaagggaaggcggagggccagaccccaggcgcagtccgtgcccttctctcccaaggggcgaggactccccgcccgccagcccgcacacactcagacacactgcaagagtgaaaacttcacagttactttaatctgcacgggttccggggaactcctctgcccctccccgctccccttcaccagcctcccaccgacctggcgtccccaactcagcccaaggagctgtcagggattggaggcggctgggtcctccggcagaacactaagacgggcccccggggcggcccggctctgcccggggccgaggcagcgacagcagatgcccgaccccgaggagcccactcccagtgcgggctgagggtcagcagccccgggaggtggccccgagccccggcggtcgcagggcggggcctccgccagtcccgggagtcctctgcggcgcagggctgggctccagggcggcgggaagaggcaggccggagaggcgggcctgggcaggcagcagctcccgccgcggcgcggggagcaaggtccggaggggccggcgacgctgccaagcgcccgcggaggcactacgggcggtacatggcaaaggccaggagactgaggagcagggtgaagccggccaggcccagagtggcggtcaggggaaagaagggccggtactggatctggcagtaccagagcagcagcaacagcaggagcagcaggggcagcagcaggctgccgatttccagcccggaggggccgggctcggaccccggcgggcaggggggatttgggggaccgactctcgtggacacgtggcagtggagaacgcagttgggagggaggtgaaggctgcccagggtctgggtgtcgtcgcctagcagctgcccttggtagatgagtcgcacctgctgttcccggccgggaaactgggtcctgaggagagagggacctgggtaagagagcaggcctcaggcaatcctagtccctggccccggaacagcactcccaccctccccctgccctccacaacacaccggccctggcctgggaggggccgtctgccaggggaacaagtacagttgtgatctggggcgctcagcgcctccagtataaaggagggctgggtcttaggtgtctctgggggccttctgcgaccactctcccaacccctgtctttagcattgctcctgcctcttgacctacttaccttttcaaggagccaatggtgtcgtggggccaggccctggccacctgctctgaatcattgaggaatttcagccgtagcacgaggggctcctgcggggagtccggggctggcggtgttgctgtgaaccccgtgctgggctctggctgtgcagcttgacctctgtgtctcaggctgggggtctctgcccctggggcctcccctctcatgctgtcggtagctgccatggctgcgctgggctgggatggcgttggggtccctgacggctggggcagtgggtccccgccctcagcggtgtgcgttgagacccaggcaagggccagcaccagaaggcaggcaagcaccgagaaaaggacggtcacctcatcacccaccccttcaatcagggtcatggcgcctgccttgcccgccgcgctaccgagctggagaggcacaaagagcccgtgaggcccgggccccctggccaggagccctggaacctccacagggtcctgccctcaccccaccgcgacgctcccaccgtcctcagcctccgtcccctcacccaccccagggtaccggcttctctgcctcccagtcgccccaaacttgcctccgggtgccccttcccatcgccgaatcccaagtcctaactttctgtcatctgagctcgaggtcttcaaccagctcccaactcacccaaaccctatcccaaggtaagggcctaagcaacg

SEQ ID NO: 586444 - DNA, 4001 bp, Homo sapiens
catcacttcagatactcaggagcttagctccctaacctactgcctttccattctattaatatatgcctggcaaattcctatcccagacgaagtcaacttggttatctctgtacctacatctgatttactgactgctacttgagaaaatcacacaaccgggaagatgggtaccattctccctacatattttcaagcacaattgtatagaggtacaacacaaaactcactgtaataaattaaaacaatacagctatggacagagtaaaaagttagaattctccatcttttcccccaaaaccattccacaagacatctgttattaacagtttggcataggttctatgcatgcactattgtcttaaagctagatatatacacatatatgtacataaacacatatacaacatatatgaaatcaaatggacagctagagcagaatggacagttgctaagcaacttgcactttttcttttttacttaataatatgtgttgggagccagccatgtggtgtatgcctgtagtcctagctacttgggaggatgaggtgggaggatcaattgagcccaggagtttgaggctgcagtgagctaggatggagccactacaccctagcctgggtggcagaccaacaccccgtgtctcaataataatgatgataataataatatgtcttggaggacatttcttcttagtaggtacagatatactttattctacataatgcctcattcgcttagtcactctaggtcatttactatttttactatgaaacaaagttataatgaatatccttgtacatcctcctgaacacatgtgcaagtatttctctaaagtagatccctagaagtagaaatgcttggttaaagggtacatgtatttaacatcttaataaatatttctcaattaccatccaaaaaagagacgggtggggggtctctaccaaattgccctcccaaccgcctaggagcgttactaccctcaggtaggacctcctctttctttccctagacatctctctccctcattctccacataacgtatctttgctcgaacctcctactgcaccaacatccccatccccactcaaacacgcacattcttggtaaatatctcaccaactatttgtagagaaaaaaagaggtcaacaaaggcaaatgttctcagcttcctacccccaaacctacaaaacctaatgtctatccccttcctgtcttccttccctactcttataacggcagtaggagggcagtccttcctgttgtctaaaggcaatcctggttgagagggtccttaccttcacaaagggctgactacactgaccaaaggtctcagcttccactcttccctccgctaacctccatctattttctgccctcacggctccatggaaacctcaggctcaccttgggcagaatccagctccttatcttaggtgactagtgcctactccctacttctgacaacattcttcataatgccagtctgctgattttcctcctcaggctctctggcacttctttctcactcctccactcctcaggtacttcttgtccaaaccttaaaatctgagtttggggtttccgatctgggccttgtgctcattccccctgggagatgtcacccattccccacgtgcagccaccatcaccctctgttttctctctaatcagcgtcttcagccctgatcgcctacaagtccgaatttgacttcactttctcgcattctgccccgccttccctccactcctccccaatcccgaaacctagtccctcctccgggaagtctttcctgactcctcccccttctaactccccaccgacggtctgtgtccgctgccacgcgtgtccagtacctcgcagacctgaggaatgtagttctccttgaagtagttcttcagcctcgggttggcattgcgtagcgaggccatggcccaaggcctgacggagaagctgcgatagtaccctccccgcgctgggactaggggccgggcgcgtgcgggcgttgtcccggcaaccagggggcggggctgggcgtggcaccgccccgcgctccgctgccaggggcgggagggaggaatggttgcttcacgccccgggggaagagacgggaagctcggctctgggttgcgggccccggcgtctccgcgtggggcgcaccgtccgacccccccctcccggtgtgcagcgccccgcaccgccccgcctcgcctgggagaagccgccgggacgcgccgggctggagtgggcggttataggctttgagctaggccgtttccgggaggcggagctcagaccccatttcctttctccacatccaggtcaggtggcgtttgctgtggcggctaggcccgcgtgcgctggagacctccgcgctggcccccgcgagcctcctgccctggcccggcgctgcggctctgccgcggcggcagcatgggtggcccccggggcgcgggctgggtggcggcgggcctgctgctcggcgcgggcgcctgctactgcatttacaggctgacccggggtcggcggcggggcgaccgcgagctcgggatacgctcttcgaagtccgcaggtgggaccccggggtttccggcaggtgggcggggactgggcaggggggctccccaggccggggtggtggcttgcgtgtgctcggggtaaaatgaggagccgagctagagggagaggcagtacttgtgtgagtgcagggtgctgcgccgcccccgccgcccctttgctgactatactggtatgaaaacttgccctggctttcctgcctgagctccgcgtcacagcggaggattagatttcttaaaaacctgttgatggcctctcattttaaagcttgctccgggcctttgtgtaactaaagggattctcccgattgtggaagggctgttgaggggcccagagccataggtcaatctctgcttgcaggtgccctggaagaagggacgtcagagggtcagttgtgcgggcgctcggcccggcctcagacgggaggtacctgggagtcacagtggtccaagacctcgcagcctggtgtgtgttttggaaatgggaacagttgtctgcgcgagacacaccctcccagcggacaaatgcatgattcggtttctgtccaaaagttgatcggtacattaaaaccctccaaaggcatgtttcacatcatggaagctgttagggaaataatttaaaatatcatatctgccatccaagaaactcctgtccacaattgtagaagagagctaaacagcttcattgttgaataagcacaaactaaattgcctcacacatcacgggcaatttgctaatgggatagcaggaagaattctaattcctttaaatgtagctggacagatagaaccgatttcatattacatacgtgttctcaagataaaaaataatttgtccttaggtaagaggacttgacagtaccatttgctacatgtagtttatcctgaatttactggtaattggggtggttgttatctaattgcctttatccagaggaaaaataaaaatatctttatgatgtggaaccaggtgcccaggctaaaaactcacagagttggggagattggggatctatcttcctggaagagtaggtttcaaagagtacgctttcgaacagtaggctccaaagcttttaagaaagtctttcttgggctgtaaaactggccaaatgcttatttcacttttaaaaagatttacaggctgggtgtggtggctcacacctgtaatcccagcactctgggaggccaaggcaggcggatcatgtggtcaggagttcaagaccagcttgaccaacatggggaagccccatctctactaaaaatacaaaaattagccgggcttggcggtgggtgcctgtaatcccagctactcaggaggctgaggcaggagaatcacttgaacccaggaggcagaggttgcagtgtgccaagattgcaccattgcactccagcttgtgcgacagagcaagattctgtctcaaaaaaca

SEQ ID NO: 586445 - DNA, 4001 bp, Homo sapiens
cttgatgtaccctgactctcaactcaagtccatttctgccacctgctccaccgccatatcacagactgagccatcactcagaatggctgcaccctgaattgtaaatataaacgttccactttctgacccccacctcctgtgtttccagctccctcacttaattactccctctacttctcttcactcacctcttagaggagtcttcactttctgtccatgtatcagtatgatatccttttctcatttcccactgagtccttagagtccttggcccatcacttcagatactcaggagcttagctccctaacctactgcctttccattctattaatatatgcctggcaaattcctatcccagacgaagtcaacttggttatctctgtacctacatctgatttactgactgctacttgagaaaatcacacaaccgggaagatgggtaccattctccctacatattttcaagcacaattgtatagaggtacaacacaaaactcactgtaataaattaaaacaatacagctatggacagagtaaaaagttagaattctccatcttttcccccaaaaccattccacaagacatctgttattaacagtttggcataggttctatgcatgcactattgtcttaaagctagatatatacacatatatgtacataaacacatatacaacatatatgaaatcaaatggacagctagagcagaatggacagttgctaagcaacttgcactttttcttttttacttaataatatgtgttgggagccagccatgtggtgtatgcctgtagtcctagctacttgggaggatgaggtgggaggatcaattgagcccaggagtttgaggctgcagtgagctaggatggagccactacaccctagcctgggtggcagaccaacaccccgtgtctcaataataatgatgataataataatatgtcttggaggacatttcttcttagtaggtacagatatactttattctacataatgcctcattcgcttagtcactctaggtcatttactatttttactatgaaacaaagttataatgaatatccttgtacatcctcctgaacacatgtgcaagtatttctctaaagtagatccctagaagtagaaatgcttggttaaagggtacatgtatttaacatcttaataaatatttctcaattaccatccaaaaaagagacgggtggggggtctctaccaaattgccctcccaaccgcctaggagcgttactaccctcaggtaggacctcctctttctttccctagacatctctctccctcattctccacataacgtatctttgctcgaacctcctactgcaccaacatccccatccccactcaaacacgcacattcttggtaaatatctcaccaactatttgtagagaaaaaaagaggtcaacaaaggcaaatgttctcagcttcctacccccaaacctacaaaacctaatgtctatccccttcctgtcttccttccctactcttataacggcagtaggagggcagtccttcctgttgtctaaaggcaatcctggttgagagggtccttaccttcacaaagggctgactacactgaccaaaggtctcagcttccactcttccctccgctaacctccatctattttctgccctcacggctccatggaaacctcaggctcaccttgggcagaatccagctccttatcttaggtgactagtgcctactccctacttctgacaacattcttcataatgccagtctgctgattttcctcctcaggctctctggcacttctttctcactcctccactcctcaggtacttcttgtccaaaccttaaaatctgagtttggggtttccgatctgggccttgtgctcattccccctgggagatgtcacccattccccacgtgcagccaccatcaccctctgttttctctctaatcagcgtcttcagccctgatcgcctacaagtccgaatttgacttcactttctcgcattctgccccgccttccctccactcctccccaatcccgaaacctagtccctcctccgggaagtctttcctgactcctcccccttctaactccccaccgacggtctgtgtccgctgccacgcgtgtccagtacctcgcagacctgaggaatgtagttctccttgaagtagttcttcagcctcgggttggcattgcgtagcgaggccatggcccaaggcctgacggagaagctgcgatagtaccctccccgcgctgggactaggggccgggcgcgtgcgggcgttgtcccggcaaccagggggcggggctgggcgtggcaccgccccgcgctccgctgccaggggcgggagggaggaatggttgcttcacgccccgggggaagagacgggaagctcggctctgggttgcgggccccggcgtctccgcgtggggcgcaccgtccgacccccccctcccggtgtgcagcgccccgcaccgccccgcctcgcctgggagaagccgccgggacgcgccgggctggagtgggcggttataggctttgagctaggccgtttccgggaggcggagctcagaccccatttcctttctccacatccaggtcaggtggcgtttgctgtggcggctaggcccgcgtgcgctggagacctccgcgctggcccccgcgagcctcctgccctggcccggcgctgcggctctgccgcggcggcagcatgggtggcccccggggcgcgggctgggtggcggcgggcctgctgctcggcgcgggcgcctgctactgcatttacaggctgacccggggtcggcggcggggcgaccgcgagctcgggatacgctcttcgaagtccgcaggtgggaccccggggtttccggcaggtgggcggggactgggcaggggggctccccaggccggggtggtggcttgcgtgtgctcggggtaaaatgaggagccgagctagagggagaggcagtacttgtgtgagtgcagggtgctgcgccgcccccgccgcccctttgctgactatactggtatgaaaacttgccctggctttcctgcctgagctccgcgtcacagcggaggattagatttcttaaaaacctgttgatggcctctcattttaaagcttgctccgggcctttgtgtaactaaagggattctcccgattgtggaagggctgttgaggggcccagagccataggtcaatctctgcttgcaggtgccctggaagaagggacgtcagagggtcagttgtgcgggcgctcggcccggcctcagacgggaggtacctgggagtcacagtggtccaagacctcgcagcctggtgtgtgttttggaaatgggaacagttgtctgcgcgagacacaccctcccagcggacaaatgcatgattcggtttctgtccaaaagttgatcggtacattaaaaccctccaaaggcatgtttcacatcatggaagctgttagggaaataatttaaaatatcatatctgccatccaagaaactcctgtccacaattgtagaagagagctaaacagcttcattgttgaataagcacaaactaaattgcctcacacatcacgggcaatttgctaatgggatagcaggaagaattctaattcctttaaatgtagctggacagatagaaccgatttcatattacatacgtgttctcaagataaaaaataatttgtccttaggtaagaggacttgacagtaccatttgctacatgtagtttatcctgaatttactggtaattggggtggttgttatctaattgcctttatccagaggaaaaataaaaatatctttatgatgtggaaccaggtgcccaggctaaaaactcacagagttggggagattggggatctatcttcctggaagagtaggtttcaaagagtacgctttcgaacagtaggctccaaagcttttaagaaagtctttcttgggctgtaaaactggccaaatgcttatttcacttttaaaaagatttacaggctgggtgtggtgg

SEQ ID NO: 586446 - DNA, 4001 bp, Homo sapiens
aaaaaaaaaaaaaggatctgaaatcttattacctgccaaaaaacatctcctacctagaaccctaacctgggctgggcgcaggggctcacacctgtaatcccagcaatttgggaggccagcctgagcaacacagtcacacctcatctctaaaaaaattttaaaaagagaaataaaaataaagaatgggccgggcacagtggctcacgcctgtaatctcagcactttgggaggccgaagagggtggatcacgaggtcaggagattgagaccatcctggctaacacggtgaaaccccgtctctagtaaaaaaaaaaaaaaaaccaaaaaattagctgggcgtggtggcgggcgcccgtagtcccagctactcgggaggctgaggcagaagaatggcatgaacccgggaggcggagcttgcaatgagccgagatcacgccactgcactccaccctgggcaacagagcgagactccgtctcaaaaaaaaaaaagaaaaagaaaaagaggcactgaaccatgtgaagtgttatttaaaaaaaaaaaaaaaaaaaaaaaaaagcagagtccagctgggtgctgtggctcacgcctgtaatcccaacactttgggaagccaaggcgggtggatcacctgaggtcaggagttcgagaacagcctggccaacatggcgaaaccctgtctctactgaaaatacaaaaattagccaggtgtggtgatgcacacgtgtaaccccagctacttggaaggctgagaaggggaatcgcttgagcaggggaggcggaggttgcagatcacaccgctgcactacagcctgggcgacagagcgagactctgtctcaaaaacaaagaacaaacaaacaaggaacagagggggctttaagctgtaattctgtaagaccaaggtaccaggaccccccttcttccctgaccccaagcacacacagctaactggaatcttcatttcaatcttatcaatctgcagttgagccacacaccgttccttgtcaatcaagaagccactggggtcatttctaggccgcattcacttcaaatgtagaagggcggtgagcacagcgacccccagccatctccagagaccctgccccatcactctgaggaagacacttgagcctctcactcttgctccctagaacccaggcaagctcctaaatctgcgaagtgcacccaacgatctgagacctgaaaggtgacagataccaacccaggtgcccatacagataggcaggaagcatcaacgggaagccactagtcagagtctagagtccccgctgcacccctttctgcagagacaatactttgcaccacattacagggacgcggcgggcttctccatcggacccagatttggggagtgttgggaaagaattccagggtacgtcgtaagtccctcaggtgaaatggcttttcctccatcacccaccccccacgtcattcagcaagcaggctccagggagaagtgggctggggctgaaactgagcatccagagatagaagatggagtgggacgtgggcacggagggggaatgtcccagggctgcaggggcccagccaaggaaccggggcactgagaaaggggtctcggaggagcctggaccctcaggggacggagagacggggacaactctggcgatcaggaatgcacgagcgaagggggagacagcttgtgccttccgagacagggtaggagtcttggggacaggatgcgggaaggacgggagcaggggcaaggccagggtcaggatgggaaggacggggcggggtaggggtcgggatagaaaggatgcaagggaacccgggtcgggatggaagaacccagggagaccgaggccgccgaggcagaagcagagcggagacagtcgcggacagtacctctccggagctggccatgtcgccggcgggtccgaaccgcggccgcgggatccgcaaccccgtgcctcccacctgcccggctagggatgctcgaagccggcgcgtccaccgctcaaccgagaccccggcaaggagcgggctctcgtcacttccggcgcccgcctacacgcacttccgttcgtccgcaggcgggccctaggcggccgccatgttgaatgtggctccgcccggggagctgctggagtacgagggagccaagaagggctccaaggacctctgcctcttctctgagctcgttcttaggcccctctgccgtctgcacgctcctttccagccacccggcctcccgatgccggcctagcacgttcctcgcgccaggcttttgcatctgcccttcccactgtctttcgtgtgcaaacgccacaggtcctgcgcaccgcacccctcatggaatagcgtcgcctcctctctaccttcacacacgccccgaaacttgcctctcatcctgtgtctctatagatttttgcaccatctgaccgacggtatctttttttttttatcctcctctaataaactgtaagcagggacaggatttcccaatacctgaaactatccctggaatgtgatagacactgactgaatacatatttgctaagtaaacatgaatgtatgcaccctcatacttaagcgtttgcgttttaaaataattagacccggccgggcttggtggctcatgccagtaaccccagcactttgggaggccgaggcgggcggatcgcctgaggtcaggagtttgagactagcccggccaacatggtaaaaccccgtctctactaaaaatacaaaaattgctgggcgtggtggcgcacgcctgtagtcccagctattcgggaggctgaggcaggagaagtgcttgaacccgggagacggaggttgcagtagctgagatctggccactgcactccagatggagcaacagagtgagactccgtctcaaaataaatacatacatacatacatacatacatacatacatacatacatacttagagccgacaggatggctcacgcctgtaattccagcatttcaggaggcccaagcgggaggatcccttgaggccagtcgttccagaccagcctgggcaacacagcaagaacccccaggccctctacaaaaaataaacatttcctggagactgagggggaggatcgcttgagcccaggagttccaggctgcagtgagctgagattgcgccactccactccagcctggatgacagagcaagactcttgtctcctcaacaaataaatacataaaaatattttactaataaaaatccctggggaaagttcattctctggaatcaaaagaactgggtttgaggccaagcacagtggctcacgcctgtaatcccagcactttgggaggctgaggcaggaggatcgcttgagcccaggagtttgagaccagcctgggcaacacagcaagacttctttctacaaaaaaataagacgaagaaagaaaaaaaaaaaaggccaggcgcagtggctcatgcctgtaatcccagcactttgggaggccgaggcaggtgaatcacctgaggtcaggagttcgagactagcctgaccccgtctctactaaaaaaataaatacaaaaattagccaggcgtggtggtgtgcacctgtaatcccagctacttgggaggctcaggcagcagaattgcttgaacccaggagatggaggttgcagtgagccaagatggtacctccaacctgggcaacagagcgagactccatttcaaaaaaataaaatcttaaaatcatgaaaaaaaaaaagaagaagaaagaaagaaaaaagaactgggtttgaatactggaactaattctgggtgaccctaagcaagtgtattcattttctagggctggcctaacaaagtttcacaaacggggtagcgtaaacagcagaaatgtcttctctcacagttccagaggccagaaatcgtaaataaagatgatagtggatcatgctcccttcaaaggctctagaggatcctcccttgctttttccttttaattttatatatatatacacatatataaatatacatatat

SEQ ID NO: 586447 - DNA, 4001 bp, Homo sapiens
gtagttcctccccatccccaggacaggggaacaaacagaccccttatgaaggagatgtggaaaataagcttagattatactcgacatgtgaactttagtctccaccccacctcagcccagggtcaaacatttgcttcttagtgagcagttctttggtgcaaccttgcatcagtgatgttgaggaaaactctaagaataaagacacagaggctgcgtgcggcatccacccccctcaccctgagcccctcctcccatcctcacagctcagtgaatttttgcacgcctgtaatcccagcactttgggagcccaggagtttgagaccagcctgggcaacgtggcaaaaccccatctctactaaaaatacaaaaattatccgggtgtggtggcgggagcctgtaatcccagctactcaggaggctgaggcacgagaatacttgaacccgggaggtggaggttgcattgagccaagattgcaccactgtgctccagcctgggtgacagagcaagaccctgtctcaaaaaaaaaaaaaaaaaaaaaaaatcaaagaaaaagaaagaaaagagaagagacagaaacaggagtgaaaaggaatgattgatgaaggccggtcatcctccctcacccctagctttggatctgttttctgggtcccccttctcttttaatctcccagtgagtgtaagaagtacaccctgggggatccctggaggggaagagggtttatggcatggttctcaggctaggggtgattttgtccttcaagggcattggttgtcacaattaagggggatgctgctggccatctggtgggtggaggccagggttgctgcttaaacatcccaccatgcagaggacagctccccacatcaaggaattattttgcccagaatatcaacagtgagttcagaagccttgggttagaggagggaaaactccaggtttggggagtgagggatgcctctagggaaaaagcgggaagtgtctgtgtacagagggagacttggcagggaggccgctaacgggggctgtgggtggattccgaagacttggaggaagtactcaagggagaatgtttgaactggacccgtttcttccggagaaaggggccctggaagcactgttgggagtgtgggggtcatcaggggactttagagagcaggaaggctaaggcgggacagaggcaaggagaacgggaggttctggggaaggtgtacagttcagaatggcagctctcttccagggccggactccagaaccctgatcttggaggcgcggactgagtctgcgacagatgcgtctccacacgccttccccatcgcacacttcgtggaagtagcggcaggtctggccgagggcaacaaggtctctgactgggaggaatgagatgatatgctccacctgggagggaggagggaagaagcggggagtctttggtggcccctcggtgatctggcccccaatcctattattctcaatccccctccccaaggactcaccagctctggggggaacaactggatggaaatcggatttcctttccccctcttctcttcaaccccaagctccgagccacaagaagggcagcttctcttcacctacccaagaaggggtgcatagggtcccatgagggtcccacatccttttttcccttctctccgcctaccttggggctcatctgactctagctgggcacagttatttcctcccctctctctccagacccatccctaacttctccaaataactcctcccgatctcctgcggccaatccccctcacccggagcccctcctcccgtccacacagcctggtgaatttttgcagcttccgtctctggcttcccctgaccatcctgattgccccctccctgctcctgccctcctgtctcctaggcccttggcccccccgttcctgctggctttcccacaccatgtccccagcctaggcttgggggacctctgaggcccctctgcctcctaggcccctcccccatggagtctggggctaacaaacctctctgtgacctcactgtttggccactgtgacctgttccctttaatcttgcccaggacccatctcttagacagctcctgggttctagctcagttctagccatcacatggctcaagggatatgcattttactggagaaataaagtgtgaattactggtaggtgacatctttatttcagggagcaggaggaagttttcctatttgaggcccttttagcactaactctgtagagaaacactagtgaattcctcacatttcagcaggccaaggcctctagggattggtagctcaagagtatagactcaaaaaactataaactcagtttgacaggtgagatggagaggtgactgtgctaataatcgtttagctcacaaatgattcagcaaactctttagacttgtgaaaaaacacatccaaaaggagactgcagcctggtgccggtggctaacgcccgaaatcccagcacttttgggtggccatggtgcaaggatggcttgaggccatgggtttcaagaccagcctggtcaacatagaccctgcgtctattaaaaaaaaaaaaaaacttaaaaattacccaggcgtggtgatgcacccctgtagtcccagctacacaggaggctgaggcaggaggattgcttgagcccagtttgaggcagcagtgagctatgatcgtgccactgcactccagcccgggcgagaatgatacccagtttcaaaaaaaacaaacaaaaaagaagactgcttttgctttcctgagggacagtaacatcattgcatgtataaaggacaacctattaaggtgggagaaagggatggatttcctctgaaagcttaggatttctcccagggtctctgatattagctttgtcttatgtggggtgacatttatcaggagaaacagcaggggtcagggttgtgtctgtcccactcaggccagatctacaccaataaatccaaggagtggctggctcttgcaggggctcaaaggagtcccatcctgccagaccaccagccctcaccacacagtgtcacagatccgttcattgactgcaccagactgaccacccaaattcccttatgtatggtgcctagccatggctaggctgggatgcctgagatggaattttaattcttcagcaactactcaggaatatcaacctctgagatgtgaactaaggagaaagcaacttcagtgacttatttctgggcaacctaccacatagggaggggactgcattagggactcatgccacttagaaaggaagatctccaagtagacagaaaggtattttccattcctcttgcatttgggtcccctttatccactccatttcaccccaggaggcaaacgagaggttgtgaatagaaaaagtccactgtgggccaggctttgtggctcacgcttataatcccagcacttcgggaggccgaggtgggagcattgcttgagcccaggagtttgagatcagcctgggcaacatagtaggaccctgtctctacaaaaaatacaattagctggcatggtggtgcgtgcttgtagtcccagttactcgggaggctgaggtgggaggttgaggctgcagtgagctgcgatcaagccactgcactccagcctgggcaacagagcgactctgtctcaaaagaaagaaaaagtccactgtgggccgggtgcggtggctcacgcctgtgatcccagtactttgggaggcagaggcaggatcgcttgaggtcaaaagtttgagaccagcctgggcaacatagcaaaaccccatctctacaaaaattgaaaataaattagccaggtgcagtggtgccgcccgtggtcccagctacttgggaggctgaggcaggaggatcacttgagcccaggcattcaaggctgcagtgagccatgactgcaccactgcactccagcctgggcgacagaatcagaccttcttaaaaaaaaaaaaaaaaaggccgggcgcggtggctcacgcctgtaatg

SEQ ID NO: 586448 - DNA, 4001 bp, Homo sapiens
ggggactgcattagggactcatgccacttagaaaggaagatctccaagtagacagaaaggtattttccattcctcttgcatttgggtcccctttatccactccatttcaccccaggaggcaaacgagaggttgtgaatagaaaaagtccactgtgggccaggctttgtggctcacgcttataatcccagcacttcgggaggccgaggtgggagcattgcttgagcccaggagtttgagatcagcctgggcaacatagtaggaccctgtctctacaaaaaatacaattagctggcatggtggtgcgtgcttgtagtcccagttactcgggaggctgaggtgggaggttgaggctgcagtgagctgcgatcaagccactgcactccagcctgggcaacagagcgactctgtctcaaaagaaagaaaaagtccactgtgggccgggtgcggtggctcacgcctgtgatcccagtactttgggaggcagaggcaggatcgcttgaggtcaaaagtttgagaccagcctgggcaacatagcaaaaccccatctctacaaaaattgaaaataaattagccaggtgcagtggtgccgcccgtggtcccagctacttgggaggctgaggcaggaggatcacttgagcccaggcattcaaggctgcagtgagccatgactgcaccactgcactccagcctgggcgacagaatcagaccttcttaaaaaaaaaaaaaaaaaggccgggcgcggtggctcacgcctgtaatgccagcactttgggaggccgaggagggcatattgcctgagctcctgagtttgcgaccagcctgggcaacacggtgaaaccccgtctctactaaaatacaaaaaattagccgggtgtggtggcgggcgcctgtagtcccagctactcgggaggctgaggcaggagaattgcttgaacccggacagtggaggttgctgtgagccgagatcgcgccactgcactccagcctgggcgactgagcgagactccatctcaaaaaataaaaaaataaaaagaggaagggaacggaagggagagggagggagggaggaagagaggaagggagtgaaaacatccactgtgaaaactgagggagcgggaaagggctgtgcgtggaggatccagagacctggtttctagagcaagccagctgtcaggaacttgctgttcgctcttgctaacgcatcaacttccctctgcctcagtttctgcattcgtagcaccaagggcgtgttctaggcggtgagatcctttctaagcctctaaaaccccgtggtctggtcccctctccattcctgtccaggggagctcctcgggtgagacggcagaccgtgcaacgctgcacctacaccctccctcctcgagctgggcatctccaggctctgggaagccccccgcccgcccccagcccgggggtcccgagacccctgccagaggcttcacagtcggaggtccccccgctgccccttcagctgcgacaaccgccagtgcactggcctcaagcagtcgcccgaatcccctcaagccctggacgccggctagccccctaacacgtccagctcgcactcgccactgcagcggcgaactgcgttcccggccggccaggggctccgcgttcattcttaacctcagtcttaaagttctagctcacccgcctcctccttagcaaagggaccgccttctcgcccatgctattggtaggtagagccgtccctcagagaagaggcaggtccagattcccttcggaggctctaattggccttcttgacagtcactcgcctgtatctggcttacgattggtctttgggggacgaggactaggcaccccctgcttgcggtccctcggcccgttttcctgctagtggagtgccggtgtcccctcctcttggttggacctgattggctccacctcccgatctgagcattgtgattgggtgcagctgcgctgggcgggacggcctggagcgtcggccgttggcgagcgctctatccttgttcccctcccttctctcgtcagactccggcgccggagctccacccccactgacgggttctgattggccgcttctgacgcgtctcggggccacgattggtccgtccggtcccggacaccgctccctcccccttgaggcaactacggcggctccaaggagggggtgggggaaggagggacggccggtcccgtcagtcaggcagcgggagccgccgggagcggatggcggcggccgtagcggctccactcgccgccgggggtgaggaggcggcagccacgacctccgtgcccgggtctccaggtctgccggggagacgcagtgcagagcgggccctagaggaggccgtggccaccgggaccctgaacctgtctaaccggcgcttgaagcacttcccccggggcgcggcccgtagctacgacctgtcagacatcacccaggctggtgagtgcagccgggccccgggcccaaccgggtccctcatttgcatagccccaccccgggccccgcccggcccgggagtcgggcccgccccttcacctggcggccagggttgctgcccctcctgattgccctaaacctgcagccatcctctcccatctttgagaaccccctagacaatgaacgtgcttctcgtttgcacagaacgccctgcgcctccgagcgttgggagagattcctcctttctctttatttgcatatctgcgcacctgtaggatggtcccgcccctcacctggttggcttatttacatgatctcttaacctcagctccaatcggtctatgaagcagtccccacgagctcctctaataactgctttctctccctcttcatctacacctcttaacccccgtcccaccgagatccgagcagccccgggcacccccttcccagtgactggcccctaagcccgaggtttctgctttctgtgccgcaaccccgccccctaaggtcctggccctctccactgtccacgcagctctccagcctatgggaaagaaacaaatctctacctcccctcactcttttctccctgagctcttccgcctattatccccaaccggcttatctgagattcctcctcctccttcctaagcctgtgaggtcactgtggagcctgtgacctcatagggatcttagaattcccatttcagtttctgctttcccccgggggagggacttgaggccgttgctggagggaaggaaatcttatctcctagctgggagtgctggccagctagagactgtccttccacgcctccacccgcaggatctgtccaaccatgcaccctccaccctggtgtctgtggatggtagggggtgggggacttaactgtgacaggtgagtcaagcctcagctactcaggaggcagcctatgaccttgggccggcagctgggggtggggatcaggatcagggaggaggactgcattcccgaagcctcaccccagcccaggcctcttcctcctctcatctgcacggtgggggaccagagctggaggatagtgcttacttctccctaagcaggtgcctgctcacctgggaacactcaggccggcactggcacacatcctcttccctcttctggggagaaccagtcgaaacctccccactgatctcgcctgctctgcaacacttgagatggggaatgagtgagctccaggagccattcctgccccttacagccctgttccctcccacccccacctaaccccacactccagattgacctcagcagctgtgtgacactcactgtctgttcccttcccctcccccttggttgttttttgacaaagaccaaatgttattctttacttccttaggctgtctctccctgtgtggactcttggggaaaactacccggagctccccggcccctcccagctcccgcccccggccccctcctcccccagcattccggctcagggtgcagccgtgctcctgtgagcttgggggggggtcggaaatcccagcttcccaagaaccctcctc

SEQ ID NO: 586449 - DNA, 4001 bp, Homo sapiens
attgtgtgttcgcacaggctcccgcctatttctgtgtgcaatgaggggcgaaataaagtgttggaataatcactggggattatcctttaggattactgaatttatgtttaggttggcattattcaatcgggttcctcgcctcagttacccactcctttctgaaagaccccagttctggtactagcacgtcacctagaaggaagaatcctggaatggcacgggtccaaactagaggcggcctctcagcatggacccgcttcaacctcatctgcatggcaggcgttttgcaaggcgtcagaaggcatctcctctttggactttttgtctcccctggtagtctctagaagccattagagtgaaagctatctttcctacctacagctaaaaatgtaaaagtgagcgcgctcaggcggccctgctcctagaaagatccaggccccttcataccccaacccctggccggggacagttggtagcggtggctggtggcgaagctgcagggcgcccaaggccccctgcggcccaggagtgacccgagtgcactcgccccttactctggcctggggcctgaagaaggcactggaacacggaagctgatgctgcactttagatgcaaagcgtagatttgcactctggctaaggcactgaatgaacaccactgtggccctgggacaaggagctgtggtccgtctgggatcaactaggtggcgaaggggagggagaaaggaagagagagggcttgcgcgcgggagagaggaagggacgggagggagagggaatggaagacaggaagggtgtcccttctcagaggtcgcactttgtcagcagttcctctcgactgctctgccttccatttttcctttcctcagttcctggacaagcctcggaggaccaggcagaaccctctggctagcagaaaagctcgcacccccgcacccttgcggcgtctgcttcagaccctccacgcaggcgcccgctggagcgcctgctggggatggcgtaccaccgacccttcaggctttttaaaaacgtaagaatttctactttattatctctatgaaaaaaaaaatgtaaagaagagaggttagattttatagaagctccaaagtctgccatttgcgaggagggttcacttcccacccacccagcccacggaagctcttaggagcagcctgaacggccccgactcagcctcacgctctctgacttccccgctcgcccctgaccccgacttcacttagggcggtcgcgtagatatgaactctacagcagccactctgctcagcgcatgtggggatcttacaatctcgaccccgacctccagaagaccagacgttctgtcttggggcctccctcccggccctttagcctcacccagtgcccggtcctgacacaccccagcactaccagacgaggaagggcagactctccacaccaggctcagccgctttccttcttctcacagctctccaagagctcggtcatgaaggagatatagacgatggccaggcggagggtctcgatccgggacagccttttctcgtaagcaaacgtgggcaccttcctccgcagctggtcaaaggcctcgttgaggttgaacatccgcttcctttcgcggatgttggcggcctggcgctgggcgtaggtgatcacccttttcctcttggggcggcctaatagggagacacctcttccgcgctcctcttcctcctcctcttctccgtccccctggtccacttcgcactcctcttcttctgggtccccctcttcaaaccgcgccatcctcctgggtcttccctctcggagcgcaagggctgggtcccccaaggagaccccgggtgcgaagtcgcagaggagagggcgtctcggggaggccagggacaggtctgcgacgaagtccagcaccgtagtgtccacgcagctctccggataggccgccatcgcttcggcttggccctgcctctcatcggttttccgcagggaggggcgaggttgctggtggggattcttaacagccttgaatctgatggggcaccatcaccgaaaggccagggaacattaaatatttataaccaagctgataacaggattagtcgcaccgataaggaatgctctgacaacgtcccttctctcgaagcttatggaagatgacaagcttgagcacgcatggaagactcaaagggacagggctccagttctgagatccttttctctgcgccacccgggacagttccttgttggcaacaacccccagctcttacctgctgtgctttttgtgtctgtcttcacccctgcagccaactaatgttctccaggctccttatctcgtgtagttctttaatttcgtgttggattttcaaagcgaggatgttttccaccgcgatggcttctccttgacttcagggtaggagtcttgaatcttgccaccatctgccaatggatgtggagcaagtgcatgtgcttttaatgatgtcctgaagaggggccctgcctgcctggcatcaaggggagctgtttgtctggtatcccagtgcagcggctgctgaaaggcaagaccttcaattagcttaagtaagcatggcagggggaccgagagtgcattccccagagtcgctgttggaaccggctttcttttctttccagggcatcgcaaacagctctcctgccacgttacaaaccctgacttctaaagtctgtttggatgcaatcagcgtaacaattgagatacttgactttcctttccctacctttacctcctactcatataaaatagaggattttattccaagaggaaaagttatgatggcaataaaatgagaaatttaagctcaggatattttctatgctcgggctttgctgtatacttttcagtgtgggggacaaagcaaactctcctcacaaacaaaaccacttcaagctcttttcagaaatgcgatttgcccttgataagccaaagagtcaatcagctcaccctctgctgaggagtcttcggacttttaaattgcggatcgagtatttgttcccgaacaaagaaaaaaacctaacacttccatctggcgtattttcctcattgatttgtattgtcctacagtaagacttaagtgcagaaacaatgatttattgaaatatatttaagggagtttttggctatcgttagatcgttatttttgagaaaagaaagagattttaaatttggcataagaaaaataagagattactcattttatattatctcgagtatcccaaatattttaacaaaaaggttctttttctttgtttgccaataactatatttacttaattattcagtactgtgtaaagatttatttaaaagacccattgtgtcaaagtgacagattagaagataattttaaaggtagattggaagaaatagcctaaaaagatgaatgtagaaacatcccggttcaaaagagaactgcccaggacgtcagtccctattaagggggtaagttgtggttatgatggttcactcagtacattggacagctcccagaaaccagaaaccgcctatttctaacaggtaatctcaattcattttcttcttcctagcctctatgtgtgtaatcaaaacagtataacctttaattcttcttcttcttttaacccatttgtgtctggtgtctctcgatcttttaatagattttatcttcttttgcttgtgtttactcttcattctccagtttgaattgtgataactcaggcagagaataattgaaatttgtgatcctggaagatgttaaagagaatgagatctttggttgttacttagttgatttttgctaagcatctttcaaagggaaggctgaaaaataaataataggattgtcaacagtggctatgaagctagtaaatgggagaactgatttttgtttcaaaaaagtagtaacatgcttgctaaccctcgtttaaattaatatgttattaaatatttggacaaatttcttgttgatttttaaattatgttaaatgcttctcagtga

SEQ ID NO: 586450 - DNA, 4001 bp, Homo sapiens
caagtttattttcaagcatcgcatcaacagtgatgccgtttccttaaattttaatacacatttatcagtccaattacatacaatgagagcatgcagttaaaacatatacccttgttttatgaatcatgcttttctctaatactaatcagacttcgagtagggagttagaatggcaacaaaagtgccacataactacactttaaacatcgtcttctaaaacatcccgaaagtattaagtatggcttttcataagactaaccatgagagacatttcctggtttgcatacctttttgatgaaaccctttgccacagaattcacacacaaacggtttgtagcccgcgtgtattcgggtatgagtgtttaaagtggaacttctattaaatgctttgccacactggttacatttgtgaggtttttcctaagcaggagaaaggaaaagcagagacatttagatattttctaattatgtgaagttctgcaagctcaaaacacagtaatgcttaaacactttcaagcagaacaaaagcaaacaatacatggcattcaccctgtttagctagcactttttaaatgaacgttatcctaaagagtaaggttttatcggctgtttttctgcaaacagttcggaagcaaactaggtgaaattgagacagatgaacacacctgcgtgtgaatgatcttgtgcctgcacagggtgcttgcttgcctgaaaccttttccgcacactttgcaaacgaagggtctggctcctgtgtgcactggcatgtgacgggttaagttatagtgcgcattaaagaccttaaaattaaacacacgtagaacaggttagccgcacaagtaactttgaaatcaaaccgggcagagagagggtaggaggaagagaatcttaacaaaaagtgtatgcaaataattacccccaaaatactaaaaagggaggaaggaaaggaggagcgagggagggaaggaaggaaggaaggaaggaaggaaggaaggaaggaaggaaggaaggaaggaaggaaggaaggagggagggaaggaaggagggaaggagggagggagggagggaaggaaggaaggaaggaagggagggaaggaaaggatctccgttttgcattgtacttgcctttccacacacttcgcaagtgaaaactttgggcttggcattaggagagcctcggctgaaatccgaggttttgaacgcgattttttccgacagaagctgggcgctttctttcatgtaatgctgcagctgagcctgggacaggtctttgaaagctactccagaagggtatttctccaccgccgggaccaccagtttattcctttcggctaaatacgtttttggctgcgggtgcaaaggggaactgaggaagtaggaggccaccgggtggatgttcacgccggctgccgggtggcatgggccgtcacctcggttcaggtagcacaaggcgcccatggcgtggaatgaagagtggttgaccacacgcggccttaccagcttgtactgctgcagcggcagcgcgtcgcgggccaggtcgcccttgagactcagtgcgcagttgagcaggtcgctgcagctgaatgcgggagccgagggcaccgccgcgggcgccgccggggcctccagactggccttccgcggctcggagcccgtcactcctgccttggggctcgtgtcgtaggccacaggcacgaaggggatcatgcaggggatcgacgagttgagatgcagagagtgcttgggttcccccttgggtaaggctccctgcaggaagtgggggactggcagggccttgggctctggggtgcgcgccatgattcgttcaatggagaaagccaagggtttggacgtgctcatcatgttgccccgagctggagcagtcgctaacattttggtagtcgcgttgtggcagctactgtccatgtctgagtcgccagcgtccgtcagccggggctgggttgcgccgtccgttgccttgttccctgcttgtcacagacctgcggagagggggacgggcaccatcaccaccagtagcctcctcctcctcctcctccccagcatcaccagccgaacctgcctgcccagcccaatggactcctgccagcccatcgcagagttcttggcgcaccaatgactcggggacaatcactacttatttctatcaatagaaagtgttgtgtcaataacgcagccaagatctcgccaatcgttaacttccaagaggagaaggtaaactagataattgctcaattcgcttccaacagtcaacaggaaaacttttttttttttcatctgcagtcagtaactacttttcattggtgagtgaggttccccgcccagaaaaggcgggggcgctttcacccgcttggcgcgccctcccctctgcgcacacactctgccgcgcacacttcactaccctccgcacccccccatccccaccccccttttgcttcctctgcctttctaattctcaatctgcttaaccaggctttagaggccaagcaaatctgagatcaattttctcgtttagctctaagtgacatcatctaaaatcattgtgcaagggctaaataaggaaacggagtctaattcaggggcaaacgccaggctatatttatcaaacgccaagctccagaaagcctcggctaggaagcctcggcagtgaaatccgaggtttcgctgcttggttccactgggcctgggtgggccgggctgggccgggctgggccgggtcagatctgtgccacctccgcagacctatttcttcctccagggctcggggttgcccgctcccggaatcccggagtctccgcggcccgaaccgagtctggaccatttagaagacgccggcaggtaactggcctccccaaacgccccgaaaattaaaagccttaggaggcttgttctgtgtttgtggttttgtaaaggcaatgcccgcggcaataggcctgggaaagtcgcactttcatccacaaagttgaggagttgcaaggaataattgggtgtcacaccacaagcaaccttgactcgatcggaccccacccaggatacacacagacgcgcgcgcgcgcacgcttccgagtttccattgagagtctggaaagagcatttctttcttaagtacctgcgctcagctagagctctcccggagcattttaaatactgaatgccgagcggagaagggaaacagagtgtattaatccccactccggttgccggtgtctgcaagcctcctctaagcagcgcaggcggcagcctggatgtctgtgcgcatcaaggagacttgccggcgccagagttgtgtccacaggtgcacttgtgcctcccaaagagcgcgcgtagagaccatttcccctgcaacgccccccagccgaacacccgccgggtgtggcacctcggccgaaactcctggggcggcgcggtggagcgtgtggaggtttccgggaagacgcctacggctgcggctccgactgtgcgggctcccgccgcccaggcaagagcgtccaggagcgcgctggaagctgcggcgcgcaccttccccggcgcagtctcttgccagccggcgatcacgcagagctgaaccccgcagctaggcgcgcaggaagggctgcacagagtttgaagacacggcagctgtaagctggcgtgaggaggccaaaggagcgcgcagagctgcaagcaaagggcggtggggcctggaccctgaagtgagtggccgaccgcagcagctcaaggtgccatctgcctggtgagttaaccccacgtggctgtgagacaggtggtggcgggtgtcaggtattgggccaagtgtagtgggggcgtccttctgctagagctctgaaaagggttggccccggaaggctggataacggcggactagaaaccctggcattattaagtccctgagcaatttcactcaaagatgcgaaactggaccttaaacgaaggaaattgacgtcaaagtattccctcctctctaccccattctcaacacatgc

SEQ ID NO: 586451 - DNA, 4001 bp, Homo sapiens
aagaaacaacaggtgactatattgaggataagcataataatcagttaacaaagttctgtatgaatcagacagatatttactcccagatagtttttattaaaatgtgtgacaaataaggtaagtttaatatgagataccctaaggcataaaaatctattcctgtatatttagagctcagaatattcagttatttcacccaaaatgtttaggagaaaaatagacaatagtcttcatatcatgacaagttgccatgcagcatctaatctaatgtatacccactgatgtcacctaagcggtgaaccttggattcgcagtgtgccaggtacattcagatgcaggctgccaggagtattaccaatagaggtccttgaaaatatgacccttccctccttcactggcagatgccctggggatggagcatgcctgagatactgtctctaaatgaaagtgatctccgccctgtcctttcaacctcacgttcatggtaagtagaggtccaaatgcggagatggctttccaaagtatgagacagtcagcaacagtggtcccagtgactcaggtgaaaagccaaggtttggagagtcaataccactgttagttcgtgggtggagtaggcgattaagtctgtggaatttcacatgtatttattaaagttaattcaagtaatttggatggtgaggatgggttctacttctatctgcttgaattctaacttcaggtaaaagagaaagaaatatgaataccttcccttagtggcatgctaaaactctccccttaaaatattttttgtgccactaggtctcaaagcaaaaatttgtgcacacatatgaaactgcttttattccatctgtaaactctcccattttctccagatatttgggattaagaactagattacttgctaaaatctttcaaagacctctttagccatgagaagcggcagtcagtcaatcacaagaaaaactgatttccaacaaacaaggcacaattgtgaacatcgccttatctttattgttttcaaacacctcattgaagagacaagttaaatgcactaaaacatcaagaaattctctctacttctgcttgcaagtaggtctggcattaacaaataagatcttaaaattgaaagtgacttccagtggatacagaactaactatgatttttgtaattaggtcatatttatgtggtcatatttgagaagatatttattttttcctgtgcaccttgataaataaaagacttaatctgtcatctatttaacttactgactcaggttaatgtttatagatactctctagctgtataacatttatgaacatatgataagaaaacattattatacatacctggacgtgactgtatttgttcttggctgggacactttgaacatttgccatccaaactattgacaacaaatgttagatttgccactttgctgtcaacataattttctatgttgttcatatttacaagattcagcttctccaggcgaccatgaagtacattgatctcctctttggcattctttagctcagaggacagcttgttaacctcactctctaattctctaactctgttatcaccaacctctcccggggctcctgtactgggtaacaacagtccgtttctgcctgggtctccgttgtcatcagcctgcagcttgcagtcttggcaagatttctttagactatttacgatttccttgaggttttggacttctttgaacacctcctcgatcctgctgaattgcttcgggagctgaatagtcaaggggggcaggcttacctggtaggggcactcccctgcctcttcgcatttccctctgctttctagtctcactgggcagacatcctttgctctttcatctttaatttcctctgtttcattgtttgccacaaccaaaaaaccgtaagtggcaagaacagctgagctcagccagtaccagttagccagcttcatctttacagtgctgctcaccccagcagggagtgcgcagggctggagctgctttaatagcggcagctgcctgagtcaggctttctgtgttcccaggaaagggtgggagcgtttgcatcacaagttttagaaacgcacaggaagaggagatagccctcatcaaacgcagtttgccaaaaactgtaacttactctcaatagaaataatatgcattgaaattattatagtcaaatgtacacagccaacaagattcactttcataatgtattttatgaagtataagaaaagtcttgcatttctaaagtaatttggtatacttacgcttgaagtaaataattatacgtaacttcactggaaaaacagtttttaaagataaaaagtaagagctagttatccaaactgtctatagaacagaaacgttactaaaatgaaaatggtcctttttccttcttagaatggggcattggggagcctgtattttcttcatgttggactttcaggtgaaatcttaagcacttttagaagtttctaagtgtaacaaagtacagctttctgactattgcagttgacttttgcttcatctacttgaaaaagagaagaaaactagtggagaaaaaagtgctactttctattcctttgtccgtagcatagtgtatattaatgtctaaatgtctaagacccatttaaaaggacataattgtctttcatcaaaaccagtagctgcctcctttgcccttcgacattttggtaattgtactgtcatcttccacagctgctcaaatgtgaatctttgagctatgccagtgtctgtcctgaacttctcttgcctacagcatctttgccctttctttctgcaggtagccctggcaggcgggcctcttgctttctgtctccacgctggttcttctacctgctctctgggccacttggtatatcagcttgttcaaaacatgtagcattaatgataatagttttctaactttctcttcagaggctgaaggcaggaaagaggaacagcttcagttagagaaaccacctccttttaatttgttttgcatattgacatctcataagatttcttgtttaaaaagggtttttttgctttaaaaataatttcaaaatgactgacatgggcaaaaatctaaatgttttattgtattacttaaaacactctgtagcctatctcatatttatgtctttaacctgatttcctatgacttttctgtatatccccttaattttagccaaatcctattcacattctcaaaatgttggcagactctttactcttccatgactgtatttattctcgcatactcaggagacctggcttccaaccctagatctacctctgatcatgtaaacagatcatcagctttaatgagcctttgttcctgtagctgtagcggaggaatttagctatttcttccctcatacaggaatgatagtcatgcaaacttggagcacttggctgggcgtggtggctcacgcctgtaatcccaacacattgggaggccgaggcatgtggatcacctgagatcaggagtttgagaccaacctggccaacatggtgaaaccccatctctactaaaaatacaaaaaaaaaaaaaaaaattagccaggtatggtggcgtgtgcctgtaatcccagctactcgggaggctgaggcaggagaatcacttgaacccaggaggtggaggttgcagtgagcctagatcgtaccactgcactccagcctgggcaataagagtgaaactccatcccccagccccacccctcacaaaaaaagaaaaaaaaaacttagagcacttaagaaaaaaaaaaatgcagtgtataaatgtaacattcttcccaaataaatttgtcaaacatgttctacacaccttatgactttttttcttccatcttcatatagctctttcaaaaattgtttttctcttcattccattcaatatatccaattttagacaaaaactttttagctaaaaatatctatttaatcccctaactcctaacctcatttcttctcacctattttcaagct

SEQ ID NO: 586452 - DNA, 4001 bp, Homo sapiens
gccctagaatatctgtttcctaatttcacataattattaaaaagtgaaactgttacaataaatgaaataagagaacaagctagcctactaggaaaatgcttttactttagatttcttctgtcaagttattcgcataagcttcctcacattgttacctttaaacagaactatagatgtatcatattgctagatatatagaatttacttacatatccacaagaaaaatttatgaaaaatttttgtttcctaacagtatttcaattaaatgaaaaccaagaaaccctactttaggttcaagtatttgaaattttgccttccaaattacttgtaagtacaacagccaggtttaatgcagcttttatctcccataatgccttacaaagacatttgtcacattgtaagtaggtgttcacaaatctttgtttaaaaaacaattagaaaacttaagatccagagctttaaagacactgtaatttatttaaagctgtaaagctaaataagctagagtcaaaactagatctgacctcttctgtcaagcagttcatcctttttttcactataccattttgatgttaaactcatttatacaatactagaaatgagaaactgaaagaaaggtgactcagaaaacacttgacacaaactttcacaattaatattatcattctcttcctctccatggcttcattcccctttatcatctgttatcctgaaatttctaccatacctcagagttctagtcactgttctcagaataaacccccttctcttttccatcttcacctttccttcaatattcatcttccaagtcttacttcttcctttcaattcaatcatttaaatggcaaataaggataaccaaaaactggccatcaccgatcagtgacacaaccattgtcttgtttaccatttccaagtcaatttaacctttatggcctttcctagatctaaaaagtatgattaattagcactgtcatatgaactgcatttcaatcttctttattttgccaatgttctgattattttaataatgtcattatctgtcttcctagacagttggcttctgcagggaggaattgttttccattccattcacattgtcttagtacctagaatacagtgtcctttggaataatagctactaaaatactgacggagtgcctactcagtaccaagcactgtgcaagcctttcataggattctgttcttgatgcaaaacgggagttaagagcacagggtctggagccaggctgcctgctttcaaatcctggctctatcatctgccagcagtgactgcaggaaaatctcttaatgtctttctgccggttttcacctataaaagaagcgcagcaacatcactgagctgacaaggtattttaattctgcaaagcactagacagaggactcagcacttagaaaatactctataaaatactgcttcttctgattcctcacgatgacccctgaaaggtatgagcccttctttctcatcacagagattaagagcttgcctgggtcacaggggaactgactgacccccgctgtgggcgcccagagccccgctgggcccagtaaatgcctgcggtaagcggccccgcccccggacaggctctgccaaaggaagccgcccgcagacctggccccgagcctgccgtccacgccgggccccagcttcctaatcctggatgagtctggttctgggctagcgggtcagccaccctcccgctaagacagaagcaaaagggcacagccactgcctggctcccgcctcccacggcctcccgcgaagtcaccgccccgcgacccccagcattccagaggcacacgcccgcctctcccctacgccccaaccctgatgctccacaggggtcagcagcgcccctgccccgcctcccgtcaccgcatcctacctgcggctggtgtgggacgctggcagcctccgaaaagcgcggggactgacgtgcgcctgcgcgctgctgtcgccctcggactcgcgccgtacgtgcgtgcgtgagtgcgtgagtgcgtgcgtgcgtgcgttcggcgcgcggggcgtgggcgcggcacctgggcccgggcaccgccacctaggccctagctccgaccagtggtgttctataaacgcttattacatcattgtgcataggcttcatttttaaaagtactcccaaataaatacaaggaggcgatggaaattgaatgaagattcgaaggattcccatagagcgtggctcacttcccctcaccgggacagcgagcggcggctcacctgggagagcaaagcgtggctctcctgcgcccacccgggagagcaaacaatggctcacctgcgcccacccgggagagcaagcgtggctcacctgcgcccactcgggaaagccagccgccatcctgtgctgcaggcagggagcgggcggcgggagaggagcggatccacttaggtcagcggttaaaacgtcgttacaagaggccaccccggcatcgcggggcctgtggctgcgccccctcttgaattcaggcctagcacatcacctccgcccctcgcaccctgcagtctgcgctccatacagcacgtgagcgggtgctcagcaatgttccctggctgaaagaaccgcatagagtagcatgcaaaaatgacatgcatgtttaagataaaataagggagaggacacctgttctgactgagtctggcaactcagatctccccgcagccaacatctacattcctttggacagctgtctgctgtgtagggacacctccctggaactttgaaaagcaccccatcattaccttccactttgttctggagcaaggtttcaaaagaagagtgccgtattttgattaatttagtgaattggattttcagacacaagtaagagcatccactcagtggcctctgcagtaaataatgatatcagatcacataacaagaagactggaggttggcgggaaatctggacctggtgactcaaagaagtcatgaaggaccatctctccattctgccaccttctcgcctgtggattttcctccccaggcttgtcacttcattgtcgagagatgccctcacaatccaagccaggcagcctcacatgaccagatctaaaacacaaagagggagccaaactgagaaaggaccttttccctctgaacacttctctcttggaaaaagaaaatgtttcccagaaagcctcatagccttcctcttatatctccttgactaactgggacccggatccctggatatcctttcctgagaaagagagggtctggggcaggggatagagaaaatgactagcaactagcagcacatgatgtttaaacataagatttaaagaaatgcaaggcacaaacaatttgaagactttttttaagtttttaaaatcttcacaaaataaaaaggaattggacaatgcactttaaaaactagaagacgtttcactgaaaacagcatctcctaattcatttcatggcttagatagtaatagaaaattattttattctaattccatactttatcaactaattttaattattttataattacccaaaatatgtcatgtagaatgaaaataaaagaaaatgaaaacagttatatcaaggccaagtcagttgtatgtttactggctatttagaaatttctaaatacgtgtatatttagaaatgactatatagatactatttgggtaatgttagggatggaaagtttatgtccccccaaaatttgtatgttgaaatcctaagcccaatgtgatggttttaaggggcggggcctttgtgaggtgattaggtcatgagagtggagacttcatggatgagaatagtaagtatccttataaaagagactccagaggctgggtgcagtgtctcatgcctgtaatcccagcactttgggaggccgaggcaggtggatcgcctggggtcaggagttcgagaccagcctggccaacatggcaaaaccctgtctctactaaaaatacaaaaattagccaggtgttgtgg

SEQ ID NO: 586453 - DNA, 4001 bp, Homo sapiens
tggtatctgtgggggtggggttcctagaaccaatcccccatggctacagagggatggctgtacactgactgtgtgcttataaatgattatttgaacacaaggagctacagagaaactaagtggttaagtattgtggcctctgacaaatgatgacccacctaaaaccaataggaaatagggttcccatccaaaaagcactatctggctggacgaggtggctcacacctgtaatcccaacactgtgggaggccgaggtgggcagatcacctgaggtcaggagttagagaccagcctgaccaacatggtgaaaccctatctctacaaaaaatacaaaaattagctgggcgtggtagtgggcacctgtaatcccagctactcaggatgttgatgcaggagaattgcttgaaccgggaggtggtggttgcagtgagctgagacagcgccactgtactccagcctgggggacagagcaagactccgtctcaaacaaaaacaaaaaacaaaaagcactatctgctcacaattttgtaggacagtcctctgtacctcttccatgccacaaaagattctcaatagctgctaagcaacacggtggtggtgttggggggaagggcatgggcctaggtctcacaaaacaggagcttctagtcccaattcagccattaactgattagttgggtgacctcaagtcactttcccagatcaagacagtcctgggggaactgacatgctacactctgtctggcaaaacaatggtgggcggtaagtagccaaaagttcactgggagacgtcaagctaagtatagcccttggtgcagtaaatctaccggagacaactcagaggtgcctggactacggggcccacatcgcagagcagcccagatggcagcgggaaagggagagtacagcgcctcaccctcgagcagcacgatgcctttacggatgtcatcattgtacttgctccgcaccaggcaccaggcgtactcaaactgcgtgctcttggacaccgagcctgctgccttctcagactgaaatttcttttcaaacttctgccacaggggaggaaaggaatcatttagaaatgtagggcgtcaaccattctctatctggacatgccatctccctggctctgcccctttccctcgcaggtctcggtatctggcaccccagcttctgctatctccatgcccgggacccaggctttcggctcctccgggcctgcgggccagctcttgggacagaggcccccggtctcccctccccgcggcggtaccgagcggagatgccacctggtggcagctccaggcaccgctcccggagcagctgaccccggcggccgaacagtaaacacgctgtcagaactgctcaacagcccacgcggtcctcatttgaggctgctggccccatcctgccccaccctgccgggcctggaccttttattgtccaggaatagaagtagtgcctacctcctagagctacaaagactgagatctggcatgcgatgccttagcaccgtgccggacgcagtaataggtgacaccttatgatggtcactgtattcctccaccgctggaggagcgccctgagctcacagctcctgcatgatcccagatcccgtcagtctaaccacggtcgggctccaggcccgtagtctgaggtgtggggggctcaggacactacaactcccaggagcctctgcggcatagcaggccctccgggcaggagccaggcgctgtggaggctgccgggagccgtagttcggcttccctcggccaagccgatgccgggaggagggttcggcccctacctgactctcctcaggacccgccctccgaccttccctttccctctgtccgggccaggcctcaccagcaggtcctccacagacaccagctcgttcagcacggcctccatggccactgcccccgcgagcctcacactacagtctactgtgccacagtctccatggcccagtggcaggggcggagaaccacttccggcgtccggcggatgctggcacgacctggcgacgccccgccccttcctctcagttcagcagcgccggcggggcgctagtgcgcaggctcggccggtccctccagcccgcagactgcgcgcagggagaccttccccaggttggtcttcccaggtgcctcagccggtgccttcctctgtggaggcttccctagggaaactggaggccatgtcttggcggttagcccccaggatgaaaacagcaaaaagagggtgggtagctgaccagagatcacagtacattagggtgccaagctgacgcccctcagaaatctaggaccttggaggccacgtgactattcatcgcctgcaacaaaatcttaactagaaccgggagcccggcgcgtagctcacgtccgaagcccaacaacttgggaggccgcggcgggaagatcgctggaggccaggagttcaagaccagcctgagcaacatagcgagaccctatctctacaaaatttttaaaaaaatcaaccggcgtggtggcgtgcacctgtactcccagctactggggcggctgaggcaggaggatcgcttgagtccgggagttcgaggctgcagtgagttatcgcgccactgcactccagcttgagcgacagagaccttgtctcaaaaaacccaccaacagcagcaaactagtatcggggtttcttgggcctctgctgactctcacaatgcaagagcagaggcaactggatctgtaaaccacacagccacacaggggtagtcataggagacactatcaacgggaagtttttcaaaaagcaacggccccattattggcagagaaggtccaattttcaatattatttacataaaccattttgggagtgcaccccaggcgggaaacctgccacatggggtcacgggcaatggggagcttagcagtgaggagctatcagagcatgggaaggagaaaggtgtggacacctctggcttcagtttctgtgcagtgaggggactgggtaagtagcaactttcaaattcttttccccttgagtcacattggagtgtaagttccttgagggcagagacttaccttgcttatccagcatctagcacagggcttggcagagagtgagggctcaataaatatttgttgaataaacacggaaaaagcaaattaattgtaaacaaggcactgcacatgcaggggataatcatccagacaccttccgcgtttgcaaagcccctttaatttttattattttttagagacagggtctcattctgtggcccaggctggagtgcatgcagcggcacaatcagagcttactgcagccttgacctcctgagctcctgtaatcctcctgccttagtctcccaagaagctgggactacaggtgtgcaccaccacacccaggttgttttttgttttttgttttttttttccgagacagtttctcgctctgtcacccaggctggagcgcagtggcacaatctcggctcactgcaacctccgcctcctgggttcaagcgattctcttgcttcagcctcccaagtagctgggattacaggcgccggccatcacacccagctaatttttgtatttttagcagagatggggttttaccatgtcagctaggctggtctgaaactcttgacctcaggtgatcagactgcctcggcctcccaaagtgctgggattacaggcgtgagccaccgtgcccagccaagcctctaatatttttctcctcataatagtctcgtgagttagaaagacaagagttattcttccctatttggcgtggatggttgaaatgactgatacagtaagctctgtaagccttgagagaatccccaggttggggaactggctgcccactagcataagcctcaaggggaaaacttcatgttcattcagagaagtatacagcacctaattttgcctgggccttggggtggcacaaaggacactagggctgagtgcagtggctcacgcctgtattcccagcagtttgggaggcc

SEQ ID NO: 586454 - DNA, 4001 bp, Homo sapiens
aactgctaaataatattccatggctaccaccaaagtcagcacaggtttttggttcagaaatctgaaagaagtcaggctgagtctaaaagagatcagactaaaaataacaatataactgaattttcaaaatgcaaatcacatcatttaatatccaccgtggcactcacctagttgacaagaagaaagggctgttgagaattctaaggcaagccatttttctggaactttttcccagggctaacagtttagagaagagccccattcatttccccaaccctcaagacagaccaggtctgaatgcccagtaaaggcagtttattagaaaatcaggtggaggatgggctatgaagatttactgttttaattcatgttattccctctacctacaacatccttccctactttccccctggaaacctccacccatcttccaaggttcatttcaattatggtctctgggaagtctttccctttccccaccccatggagcctaactacttcaggcccagttacgctttgctagcactttgaatattctgtaccctatatcattgcattatttacttgtctttctcccacctgtagatggtgtatactgttagaggacaagaacctgcttctagccatctttgcgtctccaggacctgacttgtgaccattcaataagagtttgatagatggacagactaatgaatagatgaagatgattagaagccaaaatttctgaatcttcctagcacccagaacatggcttaacatcaaggaaatgctcactaaatactgtcataatggaatgaatggaaccgatgcctaattgaaaatcattaggctgtaaaccatttccatgttccaatttcttcgtttatagaacagaaatgatagtgtaaccacctgaaaatccttcacctagacttccaaaaccacacccacctcatcaatgaagtctgactctctagaaagaagcaaatgactgaaatcatggtcctgtgccttgaccaaaataccattcgtcagaacaaaagaagtaggtcagtgaaacggcattagtatatccttcaacaggcaaataagtgatagtgtagtttgcttttgaagtcgctgtgaaaagttttaggtgaacatcacctacaccacattaaaaatggaatcaagtcattttctttaagaaatggagtttgagatatgagaattcttttgggctttttctacttattggccaattatacacccagatatatttctgcaatatttcaaagattctagttctaatttgtataataaaaaaaattaacagccttttccagaccacatgtttccaacaagaccttcaaaggcctcgctcgctatataaaactggctttaaacaatttcctttcccaaagaaggaaataagatatttcggttttgtaaaagaggcaaaaccaggtacaggccacctttcctgctggagagctggcataagtgagtggattcttaattactattttacctgcggggcataattacttacgtggagtgaaataaggagccgtccttttctaagtagccttcatagtggaccaacatcaaatcccctcctttggtcttgcgatggcagatgaatggcttctggagaacttcaattttcacttctggttcagggatcaaagccccaatcaaagaagtgacgaacagagtcaagaccgcgttccacaagaaaagcctcatgttgctgaagcaaggaaagaagtccctacaaaagcagcgaaaggtccctcgacttcatagatttaagaacgtagttcaaggcttacggacaagggcttcagacaagttcaggactcccccttcttagaagacgtggcacatttaccaccaactcttttctcaagggtcacgaacctacctttaaagagttaagcccaaatgccggcctgactggctcttataacgcggccgcctgggaatagcagcctcccattggctattggtgctgtccttcaggcagctctcaagccaatgacgctgcaacgatggaatttacagcccggtagagccgggcagctgccaagcggcggatcatcccttgtggtcctagagcccggtggatttcagcattcaaccagcgtggattttgggagaggggcggggcgcagagccaaccggaaactcctccggctgatttatctctgtgaagaaccctgctgagagacgtaggaagagtcccggggccctatgaaatcttcggggttccaggaaagactcgtttactctcgccgttggagagcggccccccaagatgccacaatcctaggattttgctattgcttataaactgtaaagactgacatactgcttgagggttcacaaagcgcgttcccgttgcatgaacctcactacacccagtaaggcaggttcttttttcccatttaaaagagaagtaaatttacaccaggagatattaactgtcctgcttaaggttgtttggccccgaagcaaatgagctctgccttcaaaccaggtctgattcattccacagcaccacgtcatgttatggctgctaataatttatcccttaagttaccttacagggtaaataatgagtttcgacttgcagacttccgctttaaagaagaaatggtaatcatggttacgaattacacagcctcatcgtagtttacattttctagttttacattttttgcctaagttcaaaagtaatgcatgttcattgaagtcattttggaagaaattggaaagcactaaagtaagatttccagataatattggggagtcgaatcaagttggaatttcagatacataacgaataatggttttgcatttttatttactaaatcaggcaactttaaagaaaaagaaagctcgccgataccaccaccagccgcaaacaatcctcttaatattttggtgcatgcttctgtgacatatacttaaagcgatttaaatcgtattgtagtcttttctcacctcctctttccacttaatctgtagttaacattttttctggtctaataaccttaacacagtgcatatccgcactctatgtgcataggaatccccctgaagatcttgtttaaaatgcagattttgatctggaggtctggggtgggtgcaagattctgcatttctaacaagctcttaggtgatgtcagtgctccgggtcagtagatcaacacttccatagtgagaccttagagtctggacaacatctgtttacactggcctcatagtattctaccctgaaattccaataatctctttacgccctgttattggttacctcaagtgtgtgagatcaattaggcagctttggaacaagaatagggactagaactcaggaggtatcgtgagaggtcacgtagaccctcaaacggcgggcaccatttacagtcagaactgcgctccacacttgtctcaggggcctccctcctcccgtcgcctagtccgcagtccgcgtctcgggactcaatttccctgcgggccgttcccgcaaactccgccccgccgccgctgccgcgaaatcccggagtggattttgggaaggggcgcgcgagcggcgccctgggcatgcgcgagcgcgtcccgggcccggcgagtcgagggttcaggtggtgcgccgtggcgccgcctgcgaccggcagctcgttcgccgcactttggaggcttcggctgcccctccgacccacgtagggcccggacccgggcctccttgtgaacagcgtgccggcttcgccccacgggttcaccggctggctgggcttcaagcgccgaggccgccgcagtgaccccgcccccgggccgaggatgtgaggcgggccgggcgtccccacaccgggcccgggcgccgggagtgggcgtctgggcagcgccaggcgatggccctgctgctggtgctcctcgcctcttggggcctggggcagtgagggggccggcgggcgtgggccgagtggccgcgggcgccatggagggggtgctgtacaagtggaccaactatctgagcg

SEQ ID NO: 586455 - DNA, 4001 bp, Homo sapiens
tatctgtaagaatggacaaagaaggtgggtgaagcttgctcagtatcctgctcagtgctatcagtttcttccccctctaagtcagcagtactctggcctccatgtctccctcacacagttccctcttcctgcaatgtcttcctcctgagcctgtgcccagcttctactgatataaattttattcaaacttccaggctcagttcaaatgcccccacttccaggaagccttccctgaacctcccagctagaattaatcatgccttcattaagcacacccacaacactgctttcacctcccaggcactcatccgattctaccaagtgagctgagtgcaggtcagtctcctccactacattgtgaggtccttaagggtggagatgttctaatcttctgagtacatcctctcttttcaccatgtattgtgggaagtaagtattcgattgagttttacttaataaatgaacaaagaaacattcccagtggttagttaagtcagagtgcaaagattataccttgcccgttaagccatctcccaaatgcctaggtctcaaggggagagaacatggctgtgttaccaaaacccagcctcagcaaagccaactcaaagaacctgcgctctgagcagtcttcccagcctgaggcatcgtgcctcatctagcccctaaacaattccttcttctccagctcccactctgaacctaccctctccaagtttcattagccgaggagttttcctaaagtaattagaatcgaagggtctgtccatgtgttccaggtatcccgagtatttcactaggatagaagaaagaatgtaaggaaaatggaccaaaaacacccacgccaccataatatcgagtctctcatgatcacacagaaacaatgtgaacagatgagcttaagctgcccgacaccccgaggtacaggaataaatcttctctctgcattttgggtgccggccctttggctcagaggttcaagagctttgcggaagcatcacacaaaggggacataggagtccctagctttcgtcttaaaaaaactaattcaggccggaagcagcggctcatgcttgtaatcccagctactggggaggctgaggtgggaggctcacttgggtccaggagtctgagaccagcctgggcaacatagagtcccccatatctacaaaaatattaaaaattagccgggcatggtggatcgcgcctgtaaatcccttatttgggaggctgaggcaggagaatcacgagcccaggaggtggaggctgcagtgagctatgatcgcaccactgcactccagcctgggcaactgagcaagaccccgtttcaaaaacaaaaaacaaaaatccacttcaaacaaagcatttccaaccccattaagtgctttttgaaaatgaggcctctctcttcccaacagagtgcgatgacatggatcctgaggacaaaccgccccagggcgtacctagcaccgaagcatcaggcgccactaggtctccagctccttctcggatgacgtccttcagcacgccccggtcccccgagatgtccagcatcctctgacttaaccgctcgtacagggactgatggagaatgaaagccaggcctcagagccgcagacccacccggccacccctcagcgtctacgcccccgaaacgtctgggccctcacctggccgggggcgtcgtccccttccaggactccctggtttaacgcgcttccccccatgtcctagctgccctccctgtggcgtgagccttcggcctggtgcgccccgctgccctccctggctgtgactctggtggggttccgaaggcccctttatgcccggcagacccctaccgacggcggcattccattctggggccacgaggaggcactcatcgtttcgttccaaccgccgccaacggccctggccctcgcgagctctggaactacagaggccacgcggtgaggtgcgaggtatgatccgtaatgggagcgcacgaaacatgatgggacacgtaacgggaccacgcagggcacgttgggtacgtgcaggggcgcgaggtggcggcacgtaatgggagcgcgcagagcatgatggggcacgcgcggtagcgcgaggcggggcatgtaaccatagcgtgcgggtcatgatgaggcacggacgtggggggttaggtggggcacgtaattggagctcgcggggcaggatggggcatctaactggagcgacagagagcacgatggggcacttacaggggccggaggctgggtacgtaacgagagcgagcgggaaatgatggggcacctaacgagcacgcagagcatgatggggcacgggtgcgaggtggggcgcacagtgggagcgcgtggggcatgatgagacacatggcgaggccatcagggcacaggggaagcacttttggaacacgtgagtgacagggctgccgcccttgaaggagccctcggagtggctgcgtggtggggcacgtggggcaggttcaggaaaaaggatgcagcatgtgattgcagggcaacctggtgaggacacgagagccacctgccaccagcagggttcagggctcccagctgtgggttacttccaccttctttcactttctctcttccattgtgttctagagaatttaggcccagacaagacactgattgattgattgattgattgattgacagaggctcgttctgagcccaggctggagttcagtgatggatctcagctcactgcagccgccactccctgggctcaagagatcctcttgcctcagcctcccgagtagctgggattacagaactgcaccaccaggcccagctaatttattttttagtttttaatttgctggaaagatggtttgtagctttgttgctaggctggtcttgaactcctggcttcaagtgatcctccagtcttggcctcccaaagtgctgggattataggcgtaagctacagccaactttcaatactgccccattgggggttaagtttccaacacatgaaattaggaggatacattcaaaccacagcagtatattatgaccataatattcattaactgtataacaggacaggcgcggtggctcacacctgtaatcccagcactttgggaggccaaagccggtggatcgctccaggtcaggagtttgagaccagcctgccccacatgatgaaaccccatctctactaaaattacaaagaattagccgggcatggtggcaggcgcctgtaaccccagctacttgggaggctgaggcaggagaatcacttgaacccgggaggcggaggttgcaatgagccagattgcgccactgcactccagcctgggtaacaagagcaaaactctgtctcagaaaacaaacaaaacctgtataacagagtgtcattgaatttctaaacgttgaaagacttcacattaaaaaaaaaactcacaattcaatattattgagtgaaagtaaccagacacaaaagagtacattctatatgatgctgtttatgtgaaattcaaaaacagtccacatgacaacatggtaataaggacagtggctgtccttgttaggagttatgactgggaggaggcaggagggagctttctggaatcactctacatcttgttcttgagagtgggtgtatatacatcaagtgtttatcaagctgtgtggttaagatttgcacacttgtatatgttataccttgatttaaaaaatctaagtaaataaggatacctttgaatatcttaaaaaaaaaaaaaaaagaggccaggcttggtggctcacacctataatcccagcactttgggaggctgaggtaggaggattgcttgaggccgggagttcaaaaccagcccaggcaacaaagcgagacccctgtctctactaaaataaataaaacaataaaatgaaaaaaaatagagagattgaatcatcatctgccagtttgtattagaaaaaaagagagagagagggaaggctgggtgcagtaaggctcacgcctgtaatcccagcact

SEQ ID NO: 586456 - DNA, 4001 bp, Homo sapiens
gtagttcggtttgaacagaaacctggccagctctcctctccgcatgctcagaaggcccagctccatgccccacagtgtaatatctgtaagaatggacaaagaaggtgggtgaagcttgctcagtatcctgctcagtgctatcagtttcttccccctctaagtcagcagtactctggcctccatgtctccctcacacagttccctcttcctgcaatgtcttcctcctgagcctgtgcccagcttctactgatataaattttattcaaacttccaggctcagttcaaatgcccccacttccaggaagccttccctgaacctcccagctagaattaatcatgccttcattaagcacacccacaacactgctttcacctcccaggcactcatccgattctaccaagtgagctgagtgcaggtcagtctcctccactacattgtgaggtccttaagggtggagatgttctaatcttctgagtacatcctctcttttcaccatgtattgtgggaagtaagtattcgattgagttttacttaataaatgaacaaagaaacattcccagtggttagttaagtcagagtgcaaagattataccttgcccgttaagccatctcccaaatgcctaggtctcaaggggagagaacatggctgtgttaccaaaacccagcctcagcaaagccaactcaaagaacctgcgctctgagcagtcttcccagcctgaggcatcgtgcctcatctagcccctaaacaattccttcttctccagctcccactctgaacctaccctctccaagtttcattagccgaggagttttcctaaagtaattagaatcgaagggtctgtccatgtgttccaggtatcccgagtatttcactaggatagaagaaagaatgtaaggaaaatggaccaaaaacacccacgccaccataatatcgagtctctcatgatcacacagaaacaatgtgaacagatgagcttaagctgcccgacaccccgaggtacaggaataaatcttctctctgcattttgggtgccggccctttggctcagaggttcaagagctttgcggaagcatcacacaaaggggacataggagtccctagctttcgtcttaaaaaaactaattcaggccggaagcagcggctcatgcttgtaatcccagctactggggaggctgaggtgggaggctcacttgggtccaggagtctgagaccagcctgggcaacatagagtcccccatatctacaaaaatattaaaaattagccgggcatggtggatcgcgcctgtaaatcccttatttgggaggctgaggcaggagaatcacgagcccaggaggtggaggctgcagtgagctatgatcgcaccactgcactccagcctgggcaactgagcaagaccccgtttcaaaaacaaaaaacaaaaatccacttcaaacaaagcatttccaaccccattaagtgctttttgaaaatgaggcctctctcttcccaacagagtgcgatgacatggatcctgaggacaaaccgccccagggcgtacctagcaccgaagcatcaggcgccactaggtctccagctccttctcggatgacgtccttcagcacgccccggtcccccgagatgtccagcatcctctgacttaaccgctcgtacagggactgatggagaatgaaagccaggcctcagagccgcagacccacccggccacccctcagcgtctacgcccccgaaacgtctgggccctcacctggccgggggcgtcgtccccttccaggactccctggtttaacgcgcttccccccatgtcctagctgccctccctgtggcgtgagccttcggcctggtgcgccccgctgccctccctggctgtgactctggtggggttccgaaggcccctttatgcccggcagacccctaccgacggcggcattccattctggggccacgaggaggcactcatcgtttcgttccaaccgccgccaacggccctggccctcgcgagctctggaactacagaggccacgcggtgaggtgcgaggtatgatccgtaatgggagcgcacgaaacatgatgggacacgtaacgggaccacgcagggcacgttgggtacgtgcaggggcgcgaggtggcggcacgtaatgggagcgcgcagagcatgatggggcacgcgcggtagcgcgaggcggggcatgtaaccatagcgtgcgggtcatgatgaggcacggacgtggggggttaggtggggcacgtaattggagctcgcggggcaggatggggcatctaactggagcgacagagagcacgatggggcacttacaggggccggaggctgggtacgtaacgagagcgagcgggaaatgatggggcacctaacgagcacgcagagcatgatggggcacgggtgcgaggtggggcgcacagtgggagcgcgtggggcatgatgagacacatggcgaggccatcagggcacaggggaagcacttttggaacacgtgagtgacagggctgccgcccttgaaggagccctcggagtggctgcgtggtggggcacgtggggcaggttcaggaaaaaggatgcagcatgtgattgcagggcaacctggtgaggacacgagagccacctgccaccagcagggttcagggctcccagctgtgggttacttccaccttctttcactttctctcttccattgtgttctagagaatttaggcccagacaagacactgattgattgattgattgattgattgacagaggctcgttctgagcccaggctggagttcagtgatggatctcagctcactgcagccgccactccctgggctcaagagatcctcttgcctcagcctcccgagtagctgggattacagaactgcaccaccaggcccagctaatttattttttagtttttaatttgctggaaagatggtttgtagctttgttgctaggctggtcttgaactcctggcttcaagtgatcctccagtcttggcctcccaaagtgctgggattataggcgtaagctacagccaactttcaatactgccccattgggggttaagtttccaacacatgaaattaggaggatacattcaaaccacagcagtatattatgaccataatattcattaactgtataacaggacaggcgcggtggctcacacctgtaatcccagcactttgggaggccaaagccggtggatcgctccaggtcaggagtttgagaccagcctgccccacatgatgaaaccccatctctactaaaattacaaagaattagccgggcatggtggcaggcgcctgtaaccccagctacttgggaggctgaggcaggagaatcacttgaacccgggaggcggaggttgcaatgagccagattgcgccactgcactccagcctgggtaacaagagcaaaactctgtctcagaaaacaaacaaaacctgtataacagagtgtcattgaatttctaaacgttgaaagacttcacattaaaaaaaaaactcacaattcaatattattgagtgaaagtaaccagacacaaaagagtacattctatatgatgctgtttatgtgaaattcaaaaacagtccacatgacaacatggtaataaggacagtggctgtccttgttaggagttatgactgggaggaggcaggagggagctttctggaatcactctacatcttgttcttgagagtgggtgtatatacatcaagtgtttatcaagctgtgtggttaagatttgcacacttgtatatgttataccttgatttaaaaaatctaagtaaataaggatacctttgaatatcttaaaaaaaaaaaaaaaagaggccaggcttggtggctcacacctataatcccagcactttgggaggctgaggtaggaggattgcttgaggccgggagttcaaaaccagcccaggcaacaaagcgagacccctgtctctactaaaataaataaaacaataaaatgaaaaaaaatagagagattgaatcatca

SEQ ID NO: 586457 - DNA, 4001 bp, Homo sapiens
tttgagacggagtctccctgtcacccaggttggagtgcagtggcacgtctcggctcactgcaggctccgcctcccaggttcacgccattctcctgtctcaacctcccgcgtagttgggattacaggcgcccgccacctcgcccggctaattttttgtatttttagtagagaccgggtttcaccgtgttagccaggatggtctcgatctcctgacctcgtgatccgcccgcctcggcctcccaaagtgctgggattacaggcgtgagccaccgcgcccggcctgttgttttttttttttaaagtaactaaaatggtagtaagaatgaccatttctaagcgcttgctagtgccacatactatgctgaacagcttttgtatattcattgtctggaacttcaaaaaagtcaagagtctacaaaatattcgtaatgaccctaggccttggggcacatagcaggggctcaacaaatagctctctctgcctgatctagtgttcgcgaagggaagtgctggcacagaccagggtttgtaacaaaagccttggcgaggagtagcctggtgctggacgaagagaggcctgttaaccccgaacctaaactggagggaaacgggagagcagtgctgtgatcctgaggcagagctgagagaaggagttctgggcttgatatagggcctggtataaagcagagtgacggtcctggactacctcctgcccacgagaggtgtcgtgttgtgttttgttttgtgatgggatctctctctgtctcccaggctgcagtgcaatggcacgatcatagctcacagcagccccaaactcctgggctcaagcgatcctcccgcctcgttctctcaaagtgctgggactacaggcgtgagccaccacgcccagccccaagagaggtttttgtatggcaggaaaggaagggcagtggtagttgcgcacacagactctggagttggattaaacaatctgactccattgtttaaacacgtttcttagccgcagttgcttgttaccttactgataaaatgagggtagtgatagtacctacctcacaagactgctgtacaattaaatgagttcactacaatatggaaagtacttagaactacacctacacattgttaacagctcattgtatgtttggggctgctagcctcttcatcattgttctgtgtgagaagcaccatctgactagattcccaagggagcggagggaaggaacaggaaagggcgaagagaggcaggcacgaacatccactcttgggggtccagttgtgcaacgtggcctccacttacactgattattttacactgattttgcgtgtgtccatgcgctgggaggaaagggaggacgtggtctgccccaaccccgctgctcaaggtcctccaagggtccagtccccggctggcagcctagggcacgtgagggccgggaggctcacccgcggcggagggtctggggtccgggaggatctgggcagcggaagaagggaggagcgcggctgcacggggcggagctaggggaggtccggcaggagggaaaggcctgtccggagagagggacgcgcatccgctgaggccgcgccgggcgccaagggcgcggtacctggagtcgaacttctggccgtcggggaacgtccccacgtagtggtagcgcacgaagtcgccgctgcgcacggtgcgcgggcactcgtcgggcacgaagcgccgctcgatctgcagctccgcgtcggagcccaggcccgccacgggcgctgcctgcccggtcacccagagcagcagcaggagcagcggtggcggcgggggcctccagccccggaacgccatcggggcggcgagaagagtggcgcggacgcagcgcggcgctcgggcggcacgggtcggcctgggcgttcggctgcgtttgcaaacgtggaccgggtctcctggccctacccgggctgcagccgccaccccgtctccccggccgcccgccctcccggccgcagctccaggggaggagcccagcctggccgcgcgccgagggcgggcctgctgcgccctgccccgcccggcattgggaatgtgcgtgccgcagcggggaggggggctgggaactccagtggggaccaagtctgggcctagagagggcgtgtccccgagcgagacactgtgatctccggacaaggctttggcccaaagtcggaagagaaaagcgcgtactgcccaagcccacccgctggtctccgcccgtccctggagacaccgggtttggtgccgtgaggggctcctacgtggccgtggatccaattttcccttgctgctttggagagggagggaaaattagattttaattttttaagcttagttacaagggtatggtctaccttgaaagagaccgaaaccatccttcaggactttttttttttttttttaatactgcttaaaggaaaaggaaggccgggcgccgtggctcacgcctgtaatcccaacgctttgggaggccaaggcaggcggatcacgaggtcaggagatggagaccatcctggccaacatgatgaaaccccgtctctactaaaaatacaaaaaaattagccaggcttggtggcgcgtgcctgtagtcccagctactcgggaggctgaggtaggagaatcgctggaacccgggaggcggaggttgcagcgagccgagatcgcgccactgcacaccagccctggcgacagtacgagacactgtctccaaaaaaagaaaagggaggcatgtattgcgagaggctcccgtgacacttgtctaggcaaaagttttaaggcaccgtgagggtcctccaagccatcagcggccgcactgtgagctgatacttgcagacatcctacaagctcccatatacgagcctatgccagggaggacttcatcatagagacccagaagccacaggaatccattagagtaatcagatgcacttggaattggaattgggtgttataatttattaaaattttggaataatgaaagcaaatcaccaactctttctcaactcgttttggaagcaaacacaattctgataccaaaacctggcaaagagagcaacaaaaaagaaaaataaaactgaaaaaacagggcacgatctaatttataaatataaatgcaaaaatactgaataaaacgtaataaaatcggattcaaccgcatattaggccaggcgcagtggctcacacctgtaaccctagcactttgggaggccgaggtggttggatcacctgaagtcaggagttcaagaccagcctgtccaacatggtgaaaccctggctctactaaaaatacaaaaattagcagggtgtggtggcacggcctgtagtcccagctacttgggaggctgaggcagaaaaattgctggaacctgggagtcgaaggttgcaatgagccgagattgtgccactaaattgcaccactgcactccagcccaggcgacagagtgagactctgcctcaaaaaaaaaataaataaaaaatttaaaaaacggtatgttaaaggaaaaatataccattacatgggctacctaggtgagcttctgtaaattaacaaaatgtcagtgttctctgtaagatgaagataaaacaatcattataagattactataatcttaggtttcagggatcgaatgagaaactacatgaataacaagaaaaatgttcattgttcatcttagagcttattctagaaatagaacacctattaataaaattataggacagaagaagggaaaaaaagctctaagatcatgtggccatagactcaaaacggcatgagataaaattcaacatctacctctgattttgaaaacaaacagagggcctggtggctcacttctgtaatcctggcactttagaaggccgaggcaggagtatcacttgagcccaggagtttgagaccagcctgggcaacatggcaaaaccccacctctacgaaaaaatacaaaaattactcacccctgtaatcccagcactttgggaggccaag

SEQ ID NO: 586458 - DNA, 4001 bp, Homo sapiens
tagaatgagcaaaacaggccaaacacaagccatctctacaattgcaggccatggctgataaacaaaacaaaactttgaacaacaaaagaggccagtaattagcctctatggcacccagcatccagaagggagctgaatgcatccaaccagtgccgtccagctgatcagcctctgaaatttgtaaagcactgtgacacataccttatctctttaatctaaccacctacttgacaaagttgctggaatagggaaaaatgaagtccaaggcagtcaaacactatccaaagtcatacagctagtgcaccacagacaggggctagagcccagctctcttggcattaagcccattctctgcccactgtacctccttgacatcacttctggccactcctcatcttgggccccataatgaggtttataactggataactaagcacagtatagggggatggtgggagtcgagggtgagtctctcctgtcttcctgcagaaccatctaaaacagcccccaagaaagaaatggttacaagagcctatgaagaaacttaagcccatctctacaaaaaataaaacattagccaagcatggtggcacacgcctatcgtcctagctactaaggaggctgagatgagagaattgcttgagcccaggagttcaaggctgcagaaagccacgatcatgcagctgcactgcactccacactggatgacagaacgagaccccgtctcaaaaaaaaagaaagaaagaaaggaaggaaggaagggaggaaagaactaagtatcagaaaacagaaacttgtattagagatgaaaatgccaactacaaatcagcatggacagagtatttaaatcatggtccagccaatggcagactttatttaatacaatgttctggcaattgaagactttaatcatttccttacctggaatcaaagagggtgccatccagaagcgtgccattgtaatgatacctgagaaagtccccactttgacttatccgctcacagttttcaggtactaccttgttctcaatggaaatgctgtccttggggttatggaggtccaataatgcaacatcaaacaccagagatgcctgaccgggaatgtctttccctagaatggaatgggagaagatgattaaacgggacacaggatttaggaagtactttacaactcaacaggcttggggttggtgttattcatttcttgaggttttgaagccaaggaaacaaatgttcttccaggtcttgaatgggcccccatggtgtccaaccatgggctgatggtataatctaaaacctgactcagcaaaaggagaaaattggtattaatgacataagagactaccatgaccatattttctggactcatgctggaaaatcaaggctttatgtaggtgggcaggcacccacaggcaaacccaaatacatacctctgtgggtttctgtttgtgaataaatgcaaaccacagacatttaaaggagaaaattccaaatctctggtctggttctggagaactgtacacagacttgttctttgaaacgaacggccaattttttagaggcaaaaagtaaaactcaatgctttaagtatatccaaagcaagatataaataagatgaaagcagaataacagagaaaaaaatggcacccacaatccaaaatataaataaatagtcctcaaatcacttctatctcacttctgggtagtactgcttctcttggatgttcctgccagtgggaatattttgaatatctgcaaaatgaaatccacatgaagagattacaggacactagttcttcctgcaaagatcaacatcaaccaataaataactcaaaatccagtaatttgggatagtagaaagttaaccaacaaaccaatccctcagttttacctgccatttgttatatcatgcaaaggagtaggcccagacaagcaaaccagatgccgccaagcctgagctccttccactggcctttggcaaagcccaccctgcatctccttcccatccaaggaatgatgaaatctgctgaaagccggctgctgagtcagcccctggaatgcaaggtgtggtcaatccctaaatcgcatgcgtgggagatagaatattaatcttttgtgccttactgtatcttttcatttaagagaaaaatgaaagccttaaaagtaaccatggggtttaaatttttcttttctttttttttttcttgagacggagtctcgctctgttgcccaggctggagtgtaatagctcaatcttggctcactgcaaccttcgcctcctgggttcaagcgattctcctgcctcagcttcccgagtagctgggattacaggcacctgccaccacgcctggctaaattttgtatttttagtagagacggggtttccccatgctggccaggctggtcttgaactcccgacctcaggcgatccacccaaatcagcctcccaaagtgctgggattacaggcggcagccactgcgcccggcctggggtttcaatttttctagcattaatgtgtactaaatgaataatgttttctatagcaactttgcagagatataattcacataccatacagttcacccatttaaagttatacttggatagccgagcacagtattcaagtataaagtattcaaaaataactactctaaataagctattatttatttaaagtaaagaaataatatttctcatattaggctcacatctggttttgttatgtggctgatgacaaaaggatctgggagccaacgtgaatgaacttcttggggccaaggacaagaccatttgaacatcaataagaaaacagtaactgccaggcacagtggctcccacccgtaatcccagcgctttgggaggctgaggtgggaggatcgcttgagtccaggatttccaggtaagcctgggtaacgtagcgagacactgtctctaaaaaaacttttttaactagccaagcatggtggcacacgtctgtactcctaactattcggaaggctgaggcaggaggatcacccaggagtttgaggttacagtgagctatgatggtgtcactccagtctgggtgacagagtgagaccctgtctctaaaaataataataacagtatcttatatctcagtgggggggagaattaagacatatttatggcactgctttaaactttatttttcttttagtagggaattccacccctaatgctctgtttaagaaaccatctgcagatccccagcatgtaaaatatataaaagtgggccaggcacagtggttcacacctgtaatcccagcactttgggaggccgaggtggatggatggcttgacctcagcagtttgagacaagtctggccaacatggcgaaatgctgtctctactaaaaatacaaaaatctgccaggcatggttgcatacgcctgtagtccaagctacccaggaggctgaggcaggagaatctcttgaatccaggagatagaggttgcagtgagccgagatcgcaccactgcactccagcctgggcaacagagtgagactctgtctcaaaaaaaaaaaaaaagtgtatatatatatgagtatatatatatgagtgtatatatacatatatatatatgggcatgtatatatatatatgagtgtatatatatatatgggcgtgtatatatacatatatatatataagtatatatatatatatggagatagaaaggagagaaggctgagccccatcacctcaggctcccttctgctcctgctccgctccacagagccaggaaaaaacgttgaaaacatattggctattgtaagctggctatcactatcagtaaacttcttaagaagcatcatgttctcatttatatccttaactacaaaatcatgtgctgcacaatgaagttttggtcaacaacagaccacatatatgagagtggtcccatgagattatcatatcatgtctttactgtaccttttctatgtttagatacacaaattcttaccattgtgttacagta

SEQ ID NO: 586459 - DNA, 4001 bp, Homo sapiens
aaaacccagcctgctgaggatgccggcccaggactgactcctctctgacccctcagcctccatcacgtagccctcagtctcactacacactccaggctccctcccccaccccctgccctcagccttgtccttctggaaagctcagagacatctgctgtgtcacggaggcagggctatttccaggacagggcaggcgggtggggtgggggggcagtattggggcaggagggggtaagggctagggaggggactggacggggcaaagggccctgggctgacctcagctgctatatcaggaggcctagagatggccccaagggagagtggggctgacagacatcaagtcatctggagaaatctcagggaacatcctgtgtggggcccacctggccccacatgaaactcccctcctggggccgtggggtgcaccgtccaaggacctcgtcctgcaaatcccagcagggttcttaagagctctccacaggggtgggcggggggatcttccccaggcccccagcctcagggatgactgcaggactctgagggcaggacagcctcctgccactccaagcccacccttggcgtctctgctcccaagactagagtgcctccccgcccccaccctgcactacacaccttccaaatctggttacactcaaagacttcctcccttccacaggcctttccctccctccccgcagcccagaccgttagctgcagccaatcccgcggtagggggtgggctggggcagggcctggacttgcggaagccccctccaccgcaggctgaagcaggaggaggacagacaggggttaagtctccccgcgctcgctcagtgcctttttaggtttctgaggctgggccctgcctgtcctggcccccgggcctgaacccagctgctgagcacatgcacgaagagggcctcccgcgccagctcccctcggccccagagcccgcagacgcgggcagtggttggggacctgtcttcagccctctcccagcccgcggaggggctgtgaagctgggaagccacttgttttgttgggggcggggagatgcccccaggaatcagtgacaggcactggttctgtcctcccgagtgtgggctagggttgcccgatggaaggaaagggaacggtgagccgaggcgggaggtgggaatgtgcatggggaggcggcagctggagggctcgcaaaccctaaggcctggactccccggggcacccagggagtgctcgctgtccccagaggggtgtgcaggcagtgcccatggcccttgtcgatgggtgggagggccggggccagggtcttctctctataccggggggtgccctccgccctgtctctcagctccccgcgcgcccaccccgcacctgtgcccctgccccatgggacgaccctatccccgcagcgcccgtgccctcgcccccggcactgacctatggacacgagcttgatgtgctcgcgctcgaggaactcgagggccacggacacgttctccagcttcatttggcggaagttggggcgcggatggaacttgcggtacatgcgcttctggctgagcacctcgagcagcgcgatgagccggagcccgtcgctgaggtcgcgctgcaggtcggtcaggcgcttgcccacgcacttgaggtgctcattgcaccagcgcgtgaatgtgttctgctggatcttcttccacggcgcgtcctccgccaggtccttctccgtggacggcatctcgtctgtctcatcgcccaggccgaggccggcgtctgagtagccgctgttgttcatcatgctggcgcgggctgggggtgcggccggggctagggccgcggtttgggctatcgggggctgtcgggcgctgttggggcgcgaccacgggactcgctgcgctgcgctgctctcctctccaacttctctcgcgccggggctggcggggctcggcgaggctcggcgggcctcctaggcgctcggccgctctctggctctctctccctccagggccggagcggtgctcgggaagggcgggctgggccggggcggggggtttaagaagcccccggaccgccgcccccccgccgcgcccgcggcccccgggtccacgtcagagcgccggcctcccaggaatgccgcccggcccgcgggtgggggccgcgccgcacaggacgccccgcccccgccgcccctcccccgcgccgcccgggcggcgggacggggttgagggcgcccaccccctgggcccccggtgccgccgcgctggaaggtggcggggagggccgacagttctccatccacacccaacacaccaaactgtcaggaatgaaatatgctccctccacaccccgcacgggctgaagaggtaaatggggaaactgaggccagtgattagggcaaaacccactgatctggtgttcacagaattttctagactagttggtggcaggctgttgacagggcctgcgagggctggctcctagcccagggcattgtccacctgtggacagggaagggaagtgtgtgtgcttgtgcagagacggcctgagaggaagcagggaccttgcccgggccaatgaaggagaagcctgcgggggggcggggggttgtgtgtgcctcccagccattgcttgactttacagatagaaaagcctcatgtagggcccaaatccagaggcccaggagtaagaccggggcccctgcccctgactcagtgtccctgtcaccagcccgtttggcctcatcgcctcggtatgaagctgagctcaggaaaagggtacccagtgactcacactgtgtatccccctcccccaagtctgactcaactgagatgataagaggggaaggagagactcttcccccatagtgccagggagccccctgggcaacatgcccatttgggccacagggcagatcctgccagggaaagggtgggtcagccaggcagaaacagggagagccccagccagagcagccagggggaaatgtgaccaggtgggtaggcaggaccaggggcagagtggtcagggagagcctaagggagccagctgggatgcccaggcaaagctgcactcagggcaagccaaaggctgcaggcctggggaatagaacagcagggaaaccgaggcacccaaacagactctggcctggggtgaggagaaagagctagagaacgtatttctttttcttttttcttttttttttttttttttttttgagatggagttttgctcttgttacccaggctggagtgcaatggcatgatctctgctcaccgcaacctctgtctcccaggttcaagcaattctcctgccttagcctcccaaatagctgggattacaggcatgcaccaccacgcccagctaattttgtatttttagtagaaacggggtttctccatgttggtcaggctggtctcgaactcccgacctcaggtgatctgcacgcctcagcctcccaaagtgctgggattacaggcgtgagccaccgtgctgggcctagagaatgtatttctataaggagaggatccattctgcaactttgtaacatacgtgcagccatatctcccagttccccctttttcaagccatgtgtcttcagctttcccatccttctagacctagtaagtctagctgagctggctaggaggccatatctgagcctgagaagtttctttaagccagggaaggttctgggcccttttagatgaatcattatatctaattcctcttctacccctagacctggtgtaaaagaagggatagtgagcatctttgggggctctttcccccaagggccaatgagggcaccccctgttacggagctgaggaaaaagtgtcagggttctgtgggggcaatgcttatgatgacaggggtctatgaatgaaattgcctggtccttaggtagggagggggaggagtagagaagggaccagaaagagcaaaaggacctgctgtgtgtggctggaggtggggggagctgtggggaccctgatagtgacaggcgagg

SEQ ID NO: 586460 - DNA, 4001 bp, Homo sapiens
ggcgtttataaaagggagtaattagacagacaaccctgaacaagaaccacattgaagaaatataaacactggtgatgagttagaggcaatcactaaatagaaaaagaaagtggctccagaggaaatgagtaattaaacaggctttctcctgatcaacagaccttgaggtccggggcagagcagagggtgcggagggcagtggagctggaaaggagggaaccggaatgggcgggaggtgaccacgggatgctaccaaaggcaccgacaggcctgggcagccgtccaggcccagctgggtctctctgccctggtgacctcgggcccgggggaatctaatttgatcttggggtcccgctactccatccaaggagcactagttggggatgtaaactgaggcacaggcttcctgtcctcgcccctccccgccaggcctctgctccttcagcacagcccacactcctagggacctcgcacttcccggagcaacaccctcccactgtcctgggtgagtgtgttggggtcccccaggacccagactggatggggtgggggtggcccaagggtccagaccagacagggtcaggggtagccactggggtccaggacggcaggcatcaggcactggggtgacttgaggccctggctggtgggggtcgggggtggtcctgagaaccaggtcaggctggggtgaccctggagtccaagctggtgggggtccagggtgacctggaagggttgagggtgatccccaggcccaggcagcagggactggggtcaaggtgacctcagtaacccagctgggtggagctggggtgggagtggccctgcgagcccaggcttgtggggttagcggtcaggggtgactccgggggggcctaggaagtgggggtcgcggttaaccttgcgtgtttaggcagggtagggacgtagatgaccccagggatccaggccagtgggagttcagaatgaccccggagtccaggccgatgggagctggggagcagcagggatctgggtcaggggtctaagaggcccagccagatgggcttggggtatgggtggctccaggagcccaggccggtgggagatgaggtcaggggtgaccccaggagccgcaaggtgtgggtcagggctgaccccagagtccaggccggtgggggtcgggggcgacggggtatccagaccggggaaagtggaggagatcctcaggctggagcctccaggatcggggtcggggtgatcctagggagccaggaggcgggggtcggggttgaccccggagtccaggccggtcgggggttaccgggggtgggccggggggtgggggtcgaggccgaggaagctggagggggatccccaggcccgggcctcagagatcgaggtcgtgggcgagccccgggtgcgggcggcgggggtcgcggggccactcactgcttgggcagctgcagggcgggcgcgccgcgtctctggaaggccccgtccacgaagacgccgttcttgccgaggcagcgcaggtagaagtgcggctcctggaagctgagctgcaggtggcgccgcgagatgaagctggacaggcccatgctcaagtccaccgagccctgcgacgagttgcggccgatggtgacgctgggctggcgcatgaggaactcgaactcgcggccctccagccgcgccagcgccggccccgggctctgccgtaccgaggcggccgccgcggccaccagggccggcgccgcgcccgcgaccgcggagtccccggataccccggaggagcccccggaggagcccgcgcccgcgatcgcgcccggaggcagcggcggtggcggcggcggcggcggcccgggcggaggctggggctgcgcgggggccggcgggggtgcggccgcggggaaggcggcggcggcggctgcggcgcacagcactgggctgcagggcgccgagcgcagcgcgagcagggcgcgggcgccgctgtcctcgccgacttcggccatgttcgcgcggctccgagcggcctccggcggcggcggctgcagcggcggcgcggggggcggggaggtcggggcgctgggcgggcgcggaaacccgggccagatcgcgccggcgcggagcggagcctcccagcccaccgtgcgcctcgcctcgcccgcccgccggtcccgcccagcgtagcccacgtggcgcgcgccagcgcggggctgggggcgaggcctgtgccgggagggccggcgggcccccgggagagctgggcccggcgcacctcgtcccctccccgcggggctgcaggcggcgggcgccctttcctccatccagggggaagaggggacccctgaaatgcccagccacaaagttttgagcctgggtcattggagaaagggacggatgacctcagcagtctccccgccccagacactccaggcccccaaccctaaagtgtaagatagacagaagataaaatatatgtgtattatatacaatacatatgtttatattctaacctcgctctgtcgcccaggctgcagtgcggtggcaaaatcatagctcactgcagcttccacctcctgtgcccaagtcaccctcctgcctctgcctcacaagtgccaccacgcccagctaatttttttacttcttatagagacagggtcttgctatgttggccaggctggtctcaaactcctggtctcaagtgatctatctatctcgacctcccaaagcactgggattacccgtgtgagccacagtgccaggcctgatcattcttaagccctcagattaaaggtcatcatactctactgtaactgaagaccacttgagatccatccctgaatccctgatccatccttccttccttctttccttccttccttccttcccttccttcccttcattccttcccttcccttcattccttccttccctcccttctttccttccttccttccttcccttcctccctcccttcccttcctctccttctttcccttcccttccttcctttccttccttccttccctccctctcttccttcctccctccctttccttccttcctttcctttccttccttcctttccttccttccttccctccctcccttctttccttccttccttcccttcctccctcccttcccttcctctccttccttcccttcccttccttcctttccttcccttccttcctttcctttccttccttccttcctttccttccttccctccctcccttcctccctccatttccttccttcctttccttccttccttccttcctcctttccttccttccttcctttctttcttcccttccttccttccttctttttttttttttttgagacggagtttcgctcttgttgcccaggctgtagtgcaatggcgcaatctcgactcaacgcaacctccaccccctggattcaagcaattctcctgcctcagcctcccaagtagctgggattacagtcatgtaccaccaggcccggctcattttgtatttttttagtagagatggggtttctccgtgttggtcagactagtcctgaaaacccgacctcaggtgatctgcccgcctcagcctcccaaagtcctgggattacaggcgggagccaccgtgcccggccgcctgcctgccttccttccttccttccttccttccttccttccttccttccttccttccttcctttctttccctccctccctcccttccttccttctctctctttcttgtctttttcttttgagacagggtctcactctgtcacccaggctggagtgcagtggtacaatcatagctcactgcagcctcaaccttcagggctcaggtgattttcccacctcaccctcccaagtagctgggactatgagccaccatgcccgactaatttttaattttttttttttttaaggcagagtcttaatctgtcacccaggctggagtgtaatggtgcagtctcggctcactgcaaccgattctcctgcctcagcctcccaagtcgctgggatt

SEQ ID NO: 586461 - DNA, 4001 bp, Homo sapiens
acaaagattattagtatttcaatgcatataattttagtgatctttaaaataaaacgtgagcatattctgtgaaattttacatgggtttaaaaaaaaaagtcaaacaagttgttttctaatagagcaccatatttctaaacagatacctgtaacccttcaataccgtaatctctgttaggtataggactctgctttccgtgaaaaccaacaggctaatcattaaacctctccacatattctcaagtatactttgtttccaaacttgtacagcagaagggctgactgtaaagacaaataaatatgcctttaaaagggcattatgaatcaactatagataatcagatttaaagtcagaacagttcaaagataaggaacaatcgaaaataagaatgaaagttttgtattacacacactattgacggtgaaagtgattcaagatctattctaagcacacattaaatagagtgctttttttttttttttttttggtcgcggaggctagtaaacaaaaacctgtcacttaggctacagtaaagtgaaaatacatggatgaaatttaggcgttattacctgaaggtgaagaatgtcaaactggtcagaggaaaaagctgttggtgttgcagtaagaacttgctcatgtcactgggaaaagtgcagctatctgtgtcatcctccgactgtgtttatactggcttgcatcataaacaagctcatcttccctcatagcttgttcatgcatacttaaatcaccttgcccattaaaaatgtctctcttgacaattattctatcattttcagttgtcatcaggcaattactgtagccctatgatgggcccaataggatcccaggttctgagacgcttttttgaagcagacagaatgaaaagtgcagaaatggtaatttatagcccagccaagctacctttttaactgacacgagtattaaactatcacacctatttgaagaaatataatgcagtttctaaaaattactcatcaattcacaatgtgtattcctggaaatatatatatttcttcacaatcagtgatttgaaaaagacccaccaaccaatttttaataaaatcatgaacatgcatataaaactacaaagatcatctgagccctgactcctttcatgtttgtacaagcttagcaaaaagagtttcccctttagcacaaaataaacatctgctctacacagcacggcacagagaggcacccaaacgtgtggtcaaactcccttttcaaaaacttgcgccctgacacatactggggcatttactaaaagcaagatgacatggttattatcaaaccatgaaagcaggaaccctgtctttattcttctcaagatcttgcagatttttttttaatacaaaagaggccttctttatttgctgtctttactagtgatagcttaaatctacattacgctactgacagatcaaaaacagttcctgtgtctggtctcccggcttttccctcgcaaacagatacaatgctctagttcatttcaatgagctacagtctcagaaaaaaaaaaaagtaaagcaattgccaaatctaccagtaaagcaatcgtaaaatcccacccctctctaaactcttacagatattctcttagcaaaaagtaacgtaccttctctggaaatgttagagcaaacttcccggtttcaacttcataggagtttgttaaagagatgaaaaattaggaagattcaaaaaagccagcacagaaaacagtataaaaagaagggaaaactcagaagctagctcactgtcaaagccaccatcagacaactatttacagcagtatttacactactgtgagtacacctctgcccgatcacgtcccagactgatggcattttgtgctggtaattaaaacaaatcaagcagctctgtgattgttttggcgtccgtggacaatcgtacacaaaatcagcatttaatcactagggtatgtctttggtgtgcaacgtgaggggtgacaaaggttcaagactgagccagcatgcttaccataatctttctaaagtaagtgcttcatttttgtgtgtgtgtatgtgtgtgtgtgcatgtgtgtgagtgtgtgagtgtgtgtgtgagagagagaaagacagagagagagagacaaaagcaccagtttgagtctctcaagtcctcggttagctttcatgtctgtgataaatacacttcttgcttcccttattaggacaagcttaccattatacactgcacttttggtaaagctccagtgctctgcaatttacagccaaaggaagtagtttacaaaaataagcaaacccaagacaagcatttcacagccacaacatcagataagccagaaagaaataatcttcaatgcacatcaaaaccacttcacaatgacaatttgtccaagcagatgttaatcaagcttcagcctttgaacactagataccatcaattactaaccttaattgaaatcacagttctccagcttctctgccagcatattcagaggatgatgtattaagatatttacagtaaagtaaacaatgcatagttgcaatgaaatggaaaattttcagctaatggtgtttgtcaatcctttgtcaatttttctgcctgccacagatgttttcttagctgtttcacaaaaacaggaatcaactagcagagaagaaagactttctctcccccaggaaaagagtacaaagccaagtctgtacacagcagatgcaaaagaaagtccatctgctaccagctcacaacaccacatggagttttaagattttatactgtaggtagcctagcagggtttgtgtggaccccataagcatgaaaggaagagaaatggtagcctcaaactgttaaggtaaaaactacagctacagagacagaatgaacaacttactgaagctggtaaatcaaaggtttatttgcaataattttcctcctattgcaagaactgactagttttttaggagttacacccaagacaggaacgacactgtcttagttttatggcctttaactctgggcaagacaacttgaactcacaggtctcagctgaacaccatcgtgagtggacaagctttaacagcaccccacctacaacttaatgtgagacaaaacaacagttactgaacaaagcacttcgaagagatctttaaccggccaccactcctgccactgacttatcttgttttagtttcttcagatgagtaacatctgccactacttttgttgcacatttaaatactaaacagaagagggaaagatgtataaagaagtacttaaaataactgcttctaatagcctttaatacagacattttgggtaagtaattacagcaaatttcacatttcaccttcaacccctgaggctgcactatttctccacctcccctgaaaggaactgaaagcacttattctttagctctgtgatacaaaaccgtttaatattctgttagcaatttttttcattttatagttaaataattcactcattaaaagtatgtttatattggtttttttttaaaccaaaatttaaacacaggaaactcatgcaataggcaagtacctgtaaacatttatttttaacatttttttatcagattgtgaacaaagcaaatgaaattatatgagcaatagtaacttatattttaagggaattaaacaactgcgaatattcaagtatcaggaatatattttttaagtctgctttgttcatttaaaaattttttctcccaactcttcacagtttacagggcttccacatttcaaagaaactgtgaataatgtatacaatgacacaaatgactttatgtactccagaggaaataaaggatagtttccattatcacatcagtcaaataacattttcacacaaatctgtttacattcactaaaatgataacataatgctcttcagcaatagtgccttatcaacctagaaagcagtgtagtagcaattaacataaaatttaaaagcttacactcatttttaccaacaaaag

SEQ ID NO: 586462 - DNA, 4001 bp, Homo sapiens
cagacatacaatacatgactgaagtttctcagtcatctgaagggcataacttttgtgtttactcttgtttatggtttacataatgaactgcatagaacaaagtaaacttcaaactcaggttataaacacaccttatagacctaatcaaaatgcctccagagtactaaaatctatagctatgattttactcattttctgtttatttaacatccaattggagctatgaaaataaagaaagatttcttggcattttttcataacctatcatctactgatactcaactgcgatgttcatttacaattactatttttacttggctttataaacgcaatccactggatttgcaggcaaaattgaatctggctaaaaatacttaggactctcacttagggaaattaggaggaatattgtagcattccactggtgtgatatttcctgcgaatacaccaaaggcagaaaagggctatcctgaaaaactgtatttattaaagtaaccagtaaaataagctaatcctgggactgtggtaggcatataattcctatgattgttaaaacaaaatataaattgtttttctaatacttattgtctgtgaaaaaaatgaaaattgtaaaataatagataaaccattcaaaagtactatgtagctcttataaaagattattcttgaaaacaatgcctaaaggttaagacattattcaacccatgtaacttttttaatgctgttattgtttaaaataatgtatctattaaattttactctagtgtgggcatttgctttaacttttgagatgtatttttctcattatatactaccttaaaatgtgaattatttcacataatttgcaatcttttcaataatcattattttaatggatgtaattttaatgatttttaggcatttagtttaagtgcaattcagagttacaaagaaataatatttattttaaaacaaatataaacttttcaaacaagtgtactcattctggcctaatataagtatatgctttcaaagctttcttttctctgtcactgtttctacagacttgagtcagtgaagaatgaagtggctattttttggttgaaaagaatttttttttttttttacaaaatcaggaaaaagtaatctcttataaaatgaataacagactacttaaaagtgtacctttattttgtagttgttaacatttccagatttaaagagaatattgcattttatgagacacttaggagaacacaaaaagtgctctttaatgttattgaaagatgtatattcaaaatatcttggaatgaatttcaagaaaagcaacagatcgtagtgtttacatgatttacaatctctcagcagatttcaactaattaatagctaatatttgcagctaacgcaggcaagcatctgtcttttgaaaagtccttgtggtccttttcaccttagctcagacttgaagaaattcattgtataagcaagtatcaagtaatgtggccctctggtggaaaactaagtatcacgttctgcagcacaatgtaagatagtaaactagaagctataaaatatttgttacaaagctttacagaccttccaaaaatcatcctgtgagcttaattaatatcctgacacctgaagggtactctggtactggtatgacgtaactaatatgaaaatcttatctctttactcatccttcaatcatgttccaaataataataaattctcagcatcttttagcttaacacaacatgctcagtttgctatgaatacatttttcatattcaataaaacaagcttatttgttttaaggaagcactgaggaaaacaaaacttacctgctgttgttgcagatgcagcagttctactgtgcttacttcagagctggtgtcaccacttgatcttccatctctgctgccagcatctaattggctgcttagagtgctcattccattttgattcattgaactgttgcttattgtctctgtcgcagattcctgcatcatgacttaatacctaaaagtgattaagaagtatcaattaacacacgttacaccttcacacttccattatcaagatgtccctctctgccaattacagagacagcatctttagaagagggggaagaaaaaagccttgaatagtcatttaccaaggaaagcaatacaaattcagctttcatccagatgctaatcattgaaattatggtttctataagcaatttttgtgcggttacatttaacagccaaagtaacataccatgcatatagcatggtcaatagcatttatgaatgaccacattttaaaatctacctataaaaccagtttaaatgaaggcatgattgcacactctgttctgtttcctattatctacctttgacaaccatggatgactatacagccttattttaaatattcactatcttgattctgtcagaattttacagcacatcttatgcaaggctgttgtttaatgatgcacagctaatcatacaaaattaaaattttgtaagggtgttacaaatcatatggtaccaaccaatgataaatagtataatgggtttctttttttgtgactaaataaaattttgccttggaggcattttaagaaaaagctcctgctgcaaacacgtcagatattgcctatttttttaatcaaacagctcatattcatttatttttctgacatttaaaacatttaatactgtccttcctgggaagtaattaagcttatgcatgagcagcaatcaaactgttcacttgaagatgacttaaaactcaattttaacataggcaaataaatgaaagatataaaattaattttccaggcatgtataagatatgaaagctggaaataaaatctatcaagaatatcactaatgattgtgctaaaaacagcataaattatgcatattaccttctctacagtaataaatgttttatcattttcactgcataaatatactgtactttcaggatagcaatgagatgtcctgccaagatcagtggaaatccttgcagtaaataaagaaccaatgtgctcttacaaaccagaatttcacagtacatcctgaatctgtggtttagaaagatcatttttggctctcaaagacctctgaatcctgtgccataacctaatggatgcacttctctgttttacttctatggacagaattgcagaaacaacctggctgtgctgtgactttaacagtaataccagacagtggacttaccctaaaggacagtaaacttatcactcaatctaatttgttttttacatgatttcaatattttaaacttgatcatattttaatgctttgtccatttaaaattttgaaaggcatttattataaagcaaatgcaagcttcctatctcttcctgtcatggagaaaatgttttccccagttatcttttaaaatgcgatgcacacaaacactaaatacaaaaagaatcacagacatacccaaaagacatttttgaatgccaatattaaaattgttaaaattaatgtttatagtatcatagttttaacagatattttcatcaaagcctaaattattaaattacttttcctactcttatcaagtccattaaaaaaaaagacatactgatttagtaaaaaacgtcaatagctggactagcaaagcaagttagtgtaacaaaaattacatatacaacttaaagctgtttggataataaaaaaacaacagaaaacatgagcagaaaggaaataattgctgtaactatagtaaacaatttttgagcgaaatgtgtttataaacaaataggttttgctaaacatcttattgaacattaacaaagaaaaaatcatataaattaaaactgatacatagtgatggattttataagaaaaaaacaaagctaatactcttttctgagattaggcagctaataagtattcaaattaggcataaattttacatgcacaatgtttaaaatattcagagaaaaggtctgattgcctttactagttatatgaaaattataatttcaa

SEQ ID NO: 586463 - DNA, 4001 bp, Homo sapiens
tcccgagggagctggcctggggtctcccggctcgcgctgaagccgccctcggtcgcccgcggagcggagctcagcgcaccggcctggagacgcgcgcggcgggcgaagggcggggtgcctggagggccgccatccgcgccacgccgttcccgggccgcggcgcgaggagggagaccgcctcctggggaacctcgggacccgagccctgggcccgggggcggcgcggggggctcctctgcaggggtgaaccgcaaaagccgatcccctcccccgccccgccgcatctggttttcccatctgcagagatggagcaggacaaagggggcgagggaggacccagtcgaggcgacccgcccccctgctcacaaaggccgcggcctcgagcgcggggcagacgcgggaggaggggctggggggaagggctgacaccccgcgcccccccccaccagcggaggccgaccccgcccggcagcgggaggaggtggaggaaggccgggcagacggggaggtggaggcgcgccccgccgggatcaaaggcctggctaacctcccccatctcgcccgcgaaaggctgccggtgggggtggaggcgcgcccttgcgggtggcgacccttgcctcggacccccgagctccaggacagccggcggggggaggggcacgaggaaatgggtgaggggctcccactccgcaagagctgggacagctgatccgagggatcagcgcgcgtggggagagccaagattgggcgggggggggggttaggagggtgcacgtacggttgcgactccgcggggcctaggggagcccatgatcccagcccggggtgggaggtgggcagcggcacccgaggatgggcaaagccccactcctcgccccctccaggcggggtagcccgcgtgcctagcgggggcgcaatgggcagtgctccggaccgcagcggcgccgcgagcgagaaagggcgggaggctggaggggcgcgggtggggtgcgctttgtgcacggaccaggagaggcgggggcagcgtccccactcaccctggcgcgtggacacgttcctctcgttggccgcctgcagcacgacctgggcgcagctctgctccagagcaaagagctcgtccttgcccaccttggtggccttgcccgccttgagcgtgccgctgggccccgacggcgccaggtaacggccctcgcagtcgcggaaggccaccttgccggagcggaactccagcgtgtagccagtggccggctcggggcgcgccaccaggcgcccgtcgtggcgcaggaagcggtggtcggcggtctgcacgctgtagcgctggtcctggaaggcgagggtgatgagcgagtcgacgccccagggcacgtcgcggtccacggcgatctcgtcggccggccgcgcgctcaggtgcgcgtagcgcttacgggtgacgctgtagatgttgacctgagggtgcatggcgatgtgcacgctccacttctcggcgggggacaccgtctgcgcgaagcaggacaggcggtcctcggtgccgccgaagtagcgccggtgcgcctcggactgcagcgaccagcgaccgtcgtcgtgcgccacgatgaggaaacggcagtcgggaccgggcacctcgcgctcgcaggtcacgttgccgtccttgtccgccgccaggtagcggcccaggtggctgcgcaggcacacggccgcgctgcccgcctcgtcagggggctgctccagcgtccagatctgcttcttcttcaggctgctggcggacgcgttcaccttgaacccgaacgcctcggccgtcaggtacttgttgccgcagttgatgaggccgaactggatctgcaccgcctcggctgtgccgttggcggtcatggtggcagtagacgagaggccgctgcgcggccccgggaggtgggtggcgggtccctgcggcggcgcccctgctcctttgttcggctgccgcggcccgcacgcaccctccgcagcgctccacaaagcccagctagcggcgccccggacattttataggcgaggtgacgtcagcgccaccaggccacgcccccctgtcccgcccctggctccgcgcgggaggggccccgggccgagggacccggcgctgcggcccccgctgctgccccgccggtgctctcaccccaccggtgtcctcgccgcaccccgcagcgccgccgcctgaggacatcacccctcacaaccccggctccccgcgccagccacctaacccccccggatgtcccccacctcggacaccccgaccccaagcctcgctaggagcaaggacgagcgaggtttgaggtcacgatggagacttcagagaccacggtgcagatcggtactgggcgaaggtgggggtctgagggctgcctggaggaggtggccttggagcacatagccttacagaagcccagaggcagacgagggaaagaggctgggagctgacagcgcggtggggacccggtgaggccaggacctgggacccacagaccccaacacgcccaactaggttgtctccgaggccctgcagcctggccctcctatgcagagatgtggttccttgaggcttcagccccacagccgctgccctgaagaccaccaggacccctccgtgtggcccaggcacccgcctcgggtggcccaaataggtctccgggagagtggttgagtcagtggccgacattcccaatgctggcgatgccagggttcaggtcccacctggtggtgagtgggcaggacaggaattggtgttctcgttttttgacacggatcacagaggtccagcaactgtgagccagaccagcccaggtctctggttcccaggccagtgtcccttcccctcccaagccccaatttcatgggactctgagctggtcacacaggagggacatggtgctggctacagcccccccccccatcctcagaatcccaaccctccatcctcctcccccaaaggggacattccctgcagacaccacctcccacgccctcacccaccccctctagggacacttcccttttctgcgcctcaccgaaggctgaggcttttcctggacattccccacatgccaaaaggcccctggaatgccagcatgaccacaggctgcccacaaggtctcaggccgggcactgagataactccgggccctcagccggctcgctgataaactgggattgctggggctggtccgagcctgtgtctgccccaggcaatcccagccaggggctttcagtgcgcgggggaagatggtgtcaccttcttgccatcctgcttcaaatgggtttaccggcagggccttgagccccagaacccgcacgcccctggcaacccctcccacagacactgacgttgtggctgttaattttgggctttggccagaaccccctcccatcagccctcaaccgcaagccaacatgtttttgtgcttctttgctctgccctgagccatatactatggaaaaaatcaaggtttagctgggtgtgatggtgcatgcctgtggtcccagctactcaggaggctgaggaaagaggattccttgagcccaggaggtggaggctgcagtgagctatgacagtgccactgcactccagccaggtacagtggttcacacctgaaatcccaacactttgggaggctgaagcaggaggatcgcttgaggccaggagttcaacctgggcaacatagcaagatctcatctagatagatagatagatagatagatagatagatagatagatagataaatagacgatagaaaatgccttggcttgaatgcctctggtgatggggctgccactgtcctctgtccattgccagtgcaggtgataggtgtttgtcctgctctagattgggtacagatgtgagtgagtgagccctggtccacagctgctgccaggaaatgtgtccttgtggacagaacgagctccagatggccatagagctccggacgggggaaaagagaatctcggggttttgtttgtttgtttttca

SEQ ID NO: 586464 - DNA, 4001 bp, Homo sapiens
cgggcatagcagcggtggatggggctgtagaggatcacgtggacatggagggctggtcggggggtccacatgtggtaagctgagaggacgtgggaagtgcaaaacacgtccttgccattggactccaaataacgaccagagattaggcactggagggtccacttgctgttccggtggaaacgcagtagaaagcacccatggtggctggtccttgggcggccataacacacggtgccatcacactcacacagcaggtagaggccctgcacgctctttagtcgcaccacggcctgtgtctcatgctcattgctcaccaagatctcccaggtctggaggcatcaggagggagaagagggaaatcagtatcacgaagttaccagaccaaggagccctgcaactgtcatggctggtatcaccctggcaccttcatcagcaccagccacctcctcttccacatcagccctggtatctccttgctgtcagctcttccactttcccactatcccctcatcaagagatctctgggcccttccacccctgcagccagatggcactatccaaagagaagttctagatgtctacctccttcagctaacagaaggtaaaccctccctcctttcttaatcccactcttcaatacctaatttttaaagaaacgctttggtgtaagtcttacttttttcttcctcactgttgtccgcagagagcacacttagccaatacctccatccccaaaggttgccttccagcatggcaagacagaagcaaaagctcttataggcaggccctggctccagggatgaagatgggagcatgaacagttcagatgcaactgcctggttcagctgtgatcaaccttgttataagaggaagaactttgcccctgcctcagtctggcacccatcccagaggtgcctacattcctctctagaatgaagaccgacactgctagggcttctggagttccccattctcaaaccacaaccagaacagaaacataggctttgcaataactccactggtccaacttcccctggatgcccacaattctgctttcccacctgggctctccacttctcctctttctgacacaaccaccctgtgctctccacttctcttctttctgacacaaccaccctgtgctgggatggggaatagggacagttagagcaggacaaggcagcaagggcaaggctgaggcttcaccttgcggaataaattgagaggtgggagatggggcaatagggtctgtgaacaaaagcctagagtagaaaagtctcaggcctggcactggcagaacctaggaaagtgattaggttgagagtacaccctgctttcatatacaggcaagtgcgcacacacacacacacacacacacacacacacagcttggccactcagaaaactggttccagtatactttcatatacaggcaagtacacacacacacacacacacacacacacacacacacagcttggccactcagaaaaccggttccagtatactttcatatacaggcaagtacatacacacacacacacacatacactcacgcacacacacgcgcgcgcgcacacacacacacacagcttggccactcagaaaactggtgccagcatgggtttgctttgtcacctgtctcctgcccaaactcttcgcagttgcagtgactgtattcttgcatgcctcaaaggtgaggtaggttcctgcccagctgatgagcccaacccttaggtcctcagccttgggatgtctgtgtatccactctgtctcatccatggggctgacaccacaggtgatgtctccgtctggcccagccctcccccccgtggtgaggttccacaggccatagggcctggaatagggcctgtagtacccaccagatgttcccagagagaacttcccaggcagaggctggcctggggcccagcacctctgtgacccgggagcattgtgactgtgagggcagcctcttatcacaccacagtggggaaagggccctggcgcagcagcattaatccatggcctagaggaggcgggtgcagagcctccggtgtttgccttcctattcccctttgggcaccaaagtaggctgagctgagaccaggatccggaacttcaacctgtgaatttaggcaagttttttcctttctttacctccgtttctcattctggtaacaggatagaaagcaacctcctttctcccaaggaagtgagttctgcctggctcccttgcaactcaagtattttgttaagttcaagataaccaagaaaaatctatcagcttttatggcccttaggaggatgaggtcaaaatgttccagatgctattttgcagggagtatgaggaaaccctagttaatcagttgacatcaaattactcatattcatcaggaaggctggctcaggacctgggtaaggagaagggcctaggtggagagagcaccaagcacccctcctcaaccccagctgctctgccagtgggtaggacatctggctgggcagatagagctcctgcaagggtatctttcccctccaaagaatctctgagttatagtctcttggactcacttcctgcaaagcttgaggagaaaacccagctcagaacctggaaaagtgacatgaaagaaaaacaaaggcaaaaacaagtgatgatgagttctgcctaagcctggctaggatccaagggaaaatgggcagtcgatcacacttggggaataagccacacccctggttcctttttctgagtcagggtcttgctctgctagccaggttggagtgcatctcagttgactgcagccttgatctcccaagctcaagcgatcctcccgcctcagcctcctgaggtgctgggaccacaggtgtccatctccatgcccaggtaattttttatttttgttttttgtagagatggggtcttgccatgttgcccaggctggtctttaacttctgggctcaagcaatcctcctacctcagcctcccaaagtgctaggattacaggcatgagccacagtgcccagccacccgtggttccttatacctgctttcctattccccataggaggggtcttcccaagtagcaagagtctcagtggtgtgcagcaaggaactacaagccccagaccccaccgatgttttataaaataagggtaatagactattagtggcagaattccctgggtaattttatttatttatttaatttatttatttattttgagacggagtctcaccctgtcacccaggctggagtgcagtggcacgatctcagctcactgcaagctccgcctcccaggttcacaccattctcctgcctcagcctcctgagtagctggggctacaggtgcctgccaccacgcctggataattttttgtatttttttttttctagtagagatggggtttcaccgtggtctcgatcttctgacctcgtgatccgcctgcctcagcctcccagagtgctgggattacaagcgtgagccactgcgcccggcctcctctgggtaattttaaagatgcatattgttgggcatcagactagtcctgatgaatcacattttctgaaatgtacctcaggattcgtattattaacgcacattctctccccctctaattttaatgtgtaaggcaaacattaagaacggctctaagtagctacgagaatgatgggaaacaattacgtggttcatggaactatgaagggagatcctgtaatcttcagcaaaggctccttggagctgggaaggaatgagatttgcaccactgtaaaccctacagtatttccagcccaagaataaggagggagaagctgagctgagggtatgtgtgggtggggttgccctgcagccttagctgctttgatcctctcccacgttgtctcttggtacccagtaacctagcctctcctttgcaggctacagacaacaccgtgtacaaaccacagcaaatttattactcaagatccagtgccacattatagcaccacccgaagccctca

SEQ ID NO: 586465 - DNA, 4001 bp, Homo sapiens
gcgacagagcgagactctgtctcaaacaataactaaatacatcaattaattaattaaagtaatattattttctcatctggcaaaaatgttcattgggctctgacaggctgcaagaaaacctcataaggacagatccttgccttagtgacctagttccagggctttgacagctagtacagagggtctggcctgtcacatttctttttttcttctttttttcgagacagggtctcgctctatagcccaggctggagtgcagtggtgaggtcacggttcaacgcagattcgaactcctgggctcaaacaatcctctcacctacatgtcttaaataaaattgaactaaacctgtgtcaatcgttgaaggacaatttccaagattctctagacaattgttacaataaatgtaacaatttattcacagcccacaatagctaagcaggtggaagctatacacacctccccttgtttaactctgacaacaacctcaccaaggaagttctatgtcctctttttctttttttaagacggagtctcactctggcgcccaggctggagtgcagtgacagctcactgcagcctccgactcccgggttcaagcaattctcctgccccagcctcccaagtagctgggattacaggcacacctgctaccatgtccggctaatgtttgtattttcagtatagatgggttccaccatgttggccaggctggtctcaaactcctgacctccgctgatctgcccgccttggcctcccaaagtgctgggattacaggtgtaagccactgcacccaggcatttctttcttctttttgtttttttagagacagggttttactattacccaggctggagtgcagtggcatgatcacagctgactgcagccacagcctctggggctcaagtgaacctcccacctcagcctcctgagtagctgagactacaggtgtgtgccaccacttccggctaatttttctattttcagtagagatgggatttcaccatgttggccgagctggtctcgaactcctgacctctggcgatcagcccaccttggcctcccaaagtgctgggattacaggcgtgaaccacctcacccggccatttttgttttgctatcatccaggctggagttgcagtggcacaatcacagctgattgctgccataacctctgggtctcaagtgaacctcccacctcagcctcctgagtagctgggactacaggtgtgcaccaccatgcctgggctaattttttttttttttttaattcttaaaaaccttttttagagatggcatctcactacattgcctaggctggtctcgaactcctaggctcaaacgatcctcctgcctcagacttccaaagtgctgggatgacaggtgtgggccaccaagcccggtctctatgtccatctttctgatttaaataaataaataaaagttaccaccctcatggctccaaggccaaagcttctagcttctgcaacaccaaagcgtgctgacaagccaggaggcactgactgctgaccgtgagtcgctgtcttcccctcgcttaaggggtctcccgggaaaatggcacaagccggtcccgggggccagggcccactcgacagcccaggaagcgcgggcaatggagctacccggcccagaagcgaaatcccgccccgggctcgcccccggcgccttggatctgggccccggcgctgcgccccccacctggactccgccgccggccccggcctccccacggccccgccggccctgcccctggagacctgagggcgccctcctcccggggaactgcgacccggaatcctggcctcgcccctgtcgcgctcgctgagtgcggggacggtgcccagcgctcggcacccagccccgaggccaggaccgaggaaggcgaccgggcggacccccaaccactcccgctgtctgcacgcgcagcagcagcgcccagctcaccccgccattggtgttccccgcgcctgcagcgcgccgccggaagtgcctggcctcacttccggtcagaggccacgcccccggaagcggcggtgcaggtacgaaaagcgcgcgcggggattccaggagtcgtggtgaccagggaggggagccgggccagcgggcggcaggagactaggggagctgagccatgggcttgggggagagcggggccgggagctcgaaggagaccagaagagcagggtcgggggctcgagggagacgaggagagcggggccgggggtttgggagagagacaaggagagcggggcggaggcttgggggagaccaggagtaaatcacaaaaatttactttggaaaccgtggcttctggcagaaacagatcagtgtcgggacaaagtacacgggcctggtgtgaaactaagccacaaacccatttaccctgtctgacctgcctccgccaccaggacccagtctcagtgaaatgggaaaggttcccttgtcctcctcgaagggcgtgcgatgaggatgtggctcacttcttcagtgccccgcttctcaagcctctaggggaacatacagacaggcaggctgaggggctcccaccccacggcagtgtctaggggtgaatgtttgcagctcctgaagccccagcaggcatgtgttagagggtgctctttcagtttagccttgtaggtggcttgtgttagtcagctgttagactccctgccttatcgcaaggacagagggctttctgtatccctaggtttcttgccttgatgtactggagcaatcagatcacacggcggcttggagagtgagtgcaaggttttatgagtggaattagccctcagcagatgggggagccagaaggcagttggagtgggaaggtgattttcccctggagtcgggctgctgagcagcctgggctctcctctgaccgcccctgccaaactcatggttccatcagttgatggcctgctggtgcctgttggtgtgctttccacgtcctcttgacgtccagcggcttgtgtctctgcccactataaaaaaccactggggtttttttataggcacaggacggggacgtggcgggctcgggaaatgcaacatttgggcaaaaaaacagaaatgcctgtcctcacccaggtccctgggcacaggcctgggtgtggagccctggccagagaccacgccctcctctacccagcacttccctgcccccttccttatcatctggtcccttttctcagacaccacaacttccaagaaggatcactggtcctgaaccctgtgtcttgtccaggtgtggaccccagaaaagttggtcctggctgggcgcagtggctcacgcctgtaatctcagcactttgggaggctgaggtgggtggatcgcttgagctcaggagttcgtgaccagcctgggcaacgtgacaaaaccccatctctactaaaaatacagaaattagctgggtgtggcggctcatgcctgtggtcccagctatgtgggatgctgaggcaggaggatggcttcagccagggaggcggaggttacagtgaaccgcgatcacgccactctcctccagcctgggcaacagagcaggatcttgtctcaaaataaataaaggaaagttggtcctggccctccagcatttctccagggtccttttttcagcagggacctggcggaggcatcgccctcagagtcctctggacctggacctgcacacctatgggagcaggaaggacccttgtgacttccagtggcccccctgggtgccaggtcccacagtagccacagcaggagcagagtgggtggggtataaactcctatcacaggagggaggactagccgggcctggctgggtggacctgtgtctacagccacacatttcctgggaatctggaagcctgctacagagaggccaggtcccactagactgaaagaagttcctgttaatccaaaggcctgacctgaggaccacaggataaactgcgtggttattttggtgccaatcaggcacggggactgttgttcctc

SEQ ID NO: 586466 - DNA, 4001 bp, Homo sapiens
gcttctcggtcttggtgccatcgtgcttcatgatggtgcggatgcggaagagcgacacaaagccggccagcagaaaggacgtgccgataaacaggtacacgaagaggggcgccagcacgaagccacgcagcgcgtccacgttgttaagccccacgaagcacactccgctcagcacatcgccgtccacctggcccagcgccaggatggtgatggtcttgatggccggcacagcccaggcggccaggtgaaaatactgtgagttggcttcgatggcctcgtggccccacttcatgccagccgccaggaaccaggtgagcgacaggatcacccaccagatggagctggccatgctgaagaagtagagcatcatgaagaggatggtgcagccctccttcttggtgccctgcgccacagtgcgtgccccgtcctcggcgaacttgtcattacacaccactcggtcttccaggaggaagccggcgatgtaggccacggccacggccgtgtaacagccggacaagaagatgatgggccgctccgggtagctgaagcgccgcatgtccaccaggtacgtaagcaccgtgaagagcgtggaggcgcagcacagcactgaccaaatgccaatccaggtgcgcgagaagcgcagctcctcgggcccgaagtacatgagcccatacaccttggtcggctcacaaggtgcgccgcagtccttctcccccaggaagtggtagttgaggtaggagggcaccttgagggcgcgcgggcaggagaacttgcctcgctccgacgcgccggcgccccccgggaagccgccacggtgccctccgccgccgtgctgagggttgctggtccagaactctggaagcagcgagggcgtcggggtgcccttgtcggacgtgttctggcccacgcacagctcgccggcgccgtgcaccgggaacttctcacacttgagcgtgtctggccactggaagccgaacttgttcatgagcgcctcgcagccctggcgcgcgcgctcgcacagggagcggcagggcggcagcgcctgctctagcacggtgcacacgggcgcgtacatggagcacaggaagaacttgagctcagcggaacactgcactttcactagagggtagaactggtgcacctccaggcccgcgtcctcctggttcgtgtggcccagcaggttgggcatgatggtctggttgtacgcgatgtccgtgcacagcgggatggagatgggctggcaatagccgtggtccgggacggagatgccccgctcgccgttgtactgctgcccgctctgttgctgctgaggcggcggcggcggttgctgccccggcccgggcccctggcctggcccctggcccgccgcctgggcccggacccccagcagcagcggagcctccagcagccaaagcagcagcagcagctggcgcgccaatcgccgggggtcaactggcgggcggcggcggccaccggcgtccccgctgccctcctccgccagccgggccgagagcgccccggcacaaagttcccagctcgcgccaccgccggcggcccgggacttcttaggcgcctcctcctcagccatactttctcggctcctctcttggcgccgctccgctggggctgccaggggcacggccggcggcggctccccctgcggccagggagacctctgcgcgggtgccctccgtcgagcccaagccgctttcggcccgctcccccggctcctgttctgcgtaccgcagccgccgccgccgcggaaacttgcgattcatgaagcgcgggcggcggggagaacccgggtggctagggcgcgccggggtcgtgtcccgccttcctggccctcggctcgctggctcccggctggcggcgccgcgctagtggccgcggccccgtagagagcgcaactctccgcagcccagcgggctcggctcccccctgcgcctccgcctccttctccgccgccgccgcctgaccatttgtgtcaatccctcaactcgctccctctcctctgcctcgcgcgccctcggaccggtttccaggcgccccgtagtctgtctttcaccaggagggaggagccttgaaaccgacgcagaactggaggctcagggaccgtcgcccaatcgcggctccggcttcccggcgcaaagggagccggccgcctcctcgccagagcgaaagccagcggcaggagggcggggtaggaggaggcgggaggaggaggaagtagtggtggtggcactactcaggcacaaagagtaggattgctctgaagcgggacaggcttggttgcttttgctttttcagaagaaaaaggcgaggatacgtaggagaatggtcccatatgctgctggagataatgaataggagtcagaggaccgcgggacttcgcttttcttttattttatccattatcatgtttaaaaatcctgctcttaacgctggttaccaacagcaaaccgggttctgcttccagaacagatgcctttgacttaaggagcgcacggtttcctttgagtttgtgtctgtcgaggttttgtttaacatattacattaataaatcctccagttcgcaggctgggcttggcgggctttggtcgcgccatttccccagaggagacgttcacgggatcgctgtcaaatgaaacaaaacacaaactttgatggaatttggaaagtaaagccagatgcgccttctgctactatcattcttcttggagtcaaactcctttttttccgcctctttaatcaagtcagaaacagaagcaaaagaaaactatccattaaatttttggagagaaaaacttaagaacccgacgaccgaggcagtgggggcgcctctctgggatcgtcctcgccgctccagaccgcagaggtggcgccggcgggagctgcactcgccggcagcttgggcccctggggagcctttctaaaccctggggacgcccacggctccgatgggaactcctgggacctgggccatttaggttccacaggctgggctgcagagctggagacgccagtttaataaacaaaacaaacaaacagtctgaaagcaaacagcgaactgcacattctcttcctaattccaaaacagcataatccgtctcaacagacgcacattaatgttgttttccttgtaagattattttaaatgatggtttgactatgtaattcagttttataagaaaagtgccattggactattaattcttccattttttttttttttttgcctgtgatcagactctatctcagcgtacttttcaccaattactttctatcattcatttacacattcatttgtttaatagataccaaccacccattgtgctataagcactcttaggtcgtagagtataaaatgaaggagacctgtgccagccttagagaggggcatagtacagtgaggcacagaaatgcaaatcacttgttacagtgtccatcccaaagccaaaaaggcacatagaaagcaaccagctcagatgaaatggggttctgacggagaggtaggtgcaaggtgcaaaagattaaagctcaaattcacttgaattgctgaagggggccagagaggtgagtgtagctgaggcactttgaggggaggcaggagaaaaggttttaatccagactaaaacgtttgggccaaattatacagaaaatagaaaactattgaaggtcactttccccacataagcagggagtgattccagggtgactgaaagagggcacctgaggcaggctgtcattaggaagctttaacattcatctacacataaaggttactacttagatgggtgttacttgtactacatgctaacaagtctctgagaatttcactacccagcatgttggtgtctataaagaaggtgcagtcatatctttacctgctaaagcaaaatgacatctgtttgtctcagatacatatgttattgtttttcaaatgtttatataagcagtaccttcataaaatgcatttttgctttaaagtatttgattgc

SEQ ID NO: 586467 - DNA, 4001 bp, Homo sapiens
aggtgtgtggggttctccaaagaggggtccgtcttagtcatgtgcaagaccacggtgggagccttatagtggcagtgcgtgccacgtccgtagctcccgggggcgcggcaggccttggcccgggcccggccagctgctatcttgcggtagcacaggctctgccaggtctggaaagtcttggagctccacacccagacgccgctggtgatccccaccaccagtgacatgaaaattttgagcatgaagaccgccacggtgggcaccgagccccctggcagcgagcagtccctccggcctccgggccccgcggccgctgcgcatggctgctctgtggcccgaaggcgccagaagtccatgttgaggcgttcgtagacatagcaaacgatgacgcaggtggcgggcaccgtgtagaggatggagaagaccccgatcttgaccatgagcttctccagcttctctgtgttggtgccgcccgtcttcatgatcttgcggatgtggaagagggccacgaagccggtcaggaggaaactactgcccagcaccaggtagccagagaggggcaccagcacgaagcccgtgagcgctgctgcatccgtgctggccacgtagcaaagcccagtcagctcatcacccgccaccttgcgcagggtcaggatgacgatggtcttgagcgcgggcaggccccaggcagccatgtggaaatagctgccgtgggcctcgatggcctcgtggccccatttcttcccggcagccaggaaccaggtgagcgtcaggaccacccaccagagcgagctggccatgccgaagtagtagagcagtaggaagaccagcgtgcagcccgtgttctccaggccctcctggatcacgtagagcgcgcccgcctcctggtcacaggccacgctctgcgctccggccaccgcacggatcaggaaggccagcgagtagacgttgtagcacatggagaggaagatgatggggcgctcggggtactggaagcggtggggctccagcaagaaggtgagcacagtgaaggcggtggagaagaagcacagcgccgaccacacggccatccagaccagcgcgaagtccttgtcgcgccgggaccagaacacctcgacgccgggcccgcagcgcggtgcgcacgagcggctcttctccacgtactggaacttctcggggttctcgcaggtgccactgccgcccgcgcccgggcccaggtctccgggagggcgcgcgggccgcggcgccacgggcagcatgcccaggcccttgtggggctccgcggggccggccgtggcgttctcgggcgcctccatgcacagcgcgtgcgggtcgttgcgcgtgggcagccgggcgcagtcgagcgagtccggccagccgaagttgaactgctccatgatgggcgcgcagcgcaggcgcgcctgctcgcacatgggccggcaggcgggaatgggcgtcgagacctggtcggtgcacatgggcgcgtagagcgagcacaggaagaagcgcaggtggctgtggcagccgtactgcaccagcggcgcgaactccgctagctcggcagccgcctcgccctgcgacgtgtggcccagcaggttgggcatgcgggtcaggttgtagccgatgccgcggcacatggggatctccaccgcctggcacggcgcagccccgcgcccgcgctccgggtcgaagcggccgatctccagtgccgcgccgcccgccgccagcagctgccacagcagcagcgccccccgcagaggcgccacggccatcccgggaggcccgggccgaaggcgggagcgcggccccggctcactcgggctcagcggtcccgcgccccggtgcctgcccgccacgtcgcggggcgcgggccatcgctgagccgcccacgtgtgtccgggcgccctgggcagcgagcgggcagccgcccgagggacaggagccgccgagcccgcctagccgccaccgccgctgccaccggagccgccgctgagccagagccggcgcaacctcccggggccgaggctaccagcccccggggcggggctccgggaggacacgcccagggacacgcctcccactgggctttaaaggcgccgcgtctcccggccacgcggagcacggggtggggccgggcctggtgggtgtccgcccgcttgccctccgcttacactcggtttcttcccttcccttgctgcctgggagaggctgcgggaagtccccgtacccacactctcagactgggtcgcctcattttactctaggagggagacttttttttttttttttttttttttgagacggagttttgctcttgtcgcccaggctggagtgcagtggcgcgatatcggctcactgcaacctccgcctcccgggttccagcgattatcctgcctcagcctcccgagtagctgggattacaggctcctgccaccacgcccctctaattttttgtatttttagtaaagacggggtttcaccattttggccaggctggtctcgaactcctgacctcaggtgattcacctgcctcggcctcccaaagtgctgggattagaggcttgagccaccgcgcccagctggaagactttttatttttatttttaattgttatttctttttagagacagggtctctctgtgtcgcccaggctggagtccagtggaacgaccatagttcactgcagcctccatctcccgggctcaagcgaccttcccgcctcagccaccagagtagctgggattacaggtgggcaccaccactcccggctaattttaaaatgtttttgtagagacagggtctcactatgttacccaggctggtcttgaactcctgggctcaagggatgctcccgcttctgcctcccaaagtgccgggattacaggcgtgctccaccgtgcccggccaggggagaccatttctaaggcttcccacgtgtggaagtctgccttgtacccagtggcagctcaaatacagcgtctgcctctcccctcagtgtatgtgacttggggctcctctctgagcctcagcttgcttttctgtaatgcaggcagataatcctactgttaaaatcaacagttctgccaggcgcagtggctcacccccacccccatcttgccccatcagcctgggcaacatagtgagacctcgtctctaataaagaaaaaaaaatagcttttttttttttgagatggagtttcgctcttgtcgcccaggctcatctcatcgcccaggagtgcaatggtgcgatcttggctcactgcaacctccgcctcccgggttcaagcaattctcctgcctcaaccttccaagtagctgggattacaggcgcccaccatcactcccgggtaatttttgtacttttagtagagacaggggtttcaccatgttggccaggctggtctcgaactcctgacctcaggtgatccatccacctcggcctcccaaagtgttgggattacaggcatgagccacggtgcctggcctgaaaaaaaaaaaaaagaaaaaaaaaaaaagaaaatcaacaacacgtgttgggcacctgaatctgatcgatcacacttcatacttgcccttattgtatcttctcagcaatccaagaatgctacgttatccttatttcccaggtggggaaactgagtctcagagaggaatgacatacccaagggcatagagctactaagtgttccatttgtgattgtctgttccggaacccatacccatttcacaaggccaccgtgctcctctggggagtgtcgccatcaccctctcacctctctctaggctgcccccttgagactcctgggacccgcttagaaactgccatggttcctgggtagctctgtgggtgaaatccaagtgccaccggcaggccacacaaggggcaaggggccctgatctgggactctttagagaaggccatccccctttcacccaactgttcctattctcttggcctggaaacacctggaggactcagaatgtttcacatgagcacttag

SEQ ID NO: 586468 - DNA, 4001 bp, Homo sapiens
aagggctggtcgtagggatggggccgagggctgtcggagctgtagcccaggtagcctgggaagagatggagggggagtgtcctgttcctcagcagcaaatgggtagaagggacagagggcatggaggcttctgagtcctcaggagtcaccagccccaggtgggatggggaagagcaagtacggggcgtctagaaggagttggggcaaagtgggaactcacctcctctggaagggccctcccaagagctggagtgcaaagccaatggtcatgaagactcccagagccacccccaggctccgaggtccccagagccgcagcgtcctggcaggagagagagggcccatgtggcacagggaagggtgaggtgacagagagatggagccagggccaggaagaggggcagagacagctggagacagccgtgcagctgcggaaggcactggttggagatcggggggtcattccccaggcctgctcacagtcttggttgagtctgccccctgagttagcagatttttgcctctgtcagcgtctagaagggaaatgaggggggaagaagggaagtctaaggagagaggcagaggcagccttctctcctgctgcagctgagacctccttcagggaaggggagtggctggggatgttgtctatacccagactctcctaggtggccccacaactactgtctctgctctatcactttcttatctccagttcctcccgctccccacctacagttgtccctgagccttggggatttataagggaaggagagaaaaagccccagctcgtgaatgaaacagccagcaagagagagagagatcagatcaatcagctcattaacacagtcaggtcagaccatggtcgggaacctggtttcctccagagcccctctggctgtcacagatggggataaagagccctatcccaggaccaggaagggaagccatacagtgggaatgaggatcagacaggacacaggtgtatgaacccaggcaggaggaagggaggttggacttccaggagtggcattgcaatgggtaagagccattgggttataaattcccgcgcctcttttttctctgtctcagcacggggcagacccccatgtatgacaggggctgggggagacgtgtggctacttataaagcccagatccctggacttacccaccattccactttccaaccttatcagtgcacccggaggagactgaaagggtggggctggagagggagacagaaagagagagagacacacacacacacacacacacacacagagaaacagagagagagagacagagggacagagagactatgacacaaagataaggagaaaggcgcaaacactaactgcagagttccttctgaagcccgagcttcctaatcaaccgggagtccagccccgccccttcagattacaactcgcgatcagggaccacggcccctccaacaagccccgacagctccctgctccgatgagccaggggtaaccccaagcagagagaagccacacttttactcccggagacctgccctctctggcatcactccccaattccctccctgatcacagcccctggggtctagccgcgtctcccctatccagagttcttcatttccttccatccatctctcccttcccatgattggagatcccagccctctgtcccctccagctttggtgactgcccagttgcccccgctggggttccatgaacccctcatgtctcctcccataaattagagggtccctccactggtcctatccttggtttcacttcccactcaccaggccacaaggggagcagcaagggaaatcgggccgggccctcccgcccatcccagccaccgcccgactcttggctcagctcaactttccccaagaactttctcagcgcccaggctcctccctcctccctttgtgccgccagccccagcagctgctgcagctttgatcgcggttctaggtctctccctcgctgcatcttcccctcttcggcagggcacccagactcctcttggaagacaccacttccgcccccgctttcacacttgggaatcaatcctaccattttctcttggcttgccgcagaacaaaagattcattcaggcggtggaaagaaagaaggaaggaaggagaaagtgatatttgaaagcagacattgtcaaggacgtggcaaggtagccagagactgacactcagagaacaaggcctcccatcctgaaggcagggggcagtggtgtggtcaccttaataatgcttcgtggccgggtgcggtggctcacgcctgtaatcccagcactttgggaggctaaggctggtggatcgcttgaggtcaggagtttgcgatcagcctggccaacatggtgaaaccccgtctctactaaaaatacaaaaattagctgactgtggtggcaggcgcctgtaatcccagctactcaggaggctgaggcaggagaatcatttgaactggggaggcggaggttgcagtgaactgagatcgcgccattgcactccagcctcgcgacaacagcgagactctatctcaaaaaaaaaaaaaaaaaagcctcatgttcaaagagcattttgcaggtgacaaggtgctttttcacacagattctatttggtccccacaattctccctgttgtacaaacgaagatgctcagaggcccagagggtgggcaatttggagatcagaggttattgtctaggcccgcctcctgggggacaggtgccaagggaagtgaaaagccggcagaaaatgagccagtcacagaggctctgagacctctgctaggagccagggctcaggcactgatggtgacagcacagaagccacacatggggtccaatacattaccatttatttgcagaataaacatggactcaaacactgaaacatggagtttgtgaaggatgtgggtggcagaggtcacgagatgagcacccccccaccttgttttttttaaaatttggtttaagaaattgatactgaaaaaactcaacagaacccaggcccatgaagtctcacatcctactcaagcaccctcagtcccctgccctgcatccagctggtccatttctgagaccagatgcccccacccctccccacttccaacttccttcaaaccccttccccagctgcaactctaaactcctcattttctctgttggggctgatcaccagccccagccttagagggctagagactataccttctaaggaaaccacactccctcctaaataaatacccccaggcccccctcccattaccaaatgaaaaaataaatattgtgaacacccacccacctctgatgaaaatctcctggatttggggccccagccattcacctgcaaagtcccttctctaccctctctgcagcccccttcgactcctccccaggcccagctgaggggggaggaggggaaagggccatgaacccttctgatgctagggcacccctcccccgttatcgaggtccaagcagggccagggctgagagggagagaatgaggatggtttgggtgtgaaaaccaatagatgcccccccactcctgctccggccctggttgtagcgggcactgccacctcctcctttgcccccagaaccatcccttctaggagggtatggaggccgaggaggccgggctgggggagccacagccccagccatccagtcatctgcatactgctgtccccctccagagccgctggcatcctcatctgcaaggaagaagagggacagagcaggatgggagggagaagcagagggagacagagggaggaaaagaaattgagataaaaacagaaagagagaggaaagggagggagacacaggtggatgccgggttggggaagggagaaagaccatgagtgacaggaaggcagggagagaaggaaggagagagatccgacagcagacatggggggagagatcatgatgggagacagtgagacagagagaaaaaaaaacaaaacaggcagatgggga

SEQ ID NO: 586469 - DNA, 4001 bp, Homo sapiens
gaagtcagcgagaccaagaatccactggaaggaaccaattccggacacatttacgcagcagccacgtcagactgggacacttcctgcttacagaggactataaaaccccttcctcacttggggctgatgctattataaaacccattcctcacttggggctgatgccatttaggcataaacccgtctgcacccaggcgcttattaaaacagcatgttgctccacaccgcctcatgtcgtgggggttgttggtgcgtcatcggggttcaaaccaatacaagagccttgcaggttgtttgtagcactaacaaaggataaatgcttgagaagatggataccctgcttatcctgatgtgattatgcattctatgccatatcaaatatctcatgtacctataaatacatatgcctactatgtacccacaaaaattaaaaataaatttttttgagatggagtctcgctctgtcacccaggatggagtgcagtggcgtgatctcggctcactgcaagctctgcctcctcgattcacgccattctcctgcctcagcctcccaagtagctgggattacaggcgcctgccaccacgcccggcttattttttgtatttttagtagagacgggatttcaccgtgttagccaggatggtcttgatctcctgacctcgtgatccgctcgccttggccttccaaagtgctgggattacaggcgtgagccaccgcacccggctaataaaaaaatttttaaagagatttattctgagcgaaatgagtgtctatggcccatgacactgccctcaagagatcctgagagcatgtacccaaggtggtgggggcacagcctagttttatacattgtaggggaacatgagtcttcaatcaaatacaggtatagactagttcgggcaggaaaggtgggacaactcaaagtggcggcttccaggtcatgggtaagatgagagacaaacggctacattcttttgagcctctgctctgccttttactgaacacacaatttacgccatggggcaggcagaggaatagccacttgtgccttagtctggctcagtgaatctgcatttttacataaatacagggcagaggaagccgtcagacatgcatctgtctcaggtgagcagaaggatgacttgagttctgtccctgttcctcacctgcgaagacaagctgtcaatttacactgccagggtgcaattccacacaactgtttcagggtaaagatgtggaggtccacagcgaatttcctcctggccaaagggtgagggagctgtgtggctttttatctttgcagctgtcttaggaacaaaacttaggggcaggtttgcctgacgcagctcccagcttgactttggcttagtgatttggggtcccgagattaaatttccttccacactattctccctagttttgtgtatgtgtgaactattctatttctgggcacttttaattttaaaaagtggacaatactgatctggacttcattttaggaaatgctgggggaggctgcaggatcaggtgtgcctccgtcctaaatacgcgaaaacgaggccagcgccctggtcctcgcccccacgcccgcgaacaagcctcaggagacgctgggggaggcgcgggggcagcggcgtctcccggagacacgagcctcgcccagggggcgtgcgggagcccaggacccgcggggagccaggcgctgccccgccgccgcccccagcctgcccaggccccgcgcgccgccgccgccgcagctctcgaggtgctgagggacgccgggaggccgccgcctagagggtactcaccgccttgcccgcagcccaggatcgccgccttctgggactcgggctgcggcatcttctctcccgccacagccccagtccgacccgcaggagcggcgcgggctgaactgccccggggcccagcagccaggcgtcgcgcaggcgctgggcgcagtggcggccgcgcctcctcaggcccagggccctcgcccagtccccgagccgctgcctccgcccagcgccgcgcgtccgccggcgccgcgtgacaggcggccccgcccccgcgccgcggtgacgaaacctctcgctgccctgacgtcaccggccgccgcgcgctgagtcctccctagcgttcgcgcagaggcgccgcgcgtggcctggctcctgttgtctgtcacccgcggtctcaaaagaccccattaatgacaaatgccctgcctgtggccccggctactccggaggctgaggcgggagcagcgcttgagcccgggagctctgcgctgtatgcgctgtgcccattgcgcggcgacacgcatctgtgttccgcatcggtgtggtgacctcccgggagcagggaccaccaggttccccaaggagtggggaactggcccagctcggaaaccgggcagggcaaaactcctgtgctgatcggtagcgggatcgcgcctgtgaatagccactgccctccagcctgggcaatacagcgagaccccataagtgaaaaaaaaaaaaaaagacaaatgcccttaaacatattaaaagaagttaaacgccacttgtgatagaagaaaatgtagattaaggtgtaaagagagaagtggtgaaaaaaacactcataccttggtgataatagtgcaatgtatacaaataccataaaaggggaattggcaatttttaagaaaaatggtgtgggcattcatctttggccaataatgccaagttatattgaagaatatcttaatactaatcttctttgcatttctgaaataaatcccacttggttaagaatatttttgaacttttttaaagaactcattgcttcacaattaaagtctgatggggtacacgcgtagcaatggaggaacttctacagctactataaattaaagagcaccacctgaaccaaagtagtggccttcttgagctgaactgagctaaccacattccccagcccctcttccacagataccccatggggttgtcagggtgtaggggatgccatgttgtaccacccaggtttccccttaaggactgaggactcatttctccagttgttgggtgtgtaggccgctgatggcccccagctgagtcttgtggccacttccctcagccaaagagaactgctgctgggtgccaagttgaatgcttttgactccttctaccatgcttgtgtcttgattggagattgacagatatttcaggtactggtttctcttgcaagggcagtgcagacagcacacaggtatctttgcccagtttccttcaatggttgcagctcatgtaaaatatacatagtataatatcaaataagcgtcattggggatcaatcctgctgggatccccctcagaaactattcacagcagtggcaggcaaactagggcaaagtctactaggtatatttaaaagtgtattacaagtttatttaaatacataaatatgtttccagaaagtaatccttccaactacctaaactagtaatgaaaaatgttaaatatcaccttaaatatgtataaggggatactaagttcttgtatttaaaccttattattttagtatatactcaagcaaaagagtttgaagaccagacctttagggcctcactactcaaatggtggtccagcaacaagcgacaccaacgtcacctggagtgtgttagaaatggggagtcttgtgctccacctacttaattaaaatctgcatttttaccaagatttccaggtgatttatacacaaattaacatttgaaatcatgctctaggattaatcagggcatgtaaatttccattgtttcatcttctcctgacccttgatagtatcagatatttaaatatttgccaacctgatgagtatgagatgcatctgtttattactttaaatactattctacctgattaatgtgcaataattacttaaccattattctcgtaattgaggatttgggttagctccaatttttcactatcatacagaatgacactaaaatgctcttttcagc

SEQ ID NO: 586470 - DNA, 4001 bp, Homo sapiens
caggcaccaccatgttccccctcatccagatgctggtgcccaaggtggaagatggttgtggcacactcagaccagccatgggctaagcacagagtggtgtgtgtgtgcagaatctaggtcggtagtgccagccgagtgcagcctgctgcgtccagtggggagagcaagcccagaggtgagcctagagccaagtgaggcccaaggacgggtgctgccagccgggaaatgtccagctggcaaagtgacattgaaagaatcctgtctcaataggattattactgaaaaataaattattctctagaaagattctaatacatcaggaaaacttggggggaattctctttagacgtgaacacttatgaacatatccccaacctccttaattttcttattttactaatatgagttcttatattatgttttctctgtgacaagcacctcacctcccaacccaccccctatactcccacaaaacacagaaaacccctcctatcaagagatcgatgtaagaggtgtgtgattggcctttggactttgtgtcttcagaagaaaaccatgttcagttattttcttcactaaaagatgcagaattcaatgctagaaaagcacagaatttgtaaaatatatttcaacgaggattcatatgtacagcaaataaaattttaagtgcattaaagagacttagcagatgatcaaaagaatcctgtagagaaaagaatgcagctaatagtcaccaacatgcccccaccaacacgccaaaaccctagcctaaatctgcatttacagtcattgagtttctttctttttttttttcttttcttttttttttttgagacagggtctcgctctgctgcccaggttggggtgcagtggcccaattacagctcactgcagccttgacttcccaggctcaaatgatcctcctctttcagcctcccaagtagctggtactacaggctggtgagtgccaccacgcctgttttttttttttttttttaaatagagatgaggtcttgctatgttgcccaggctggtctcaaactcctgagctcaagtgatccttctgccttggcccccaaaagtgctgggattacaggcatgagctaccatgcctggccaagtttttaaaaaaatacgagtctattgaatcaggaaaacatgaccatgctttagataatatcacaactaattcttctgtcaataatcaacactttttttcctttttttttttttttttctcgagacagagtctcactctttcatccaagctgatcttgaactcctggactcacatggtcctgccaccttagcctcccaggagctggaattacagatgccagctgccgtgcccagtttataatcagcatttttaacccctagctttcctaggaccatcttaatactgatctccatataagatctaggactttatgacactgctaagggcctttatttccctatttttttcaaataagtaatacagtcactgtataaacattaccagcataaagacacatgtaatgaaaagtttccctatttttcatgaactaaagccattacaatgcccagtccacgtttagggtggtgtaaccagctaggaggctactccttctttaaaaaataaaataaatcttcttaaacctaatccccagagctagcacctccttcaagacgcagtgatttgatgtactgcttccgctgattcaaagtgaaagacgtttccccccatctttgttcccacttctagcacatggggctcacttcacctacccttgagataattgcattggctgctttgtaactgatgaattttccaagcagagtcacagctgaatgaggcaggggtctgtgccgaatgaactgagagatgtaaaattttttttagctagcaggctttatggtggctgggttccaagcagatacctggttgtgctgggttgcggggccacacagtagtactcaaagggcagtacagtccccctcacaaagcctgatgacatcacacagggcgtcacagccccacaggggcccctgcctgtaagctccaaccagcaggtggaatccaggagttccaaggtcctaagggtccttacccctcagctgagaaaatagggaaagcctcatattaggtgaggctagaatccagggtgactctcttctctaggcaaggcctaatttttagctttttatatttatttatttatttatttatttatttatttatttatttatttatttatttttgagatggagtctcgctctgtcccccaggatggagtgcagtggtgcaatctctgcaatctctgcgatctccgctcactgcaagctccgcctcccgggttcacgccattctcctgtctcagcctccggagtagctgggactacaggcgcccaccaccacgcccggctaattttttgtatttttaatagagatggggtttcaccgtgttagccaggatggtctccatctccggacctcgtgatcggcccgactcggcctcccaaagtgctgggattacaggcgtgagccaccgcgcccggctaatttttagcatttttgaaataaacttaagaaaaagaacaagctttcagaaaacatgaagaaacttaaagatgagccaaagggttatttgattgccttttaattctttactctacgttactcaacatttagatgtcagtacacaagttcagccaaatgcttgtgaaatttcttctgaacgcatcccaggagacttgaccctccccgcttcaggatgctgactctgttttgcctgaaaccagacaagctctgcttcagggtctgtgagtggaagggggtgggtgggaacctctcgcaacctctcctgggacagacacaatgggcaatcgtgacctcctggggtagatactgaaactgtgacaagtgataacaaaactggcagaaatcagttggacccaatatggccaactggagtttctgcagaaagagcttgctgatatcacagcctgaatttccacgcatgtttcgtattaactgccccggaatttgatttgcacacagcacccatgaggaagcatgaagagataactgcgcatgtctgaggacttgccagacctcctctttccttccaccgatctcctgctaatcccggaacccaccctctaacccttttctaataaaattatttccttaaaggcagcacagcgagacagatttgagctggactcctgtctccgtgttggtcaatttgcaatgaaaagcttttcttttctctgaaacccagtgtcttagtatttattggcttctagcgcacgggtcagtgacctcttttgctcggtaacaacataatgggctataatgacctcctggggcagacggacgggcattaatgacgtccaagccaaactcatgagtctcctttctgcaggctcgatgggaaggtccttcttgcccattaataatataaaagtaagcttttattcatattagcctcaaactggaaaaaacccaaatgtccatctgtagtagaatggacccactgtggcatattcatataatgcaatgcaaaccagcagtgaaaaagaccagactgcagctgcatacaacatggatgcatctcgcagacatggcgtgagaccgaagcagctcatgggagagcgcgattctatttctgtgaagtttctgcagaacgagggcttgctgaggtcacaacccaaattcctacagcatgtggaagggagcaagaaaaggcaaagctactctaaagtgatagaacagtttatctatctatcagtaacaagtagctgtgtttgggagccagaacaggattgctggttactgagagggagcaagagagagccttttggagtgctggaatgttctgggtcttcttgatctgggggagtgaaggcttcacggagcctacttgtacaaacgtgcattgggctggtcactgaaagtgtatatacttcactgtatgtatgtcgtatcctcaaaacacgagggaaaaaaagtgagt

SEQ ID NO: 586471 - DNA, 4001 bp, Homo sapiens
ctaccgatggatgattttcactgcagttccaggctaacgtggcagagggaggggtttgggtgtggtggtttttttttttctccaaattagttgtatgcttccttctaaagggaaggatattttttaaaatggcaagttaagaaaagacaaaggaaccacacctaattttatttgtggagtggaaggtgggtggagggagacagaatatgcaatcggtgttctgacaccaatcatgaagaaaaaagttaagcccgtggtgatatttcaaaatgaaaggctatttattaaaatcggtcaggctcaaaccagcgaagaggacagatggcaaagtggctgaatttgcggcagctatgccccaatgaattatttccgagatagggttccaccctctgtagctaaggcaaattattgcatcaggcgcccatgcaggagaaacccgtttggtgtttactactaagtcatgatctccggggtcctactgcaagctctggctctccctaattgcatatgggaatcatctgaaataatcttttccttgatatctctaaattctaaactctatggcagtgccctaggaaaaggaggtctatattaaatcaccaagtccttcagcccatgaaaccttccctcaccttcgggaaaatcaaatgtcaaaatattccatactaaggatggctgacttcactccgcaacacttagtttcccaggtttacgatctgagggctcactggttccaaacggccttttcagaagccagaaaagatgacaagagcaaaggatgatgagttcacagcattaatagaaaagttcgacacctccccacatccacatttcaattctattttctcagccaatcattccgctaaactaagcactgaatgaaggaagatgttaagggggaaacactatcaaagcatcctaaagattaaagggcctggccgtaagacgaaagaaccggcagtttttcggctcatcattgaccactgaaagaattaggaggctttccacccagggtgcacaaagagtacagcagagcctggaaaactgaagttaaggttattcagttaggaggcgaggacaaccaaagggtcacagatcccagccccactggaaatagaggagacgcgggctgtgacagaatggggaagggagaacggagccggagagggacgcaggaagtcggaggggttccagggagtcatccaaaaagagaggaggacggaggtccgcgggagaggaggtggctgacgcacgggggacttgggaccaaagtgggggaggcgaagaagacgccagaggatgaagggaaagaaaggggtaaccgaagaggaggacagttccccggggaggagggaaggatgaccagaagaaggccctgggaggagagccggaggcttagcggagagcgcaaaacaccggtacctgctggcgcactgctagcctcagaggtgccagcacctcctcagcccccgcgccgtccatgctgctccgggaggcggcggcgggcaaggagatcggggggcaggaggccgcgctgagggaccggcggagcaggagcgagggtcgggctaagagccggggcggcagcagcagcagcagagcggcgcgagcacctctaagcagcactggacgcggagagggcatgagcctgcggccctgggctgtccagagagggtggcgacggaagcggcgcgcgccgcccggctcggagcatgatgaaatcgccgcgtaaacgacgcggcgcgcgtgctgccgcacattcaccaccgcgtgacgcggcgccgggtcgccgccgcagattcgacacaaaacccggaaggaccccgccgaaggttttctccggttcgggagagaggtaggtagggttgcgagcgaacagatttgcacagaagtgcgtcaagccaccccagcagggtggatgttcagggacacagctctgagcgagacctgcaggccgagacacacgagaaccttcaaagcataggtttttatacgagtgacaccccggccgacctacttgaacggacacttctgtttctgttctttcgcgccctgcgccttaaaagggtcgcaaaacatcaaatcagatagggatcttagacttctgttgctcaagtgcagatgttccccagataaggaaataggcccagagaggttaatgatttgcccagagtcacacattcttggtccgccgatgtcaagacaaaagctggcgaacgggggaggaggagtgaggggatagagtcaccccaggctttctggagaaggtaaattccaatctgcccttgcggggcgagcaggatttgaaccggcagagatgaggaaaggcaagaggtgcctgataagtctttctgcttggcatagcctcagtctatctgcctcctgtggttaggccccagctgaccaaccacccagagatggcttccccccgccccacacacccagttcctcctgcccaaagggtggagggcctagaaaagctgggttccccctccaggaaaggaagagaaaaatgatgtgttggttataaaaacagcattgcgcacacctgcaaaaatggctaaaatgaaaatgatggaaaatgccaagtgaccctctgagactcccctacactgctcaggggagtgttaactggtgcagccagccacttgggagctcttcggcagtatgcacgtacgtctccctgtgacccacaatcccaccccaggagtgtgcaggagtagacgggctcagtataatgaagtctcctttcctaatggtgtgaaagtccatgttatttctcttcccgttccagtgtgcagttctggagaagtacttacaattcaacatgagcagggtgggttgcttaagaaccttctgcaatattgaacaattatatttttaaacacttttatttcaagatttgatattaattataatttatttggcttttattttactaggcaattttgaatttattttaatatctttaaatgtgaaaaatcattttaagttttacttttatttttatttagatttttattaaaatgttgaaattctatatcctttgaataaaactattttatttctaaaaaattccttagatcaataatgtctcatccattttcatgttaggacagtcctgaaaggactccaaatccgttcttccctcctccccgaccaattcatcctccccactgctgcttcagtcattctttctttcttttttctttttctttttttttccagacggagtctcgctctttcacccaggctggagtgcagtggcgtgatcttggctcactgcaacctccgcctcccgggttcaggcgattctcctgcctcagcctcctgagtagctgggattacaggcgtgcgccaccacacccagctaatttttttatttttagtagagacgaggtttcaccatgttggtcatgctggtctcgaactcctgacctcgtgatccgcccgcctcagccttccaaagtgctgggattacaggtgtgagccactgcactcggcccagtcattatttctgaaaggcaaatctgactgtgtcccttctcttctcaggacacttcagtaggctcttcatggcccttggaagaatttcccaaacagttttcttttgaaaactgtgtctgcacaataatgataatagtttatgtttgttgagcactcactatgtaccagttagttctaatttatctcatggaatttattcaccaatttagtgagataggttctatagttattcagaattttcacatgtgggattcaagggactgagatatcaaacagcttgtccatggtcacacaactaagtgagtgttgggccagaatgtgagctgggggcagaggcagattttctacatagctaatgaagcttcaagtgagtttagcccctttctctgttgggctctttaagtgccctgcaagaggccctagtattgtgtatgtatgatcatatatttttcttgctttattaaagttcatttctttgagggaaataaattttg

SEQ ID NO: 586472 - DNA, 4001 bp, Homo sapiens
atgctttcaactacttccagcacaggtctttcaacaatctcttttcttagagcagaagaggagataaggcttagcaaaatttttgactcatattcatcaaatacatcatcatcataagtcagtaagatacattttctggggctttaataacaaataaatatgcaaatgatgagttctagtgttaatatttacttagatttttaaagaatgaaaaaaaaaagttttcttagtgtacctggccatatcaagaaccataatctctcctcttcctttccatagagaaccccaaaaaatgggctcaaggttgatgtttcttttaaacccatattttatattttccaggggaaaaaataaaagctaaaaaacaaaaaggaaagagtattattaactttataaacagtgagcctcctgcaacagagctcattcccttttggggaatctggaccattccccagaatactaaggaagggctaccaagggcagagtccaagttcaatggtgagaaatgaaggcagtggcaggatacacacaacgtcattacagtaaaaggcactgtccacaaatatcttacatttttcaatttaaatatatgtcttctcccttttcctttggtggagactttcttttcagcagccggagcagatttgtatttagtgtttctgagccgagcagacctcctgtgaatttcctgcttactctgttacacaaacaaattaaagaacaaaaagagaaagaagtaaaaagtgcataaaggttgcagtacaatcatcttacaaggatcccagagtatgtactttataagagcatttaacaattaagattgcccttttgcttttcaagagaagtaattacagcaactaggctaagtaaaaccggaagttcagcacccggaatctcggagctcgctggacaggcgtctccagagcctccaaaaggtgtgagctgcttgtaatagggcaggaggcgggagtaggagtcagtcttgaccaagacaaacactattcatttgttgtgtctacaatagagaaaaacacttaacaactttactccctaaggccagagaacgtagtaggttatggcgccccctgcaacggaatacttaagctgccatttacaataatgacataataatcttacttcataacctgatatgacaaaacctttaacaaggaatgaggtccagcgcctgcatttgtggcatgacactgtatacgactgtgtagacatgtgtatattgagattttcttaagggctttacatcttggttcttattgctttgaatttcttacaataacaggtgcttcggaatgggccaaacgaaagatctcagtaggaggtggggaggggcgttccagccagcaggagcacggcgatcggggaagcccgcgcccgcccgctcccagccagcccgtccccgcccgcctagcacctggtcggcctccgccggcgggaggggccggaggagctcacctgcttgccgcccccgcccccgttgctctgcggaggggtggcggaggtgctggcgaaggtcgccgcgccgaagccgccgccgccgctgcccccagtccctccagccgcccccgagcctgcgcccccgctgcccgcgccgccccggccagtgcaatgatggcagaggatctccccctgcgctcccttcttccacatggaggacgacgtggtcttgcatacgctgcaggtgggcttcaggcccagcggcatggtggccggctcgggcggcccccgcgggcgcagagacacgggaatggcggacggtagcccggccgccccctggtcggcccgccactcccggcgataggaagagcggtgagagcgtcggcacggagctgccggtgaaaggaccaggccgctggcgctgccccgtggaggcgggaagcgggttccgccggctccgcaggcggaggccaggattccctggcccgaggcactgggaagcaggactgggaaagggatctggccggggtgggggggacgcggagacttccggcggtgagctggccccagggccccgcagcccgaccgcctgaccggaagtgcagcacccggaattactgggagcttgctgcagttccgcttgctgtcgcctaggggcagggttctcaaactttttggtctcaggcctagaatttgccgggtaaaatacaggacgcccaattaaatgtgactttcaggtaaacgacgaacaatttttttagcgtgagtgtatcccatgcaataatggtttatccgagaggcgtttaactgggggtcctgtatttttatgtgctaaatctggcaatccaggtctggcgtggtggctcacgcctgcaatcccagcactttgggagaccaaggccggcggattacttgagctcaggagttcgagatcagcctggccaacgtggtgaaaccccttctctaataaatatacaaaaattagccgggctcagtggcgggctctggggtaatcccagctaccctggaggctgcggcagaagaatctcttgagcgcgggaggtggaggctgcagtgagccaagatcgcgccattgcactccagcctgggggatagagtgagactccgtctcaaaaaaaaaaaaaaaatctggcaatcttacttaggaaccctttacactcttaaaaattatactttggacatcgccctacacctcccccatgtctatacttttgtttagttgaattcagagcatgccgtttatggacatcgacaaagggttcagaaaatgccatccactgacatctatgtattagaaattgaaattgagacattttacagcctaagatgtcaagcgcacattcttcagccgttggataatatcgttgcaaatcctgtggactctgaagagtataccgattagagaatgcggagaaaatcgaatagctggctgttattcaattcaaaactgttggaaaacagttttggctctgaggacccagcagttgacaaacagcaggcctgggacaagagcagtatgagaagtcagatcgcctcttttaatgtcactagtcagtacaggcctcgccagacaagtctctcctcagcctcacttggaagaacatgccctctcttcatgatcctgggtttcctagacttagtatccttggaaaggtcttgatgaatatattgtggtgggaagcagtggggagaaacaaacgcctattatgtcacaaaaccacatttagtgcttataacaaccttggaatgagatattatcagattttactgttaattggtgatcaacggaggcacttctatgtggactggctgtcattatagctgctgcccttggcaccaatttcgaggagggctttggaacagccctctggggtgtgggttgtggctcagtcacctcccctctaaatctcagtttccttaacagtaaaaataagtttccaggactgttatggggattagggccaactgtaaaagtggctgaggagactaggtaaagagtgttgtctcactttagaacaatgctgaaggtgtttagagcctgccatcctaaaatatgccactttggcatactgattcttctgagccagaggcaatggagcaaaaacagatgcagggaaggctgtctgaccaccctctttctgtttgaagcggaacataaaagttcccttgtgaaaggtgccctttctgtaccaggaagaggagaatattattgccagaggcagagttgccactgagaagaatctacaaacaaaaccttacaaaaatttgtaacccatattttccattaactttctacatacggttcttcgtcactttcccacaatttgccagccttagcccaagcccctttgtcttgtcacatccctgcaatttattattttttgtttaaaaggacatataagctttcgggcctagtaacttctatgggtctttatttttcttacaaagcctcctgtgcatgtacaaaaatattaaaacttttatgccttttccagtaaatctgtcttatgttagtgtaattcccatgc

SEQ ID NO: 586473 - DNA, 4001 bp, Homo sapiens
ctcatttgaatggtggccgagaaatcagccagggggctgcccagggctgagggccaagacttggaaaaacaaggctgttctgttacctccaagccttggaacgtccagcccggctagggagtggggggcagagggcaggcagaagcaggatctgaaggtgtcaacagccagagggggctttgtgtgaggggtgggggcgcggttcagaatccgagctgttggcttttgttttcaaatgacctgtttaatcattaccctttgcaatcaacggggagcacaggctccgtggcagaggcttggcgactatttcaaatctccatcccctactgagcagccggagaagaaagtaaacaagatgccaccggcaggtctggctccatctcgcaaacaatagccggactgagcacccggctcagacacacacatcaaagtgagatttccaagccagaacttttcacaggcagataacaggctgggatggaattatttccctgtgtcccttgagctcagtgccaaagggggcagcctacaggggctgtcattttcacgctaaccttgacccgaaacgtattcattcattttgcagtgagggagagccaccaccgccccaaaccgcgaaaaaccaaccagtaacaactttatcattcctttttaacagtcacaatcgtgggcaaatgagacttaagttacagcagctagctggcactcacactcccctcggctcagggtccttaaacaacaacaacaaaaccctaatgcaagcacccaccggggctcacaatgtcaaacccttacctggcatagggaaaatccaagtgagagagagagtgagtgtctgtgtgtgtgtgtgtgtgattccatctgttaccttccaaggccttcaactatttttcccccagcagcatccaagcccagcctcaaggcagatgcataaacatgcctgctcctccccttctacggttgggcaaaacatccccccaccccctttccaggaccccaaggagaaagaatcacgtcctctgtagcccctccctggccctcgcctaccccccgtttcccccccaattccaggccgtccgcagcaagcctcgtaggcaccttgagataaacacccactaatgattttatgattttctgctctgggtaaccgcgctcagcggaatccctccccacgccgtggcgacgggggccggcccaaccgagggatgggggtatgggggcgtttgttttttccacggcctcgtccccacacctgtttttcattcattcattcgttcgttccttcatccattcacggatccgtcactgcagccgccccagccccccggatttcgggaagggggctgcgatgggggagggggtgggagatgggggggacgacagaggtggggggtggcgcaccgaggggtggagggttgcgaggggtccgggagccaggaccctgcggctccggctttgtcagacgcgagcgaagcggcggcgggggcggggcgggggcgctcccggggcccgaagttgtcttccgaggcgcggcggcgaggacagcggcccggggtgcgccccctttgtctgtccccggcaggcgccgcgtccccgcgcgcttacctggtcttggagaacaggaaggcaagtttgatcaggcccgtaggtgaacagcgggatactctccttggcgacgctggcaacttgcagccggtgctccaggatgtggagttccatcgtccgcccgcgccccgtccgcggcagctcatccgctgggggacgagccgcggcccccgccccctccgcgccctgccggcaccgacagccggcccggggacccgggagctcggcgccaggcgcggggggcggcggcggccggaccgggccggacaaaagggaggaggcccgccaagttgcgagggggagccacgggtcgagggaggcagcgccggcggagcagcggcgcgcgggtgccggcgcggggagcagctggtgttcgctgtaacaaacaacttgccactcaaacgccggtccccactgcgcatgcgcggtccgcgcgcggcctgccaggacttgtagtccgcctgcggggctctcccggtgctgctgctgctgctgccgccgccgggcggccggagctaccggcagcccgatgcacgggaaatgcaggagagcgggcaccctcaggaccacggggaaggccgaggggaggcacggggcgggtggagccagcctgagcctaggcgcgccctctggcacccactcaggctcggtactaggcgcttggagtgtaaagcgagcaaaccagacgactccggtgctggagaaggcccgagtctgggagcgccaagatgtagggcaatcggtcatgagagtgcagagaagccaaaccaaaaagcttgctggggacccggagggaggggattgacaggtcaaagggggtgacctggggggagggggacactcaggctgggttttgaaggatgaatgggagttcgtagcaagggagtgagggcgcgcggttgaaggacagaagccttcgggaggctgaggcaggtggatcgcctgatgtcagaaatttgagaccagcctggtcaacgtggtgaaaccctgcctctactaaaaatacaaaagttagcagggcatgctggtgagtgactgtaatctcagctactcaggaggctgaggcaggagaatcgcttgaacctgggaggcggaggttgcagtgagctgagattgcaccactgactccagcctaggcaatagagtgagagttcatctcgaagaaacaaaacaaacacagtacaaaccaaaaaacaaaacccagctgggtgcagtggctcacgcctatcatcccagcatgttgagaggcttgagttgggcagatcacttgaggtcaagagttcaagactaacctggtcaacatggtgagatcccgtctctactaaaattacaaaaaaattagctgggaacggtcgcatgtgcctgtaatcccagctactagggaggctgaggcaggagaatcacctcaacctgggagatggcagttgcagtaagccaagatggcgacactgcactccagcctgggcgacagagtgagtgagactatgtctcaaagaaacaaaaaaaaaaaagaaagaaaaatctccaagtatgtttggaagaggttgaccaactgccctgattttcctgggaccaaggagaatttcaagatgtaagactttcattttcgaaaccaggacactctccaggaagacaagttggtcacaggactttgaaacgatttacttatgtaaatctatgaactctaaatacagatcgagtattgtgaatgaaaattgagcatccaaactgagatgtgctatcgtgtaaaatgaaccctggattgcaaagattattatgaaaaaactttattttattaataatttaaaaatattgattatatgttgaaacacttttttttttttctgagatggagtctcactgtgtcacccaggctggagtacagtggcgcaatcttggctcactgcaacctctgcctcctgtgttcaagtgattctcctgcctcagcctcctgagtagctgagattacaggcatgcgctaccacgcccagctaatttttttatagcagagacagggtttcactgtgttggccaggctagtctggaacccctgacctcaagtgatctgcccgcctcggcctccaaagtgttgggattacaggcatgagcccccacaccggccttttttttttttttttgaaatggagtcttgctccctcgcccaggctggagtgcagcagcacgatcttggctcattgcaacctctgcctcccggattcaagcgattctcctgcctcagcctcctgagtacaagtgcgcatcatcatgcccagctaatttttgtatttttggtagagacggggtttcaccatgttgaccaggcttgtctcgaactcctgacctcaggtgatctgcctgcctcagcctcacagagtgctgggattacagatgtgaac

SEQ ID NO: 586474 - DNA, 4001 bp, Homo sapiens
gaccctgccctttgctgcctttctaagaagcccccaaatgcccccgcttccagcacccaggccctgtgcacagccgcagcctgagtcatcattctcatttgaatggtggccgagaaatcagccagggggctgcccagggctgagggccaaggctaggaaaaacaaggctgttctgttacctccaagctttggaacgtcaagcccggctagggagtggggggcagagggcaggcagaagcaggatctgaaggtgtcaacagccagagggggctttgtgtgaggggtgggggcgcggttcagaatccgagctgttggcttttgttttcaaatgacctgtttaatcattaccctttgcaatcaacggggagcacaggctccgtggcagaggcttggcgactatttcaaatctccatcccctactgagcagccggagaagaaagtaaacaagatgccaccggcaggtctggctccatctcgcaaacaatagccggactgagcacccggctcagacacacacatcaaagtgagatttccaagcaagaacttttcacaggcagataacaggctggaattatttccctgtgtccctagagctcagtgccaaagggggcagcctaagggggctgtcattttcacgctaaccttgacccgaaaagtattcattcattttgcagtgagggagagccaccaccgccccaaaccgcgaaaaaccaaccagtaacaactttatcattcctttttaacagtcacaatggtgggcaaatgagacttaagttacagcagctagctggcactcacactcccctcggctcaggctccttaaacaacaacaacaaaaccctaatgcaagcacccaccggggctcacaatgtcaaacccttacctggcatagggaaaatccaagtgagagagagagagagagagagagagagagagtgtgtgtgtgtgtgtgtgtgtgtgtgtgtgtgattccctcttttaccttccaaggccttcaactatttttccccctgcagcatccaagcccagcctcaaggcagatgcataaacatgcctgctcctccccttctacggttgggcaaaacacccccccaccccctttccaggaccccaaggagaaagaatcacgtcctctgcagcccctccctggccctcgcccaccccccgtttcccccccgcaattccaggccgtccgcagcaagcctcgtaggcaccttgagataaacacccactaatgattttatgattttctgctctgggtaaccgcgctcagcggaatccctccccccgccgtggcgacggggccggcccaaccgagggatggggggatgggggcgtttgttttttccacggcctcgtccccacacctgtttttcattcattcattcgttcgttccttcatccattcacggatccgtcactgcagccgccccagccccccggatttcggggagggggctgcgatgggggagggggtgggagatgggggggacgacagaggtggggggtggcgcaccggggggtggaaggttgcgaggggtccgggagccaggaccctgcggctccggctttgtcagacgcgagcgaagcggcggcgggggcggggcgggggcgctcccggggcccgaagttgttttccgaggcgcggcggcgaggacagcggcccggggtgcgccccctttgtctgtccccggccggcgccgcgtccccgcgcgcttacctggtcttggaggacaggaaggcaagtttgatcaggccgtaggtgaacagcgggatactctccttggcgacgctggcaacttgcagccggtgctccaggatgtggagttccatcgtccgcccgcgccccgtccgcggcggctcatccgcggggggacgagccgcggcccccgccccctccgcgccctgccggcaccgacagccggcccggagacccgggagctcggcgccgggcgcggggggcggcggcggccgggccgggccggacaaaagggaggaggcccgccaagttgcaagggggagccgcggggcgagggaggcagcgccggcggagcagcagccgaggggccgagcggcggagcagcggcgcgcggcgcccggcgcggggagcagctggtgttcgctgtaacaaacaacttgccactcaaacgccggtccccgctgcgcatgcgcggcccgcgcgcggcctgccgggacttgtagtccgcctgggggggggctcccccggtgctgttgctgctgttgctgccgcgggggctgggcggccggagctaccggcagcccggtgcacgggaaatgcaggagcgcgggcaccctcaggactaaggggaaggccgaggggaggcacggggcgggtggagccagcctgagcctaggcgcgccctctggcacccagtcaggctcggtactaggtgcttggagtgtaaagcgagcaaaccagacgactccggtgctggagaaggcccgagtctgggagcgccaagatgtagggcaatcggtcatgagagtgcagagaagccaaaccgaaaagcttgctggggacccggagggaggggattgacaggtcaaagggggtgacccgggggaggggacactcaggctgggttttgaaggatgaatgggagttcgtagcaagagagtgagggcgcgcggatggaggacagaggccttccaggctgcaggaacagcgtgtcctagggcacagaagcgtgaaagcccccacggtgctgtgtttggctttgttgcagcggaaaatgtgagggaggagagaaaagagataaggcaggcatagtcaccaggagtcaggtcgggagggtcatgtgtgcagagctaatgaggtggccatttatcccactggagagggggtgatggggactgcgaagggtgaattcggggaaaatgtaaagtgcgtctgaggcacttccaaccccagggcccacgcgccgggaccacagaggttcctccttcatggctgtctggttttgaaatgttctgggttaaagtgattggtgcttccacctttggcagagtaatctggggacgcgatgggtgagatctatctgccagggcaggctgagaactctctttcaggggaaaattgcagttgtgctccctcaccttccctcagccctcctctgttaggtaggaacatactaggttttgtcatttccacaaaagggtgaaaagcctgtaatctgtggtagatagatcttagagcatgcatatccccctcccactttattttcttttactctttttcttttatttatttattttttagagacagggtcttgctctgttggccaggatggagtgcaggggcgcaatcatagctcactacagcctcgaactcctgggcttaaaagatcctcccaccccagcttccccagcagttgggactacagttatgcctggctaatttttttttttttttaactttcttttttcccccccgagatggagtcttgctctgtcgcccaggctagagtgccatggcgcgatcttggcttactgcaacctcctcccccttggttcagcgattctcgtgccttggcctcccagctagctgggattacaggtgctggccaccacggctggctaatatttgtatttttcgcaatgttgcctaggctggtcttgaactcctgacctcaggtgatccacccacttcggcctcccaaactgctgggattacaggcataagccaataagccaccatgcctggccttttttttttttttttttgagtcggaatcttgctccatcacccaggctgaagtgcagtggcacgatctcggctcactgcaacctccccctccgaggttcacgccattctcctgcctcagcctcccgagtagctgggactacaggtgcccgccaccacacccggctaatttttttgtatttttaatagagacagggtttcactgtgttagccaggatggtctcgatctcctgacctcatgatccgcccgcctcggcctcccaaattgctgggatta

SEQ ID NO: 586475 - DNA, 4001 bp, Homo sapiens
ctcctgagctcaagcgatcagcccagctcggcctcccaaagtgctgggattacagcctgagccactgcacccggcttcctatggtttaaaaaaagtttcattatacaaatttttatttatgtacttatttattattagggacagagttccactatgttgcccaggctggtctcaaactcctgggctcaagcaatcctcctgccgcaaccttccaaagtgcagggattacaagtgtgagtcactgcgtccaggctttattatgaaaaacgtaaatcaaatacgaaacagtataatgaaatccatgtgtctattaacatttagcattcctatatactgacaactcctaaatgttacctgtagcccagacacctcctttgaggagtcatactgccaactgtctgtttgcgtttccacttgaatagcacacagccttcacaaactttaccaggtcctaaactgctctgaattcttcttccccagccctcctgaattactggtaagctccggatggccttggacgccttattcactgatgtctctcaacagtcaacagtgcctggcacgtggtaggcactcacattttggcagaacagctctctgcaaactctcaactctcagtgccagggtccactcagctggccactacccttaattctgccccctctcccaagtcagactcatctttttaaaaagatcaggccgcgcctggtgattcacgactgtaatccctgcactttgggaggccgcggcaggtggatcacctgaggtcaggagttcgagatcagcctgaccaacatggtgaaaccccgtctctactaaaaatacaaaaattagccgggtgtggtggtgcatgcctgtaatcccagctacttgggaggatgaggcaggagaattacttgaacccgggaggcggaggttgcagtgagacaagatcgtgccgttgcacttcagccggggcaacgagagcaaaactccgtctcaaaaatataaataaataaacaacaacaataataataataataaaccatgttactgaaacctccctggcccatggcgagtttaacacacagttccttaggtaatttaaactacccaaagcaatgaatacgagaaagcaactctgggtaagtcaggataggctttgctgtttgaatgtggaaaacagcacatgcaaatatcaaggtgatgaatttggacaaccaaacgtccaatccactgaagttagaaaaaaaaaaaagtttaaacaagagccccacgcctgaacttagtgctgataactctaagtacttttagatccacggccggctttaaatttcaactccaagacgttaagtgatttgacctcctccaagctctaacttcccctacgctccgcggagagctggcccgggacaatgctttactcttttattccctactcccggcacctcagagaccagggtcaccaacgtcctcggcagacgcagccactcaggcttggaacagcctccggcgaggacccagcagacggcgtccggggcctgcggcctcaggcgcgcgctgtccctgtccctggccacgggtcgcgccggtcagggccctgcaggccgggccagcgccgcggggaggatgtggcctccgggccaagcctcgggggccttcccgggcgagggtggagccgcagagcggcccgtcccctccgtgaccttgagcccgaggacgccccgaccccgccccagctccggccccaccccagctccggccccactgccccgaggccgggcagccacccgcgctggggacagggccggggcggagaccggcgccgggaaacccgcgccctccgcctcgcggcggcccctccccggcacctcccgggaagggcggcgctgctcaccggagcctgggcaggaggctgcagggggccgcccgctgcaggaggccgccggcccaggccgctccgcgggcgcgcagcactcgcgccgccatcttgctcggcgcctcggctcccaccgcccgggcgccgccgctgacgccgccgccgcgcgacccctcccccggccgggccccaacgcggccactgcagtgcggggcgcggccgccagggggagcagggcgcgcggccgcgggggtcggcggggcgtccaggcgccaaggcccggccgctgcgggaaagcgcgaagcccaagcgcagtcagtgcaagccgatcacttcagcgggaggagctcggtgcccagaagcgcgggtgcagaagggacaagggcataacttcaatgatcagggaaaactccaaaaggaaagagtaacactgtgcctaggggaatccagggcctggggcggggcagtggcagtgggtttacccccaccccaccccgccaatgtcttttaaattttgtagtatatgaatatattgtcatttcaaaaagccccacaacgctttaacaagtgcattctggggccggacgcaatagctcacgcctgtcatcccagcactttgggaggctgaggccggagatctcttgaggccaggagttcgagaccaacctgggcaacatagcgagccctcactgtgcaaaaacatttttaaattagccgggcatggaggagcacgtctgtgatgccagctacactggagactgaggcagaaggatcgcttgagttcaggaggtggaggctgtagtgaactatgatcgtgccactgcactccagcctgggcaaacacacgacgtcctgtagcgaaagaaagaaagagagaaagagagagaaagaaagggagggaaaggaaggaaggaaggagaaagaaaggaggaaggaagggaggcaggagaaagaaaggagggaaggaaggagaaagaaaggaagggagggaggcaggagaaagaaagaaagagagaaaggaaaagaaaagaaagcaagtgaggaaaaaattaaaaaacaccatacacacacaaaaaaaattaaggagaaaggactgggaaggttctcttgaggtcttgggactgcatcgttcccattcatttcagcaccggtgggcactggccatggggagtccttggtaccttaccctcaaggccgtctgggtctagtggggacagaatgtacaatgatgattggaccgagtgtgttaagtgtcaaaatggacaggttcatgagacacgaaagaggcacggaaagagagcatgtaaccgggggtggctgtgaattagaggatagatggggagaaagttctccaaggagctggcaggacatatcagtcccaggggaagaagggagggcatccctgtcttgaggaaataacttaagcaaaggcgtggatctgggtggctggcgctatagagggaaaaatgtgtcctccaggaagattttttaaaaagccacaaatgagccaggcacggtggctcacgtctgtaatcccagcacttcgggtggccgaggcgggcggatcacctgaggtcaggagtccgagaccagcctggccaatatggtgaaatcccatctctacaaaaatacaaaaattaggcaggcatgttgtcgggtgcctgtaatcccagctactcgagaggctgaagtgggagaattgcttgaacctgggaggtggagggtgcagtgagccgagattgtgcctctgcactccagcctgggcaacagagtgagactccatctcaaaaaaaaaaagaaaagaaaaagaaaaaagccacaaatataaccatgaaaactgcaaccaaggtgagggcaggaggaaggaagctggaccctgggggtgggggagaacctgggagaagtaggggctctggccaccaaagggagcatttccaggccagtgcggggctgcagaggcagagaggaaagtgccctcaggactgggttgcttggaggtcataaggtggacaaaaactgggaggttccctgaagctggtaatcttgggggccaagggagcatcagggctcaaggggtgcagttttctgactggggtagaatttgaacacgttaatatggcaaggagccaccagggaggacaga

SEQ ID NO: 586476 - DNA, 4001 bp, Homo sapiens
tggcttccaggctcccgccctgggcccttttatcttgtggacattttctcccaccttccagttgctgctctatctgttccttatgatcccccttagaagatgctattctgacttcagttactgggtcttcctgatccaaccaggtacaaaaaagaaaacaacagctgaatccccaaaagcaaaatgccagggcgaaaggagaaaagaataggaagacaggccccatggcagcctttggggtctgaaagagtgattaaccctttggacaatgtcagaaagggccccataactgataatcaagaattatctctgctggcaaaggacaaaagcactcttgcattcccttcttgtctctgttcaagtcagctcccaggcctactggggtcatttccacctctaagctggatgcaatgaatggttgagcagaagcggttccatcctgatactaaagatgttgaagcatcagagtccccacacttgcaagtggtgcctatttttcttaaatagggcccagcaaattgtataagctttggaactcagaacacctgaatctgtctagccagaagaaagcttttctggcttctaggagttaaggaccaatagagaggtcaggagggctctaattgaatggactctaaacaaggttcagtttaatacaccctgcctctatggagagggcaccattcatggagggtccagggcccttgaattatctgtcagctgaatcttagctgggttctgcaccctagatctttgggccacacccaactcagcccagcctttagcctctctcttggtctcctagtcagcacttgtccagcgtgtgctaggcctcctgtagctaatgttctctttggccccctactcagttcttcaaggcttagctctgaatctgccaattcagaagtcacggctttgagacgcaaccccccccccccaacacacacacacacacacactctttttgcccctgcatccacagagcctattcctatcctttgagcctttagggtcagtatgatctccttagaagccagaacgtgccctccattgctgaattgacagctgcttcaacatacccccatcttggtgcccccggaaatcccatccttgtagcttgtctacccctgacagaggaggaaaaaaatgaaggaattctgaaaaggagacagggccaagtcttgatggctaggatgctgagggaaaggcactaatgtgaagggagcactgcaaagtcttcggttagccttcagggctatggggacagagcagggcgggggttctggaatctaaagaggctgtatttggaactgaattggagtcagaacctgcgcgcgatctaaaggtctgggacttcaaggctccaggcaggtgccgaggtgccgaggttccgagcaggttcctgtctggaatttccaggtgaaccggcctcccgccagccctggtcggccctagcacttaccgggcagacttggaaaagtctctgagaagtgcggaggcggaggtggtgggggctctgccactttctcccgggccggcagcagctcatcagcttccagcccaccctctgggcgtcggccgcctggctcggggttgtttcgggcggcagtggcggcggcggcggcagcggcggcggcgagctcctggggcccgtagaaagcgtcgggcggctccgcgaagctgggcagcgcggtggtcagcgccaccatcgagggcacagcctgacccagccccgcgcagaaggtgttggtaaggcggccggcgaaagaggctagcggggcgaggggcgggaggccagcgggcagcggcgcaggggccagcgcctgcggcagcacgagcggccggtagggcatgaacatggggtagccggtgtacagcaagtggccggagcgcggcggcggcggcccgattagggagtcgatggagaaggcagtgcccgggcccccgccgccgcccccgccgttgcccccaggggcgctaccgcctccggcccgctgcatcttgttcggagctgcggccgccccggggcgctcctctctgggcgcctccgtgcgccccgcggctcgggcgccccgcgcggacacgcagggctcgctccctggctcccgggccgaggtggcggcggggcgcgggctcggcgcagtgtggctccggcgccgcgctccctctctctcataaggagggagggggcgggcgagcaggcgggctgggggtgtcgccctccggactcatccatcttcctcaaattacgcttcatttcctccctccgcccgccgccgccgcgcccggctcccgctccctccgcagagcccgttcccagcggcccggccggccggcccgggacccccacccgccccccgcggcccaaccaactattattaatggagattgatgaggccggacacgccgctttgtgaaagtttgcggccgacgagaaggcggcggcagctgctgggccggtccccttccctccacccagtccacccccccaactcagcccacctggcccgggctccggctaggagggcaagcgggaggtggcccaggctccgatggggcggcggggccgagcgtggatgggacaccgggcggcaggcggagagggcgcaccagcagggacaggcggcggggccggacctcagcacccctctgctccgggccgccgccctccttcgggccccaagtcattccccggcgtgcctcccagctccgacacccctcccctgcccgtggagcggacgttgtggcggtccccagagcaagctccggcgcgacgggcgggacagcacggccaccgccccctccagcgagagcgcggggctgagggaggcgaggcggggccgacagggggcgcgctgggcccgcccggttctgcggcttagggccactcttacggggcccctttcctcctatctgccccattcgcactctggcctctggtctctattctcttggcattggctcttcaccttcttcctcattccctcctccatctccaacttcccctagtccctttctcttgcctcggtgggtaatttccttgagtgcccacactatgccaagtacttaccattcctctgacctttcccctccatctttctcccgtcctttacattctttttcttcctcccacccctcttccctttcccgtcctcgtttctattcctattcctctgattatttctttcccatctctcattccttatcccagtccctcttactcgatttttctcatgtctttcctttatctgtatctcttgtctgtctgtctgtctatctcttgtctccctccctcgctctctctccttctcttctgctattaattttccctgattggctccccagctccagcgccgctgatgagccctattcattcccgggcctgacactcacgacctgccctggctgattgctgggggctggccccaggagcgctgatgagccccaagggtcagcagcgctaattatccgctaattgcagatgactctcacctccccccttctgagacacagaaatggtggcgccttttaccatcgtcctccccctcctcccaattcccagcagtagagttgtcaatctagaggcaaaagtcagacagtttggcttgatagccacctcaggtcagtgggcaagaaagagacaagacaggcaagtcaacagaagagtgactcaagcttcaggacacagggcaagcctggccagctacagtgagtgtcatctggtcacaaggaaattgttattcaggtgaggctgggtagagccaagctagttaaaactgataacagtaaagccaggcaagtttaggaagatgcagtctaggtaggggaagtgatttggctccagcgaggacgaaaacctacacaagttccaggattgcccggccaagacagagcagggcaggagggaactctgggtctcagtgacatttgtcccaaatcaggagtgttgtgttagcctagtgaacactgttaaagtcaggctgatgtatttaaatcagtac

SEQ ID NO: 586477 - DNA, 4001 bp, Homo sapiens
caaatcctattaagaaatcatacagcattcttttccttatccaatattcctggaagttcaaaactgcgctggatctccctctccacattgaaaggaggcaccctttcaatacctgttctggaaaatagcacttctccagaacaggcacatcttgagtaaaggcaatgacaagaggttacttctgagaaaatcccctttgccttcggccactcttcctagaggcacataccaacagaagacacgctaccttttactatacagctgccactatactgcttcatagagcacagctggtaagatgccaatgcccagaagtgcagagctgtctggcttcaacccagcctacactgagaagctccacatcctcctggaagcacatatgtcaacaccgcatagaacaggacttcccaggttcactagtggaacttctcaggtggcatcaaaaatgacagtatagacacttagctctaactagcaaaggaggaaaaaaaccctaatatttctcacttcaggtcaatggctgatgtttgaaagagatatggataattacctttctcatttcctgctgtaactgagcctggaaatggctcttaaggcgggcagcctcttcctgaagttcttgcagccggggatctggctgattcttctcatctcgaatggcctgcagttcacttttcagctcctccacctcacgggtcagctgcttggtctgcagttcaaatccttccatctgttcagctgcatatgctcgtcctgccaaggcttctcgggtctcttctaacctaagctccaagtcctggcgctgggtcctctcctcctgcagcagcttctggagctcacgcagcatcaaggcatggtcactctgctcttgggcccgatcatgctgctgcgtgataagccgggctttggtttctgctatttgctcctgcagccccttcaattctccctccaggcgggccctctcctcctccgccttgttactggcatcctctaagtcctgtttcatctttttcttgtcagccaagtaagaagcctccatgcgggacttctcctgagtgactgtagccaaagaactggtcaaagtagccaactgagtcttcagctggtgcagtcttttgtccacctccccacctgcaaatggcccatccccactgctactgctaacgccactctcggaccaactggcctcttcggactttggaggtggtggtccacgggccggtctgtcatcttctaccccaaactcacccttggtgctggtgagactggccgcagtatccaagctagtggcggtcccagtgctatcctcgctgtgagtggagcaccggtcatccacagagtcaggaaaggtgaggcctggaagctggacacctgcgaggcccacatctgcctcgtgggataccgacagcaccttgatgctggcctctaatgcctctttctccttcagcaggcttttataggcacggaccacatccttgagccgtgcctggtactggagaagctgcttcttctgggtctctatagtctccagcaagtccttcttgctcgggccgcccccgaaattcatcccaaacttctccatggagggtctgaacggattgccccacgtcagctttccagcagaacgggagagggccgtgaagacgcaggcgggggcttaaagaaacagcgagcgggctgtccggcggcgggccgcacacctactccacctagttatcccggacctaatgcggaacggccggacggactggcgaaagcggccgcccggtcccaggcccggagggctggggcggattctaccccggaggcggggcgacactggcaccagaggtgcgcactgccagggctcgttagcgctggcccagaagccgctccgcactctccgctcgtctgggccacagcagcccgggccggccccctcggcccacgtcggccagagggttacgctgagctcggtcccatcacgacatcctaactaaagctgcctgccgacaacggcgcttccgtgtccgctggaagtgacgtcagcgaggcgccgcaggctccgcccccagtgggcccaaggtaggcggggccaagtcggccggtgggtgggcgcggcctgttgagaacgcagtggggccgcgagcggcaaaaaacaggcttgggaaaggcgaagccagcaaagtcgaagacaccagagtggcaccggttttgtgagagcgcccaagcttgacctcgggctacgctcagcgagcgacagagcaacgtcgcactgcattcttaccaaacacccaggtgaacgacgcatccaacgatttgggagctcaggacccatggtccctaaaaggcaacaattaagactcccatttagaccacgaaaactgcagtcctctatagcacagtgcttggtacctagtaggcatacagcctaatagtacccttccttagttctgctgagttgattccacaaatatttacggagggcactctatagccatgtctatcctgagtgccagctatataccaggagctcacaagagttttgctatttagtctttacagtaattcttgtaagcactatactcattagcactattttacagatatgaaaacatgaggcagaaaggttatacgtaacatgcccaaggtcacacagctagtaagtttaggagttctaatcagtctgattctcaacgtatcacgtgctgtgccagatggtaacaccattaagagacacgaccttgccctcagggagctcgcaatctagtgaggaaccagacatacaaatatgtcctgctatcacaccagtatgtctgggtatattcaaagtggtatgaaagttaagaggaaagaggcctgtctaggtgaggcatggaaggctcttgggaataatactttgggatttgaaggatgagtcgtgattgtccacctaaccagagatcagggaaactagcattccaggcaggtggaaaaaaatgcaaagacctgtagggtatcggagtttgactcacccagaaagcattcagtagcttagggtatgtgaaggaggtgacaacagaggggctggcacaataggtagggacccaacttatggcatttaaattttatcttgggttatagtaaggccctaatggattttaatctgaaaagtgggatgtcatcaagacttgtatgacatgttggagggaacaaggggcaggaaacctgtgaggagactttcagtcatggggaacagaaggtagtgacaacagagatggaagcaaagaggctgataaaagagctaaatgtagaattgacctaacttggtgaacactagttctgttattatattggaactctctaaaatgtactcttcagcctcgtaaaagccttcttagggatgcaagtctatgactgaagagaaaaggaaagtcattcactcactcatacctgtttcccaaagtctgtccttgttacagactttgcagatcaggatggggcaggccctggaggtctgttcagaccccgtttctcagtggcccaaataacatcaagctgtattatacataacattcagtcacattatcaaatcattttaagattcaccataaccccttaagttagaacaagtctcattttatagatgatgaaataacggaagagttatgaggagtgctgaagccaaatcctcaagaaatggcagaattaagatttgaactaaagcctgaaatcacgtgctggcaagtggtgggtgctcagtaaatatctgctgaaaaagcaaatgaatgagtgaaggtttttttattcccagctcagtttacctcgagtccataaacaattgatcctagaagcccactgggaatccagagtagacataacacctaccctcgctccattgagaatctatcagtccagttcaactgaacaagcatttgttaggcctaataatgcctggcaatgagccagtctccaccgcagaagaatttcattcctattttgctattctcctctcagatgttaaaatgaggcagggaaatgac

SEQ ID NO: 586478 - DNA, 4001 bp, Homo sapiens
gggtagactgggtggagaaaagtgcagaagccagtgatactcatcctgcctttgtttagaatttggtatgttgtccatcataaattttttttgcattcattttgattatttaaaatagcatatatcttgatgattgatgtttctggtgaccccttaaagtttgtgcccgaggcattgccttgctccactcttggccctgacaagaatgtcagtgacttcccaggattctggggttcacagctggccctggtcaggaccagcaacccctcacacgtggagcagataaaggatggggcatgggcagccccagagtctgagactggatgcccagcctaagaaggtggttcactcacatgccactgtgaatgcaaggggctcagggacagctctgctgtggcctttattaaagtgattccctgtgcacacatatgtgcacatgcatgtacacatgcaggtatgcacaggcacaaacatgcacacatagcacattcacacataggcacactatgctttctctccttgtttggggaaagtgccagatctccacagcccacatgtccacctctccctagctccgagccatctttctggtcatgccaaagacagccgcttccttctccccgggtggcctgaaggggccctttgggcaggatttctcatccaaattgctgccatagcaccagtgacaggcagatctgggacttggttggggcctcggccggtccagctgtctggctgcgcaccctctcacttgggttggttgttttcctcctaacatcattagctctgccagaagcacagccagcccggggtttatgctgacctggtcatttcacacagaggcgagagggaagcatgcccaaagtgactggctctgcccacttaccccttctcccccactctgcctgggcccccagctggggtgatgcaggcacattccccccagtgtttcacagcaaagtcccctgtctccagctctctccttgctcactgctgggctcagggctggctcagagcatgcctggatttctctttgtttttggaaaaagtaactgccctgcactcctcagcaggccacagcagccctcgggctccctgcgaagtgattcctggtaggaggcaaggcatctttgacttgtcaccatgtctagtgagtgttgtctcaaaatcaggtagtgggctttgtccacaagacctcatgtccctaacccccacatctagggctctaaactctccagagcccctccccagtggaggccactgcctggacctcttggcagcctgacttccgggtcgcaggaccagagtccaaagctggatgggtctgccaggcagtaggggccttcctgccccagaaggcacccctggcaagacccttctcaaagagcctgtgcataaaatcagattctgaggctcaaacaaaccatggaatgttggggacaggcaagcaaacactcccagaatgcccaatggagggcgagataccttctccttcttggcggcctccatcctggctctgtcgtccagcatctgcacagcagccagcgtggggagctgggacccctcagccttccccagtaggcttctgaagtggaaatatccaaggcttctccgccgcaggggtcacggcccgccctgggtccctgggagaatgtggttctcctcgggctggtttggggtttgaggttcagtcacagtttcctccttttcattgttctccaacgagtcggcaagcattcccttctggacccttcctcactgagcctggatgttctccaggcagggccattgctgggcgcttgggtggcgtcctcagcgctttctctcctggttgtgttgagctgtggggcttagtgtccttcagacagattcagtgggaaatgtcctctcccttctgtgacctggggacagcttttgagtaattaggctgcaggtgactgtgtctctcacatcctagcctgcttccctggggctcaggcgccgctcggcatttcctgctccagccaggtgtggagtgggggattctcctgccagggcttactgtgctcctgagagggcctgtggttgtcatggtgaccaggagtggcctcagcagggctgaccatcctgtcattagagctgccatgcataaaactgggactggtggcaaagagcctccatccccatcaccatggtgaccactcaatcgccttgtcactacagtgaccgctagcctgttaagcctttgccacctgttcagatcctggggcagtgtctcagggtctcccacactcctgttctgatgagcagaggatcccgtgagtctggaagcagaggaaagggagcaggcagcttggcgtggctcaggagcaggcccctgggaccatctcacatccctaacccccctatctagggctgtaaactctccagagaccctccacagtggaggccactgcctggacctcttggcagcctgacttccaggtcgcagggccagagtccaaagctggacaggtctgccaggcagtaggggagcccatcggagggctttggcgcggcctgccctgactatctccttgaaatctgaaccagaacagtacacctggcccacacaagcctggctgaggttgacactgtcagaacagaggcccacagggactggctcctcctctggccctgctcaggaagcttcagcctgggatgccacccactctccccttcgcagcccaagtgcccctggagaggttgccctgtgcagtggggagtcccagtgagtggatggagcagggggccagggtgctggagccaactcagctgcgggctcagtcaatagtctggaacaaaacatacttctgcctaagtcactgaggtctggtgtgtttttcccactcgtggcccttctcagtcaggatcggccacttttcaagtgtccagcgtgactggtggctaccatattgggtagtgtcggtatagaccaaagagggctcaggacccagctccaggccacctacgctcagaggtccagcagagggggtgaggaggagtggccagtgcgatctctccagacagatgtgctgtaacactttaaaatcaacttcctattgacggtcattgaggcagtttcagattttcactattacgaagcaggctgtggcagaagtccttgaatttcaccggagtctaagtgtgtgtcagtgtttcttctggatggctcctggaggctgaattgctagttcaaatgctgtacacattttacatcttggtaggcaggaccacgtggcctcttcacatggcttcaccagtttcttctgccaacacgagaagtttggctttatcttggccaatccttcagatgataaatctttatgagttttttgccgatctgtcacctcattgttgcttgaattgcaaaatgctggacaccttttcatgtgtttcttggtgattgcatttcttcttctaaggatgatttgtttacattacttaactatgttgctattggattatcttctgcctatggacttggagaaactattttatatttcatctgtagtatctattaatcctttgtctgttaaatatactatgatatctcccctagtctattgctaaacttaacaacttgattaatcgtgtctttcatcatacagaagtatctagtttttatgaatttcaacctttgttttcttgttttggggtttttatatcttgttaagaaaaccgtttccaatccccaaattgcaaaaatgttctcccacatttccttctaatatttttccaagttttctatttgttcagtactttagtctttctgcaattgcttgtgctgcgtgcaccgccattatgagggcacacctcacatcctcgcctttcttctcattcctcttttctgctctcccgggtcctgggagatggtggtttgggtatggtgcaagggaatctctaatatggctatttggtggtgaagcaatcccttccccactgctctggaatgttggctttcttataaatcttagcactac

SEQ ID NO: 586479 - DNA, 4001 bp, Homo sapiens
ctggcgagcctcatgctgggtgtctgtgcaaacttacagggctttcccaagcagtgtaggaaatgtggtggtacctggggagccctgagagcctggcgccccaggtgtagcctcggaagaagagcacagacagagcctgtccctccccctggcagcctctgggaggcagccccagccagcttgcagaggtttctcttgctgacctcacccaagaggtcacaggacacataatcagggcccacagccaaacgtacaacttttcttgcctgaggacgcccccacactccctgcagggcatctgaccctcatctcttcagcagatgctcactgaatgccaggtgcggcacagggcacagaagcagagttgacagtgggaccaacccctctcaagggcggggatctgcaggaaagaacctcagtcaagttggggacaggctggggggtgaaggaatggggacagatgaagagggaccaggtcgggcagctgctgccagaagatgggagcaggggacctgcactgaggctggagcagaggcggggagggagggagtgaggctgagctgtgagcagcaggaggtgagaagcctggaggcgccgggctgcagagcaggggcatcttggggcagggtggaagcagggcgtcaggctgtcctaacaatccctgtgcagggatgctgggcgcaggcttggtgaaagcgataagagtctagacttattctgaagggaggtgggaggggctgaggagaggaacagaagggcctgggaagaagaggttccatctgacctgggagttgggttgtgggagttgggatcttggtctgggcatgttaacacatctgccagccaaggggcgatttgttccaagtagcagttggccatgtgaggcccgagttcagaggagagtctggctggagaggtagatgtggagccatcagtacagagacagtccttaaggccactggcctggacatggtcaccagggtgtacaggttggatagcagtgggagaggcggagctggtcaggcagggctgccaggggcaggatgctgtcccttttatgcagtgagcagtgctttgtgaccccacctccagaacgcagtaaaaaaggcaggatgccttctagtgccgcctttggcagatgtggactgaggaactgtctattccagcactgggaggggccggctggtggagctgtgggtccctgaggaaatggccaagggccagggcagtccctgggcagatgctgcaggcctgggggctccagagcccatccgagtgccagatgtccagctgtagcctggccccctccattcctgggccctcaggtggctatgtacacagaagtgagtggccttgggctagtgcccacattctcctgagggacagaatccctgatccaccaacccctggaaatgccatgcagagcccccagagagccagacagccctgggcagccagccagctccccccataaaagccccaggccaggccccggacactggtgtcctgggtcaccgttagctccaggaataagtaccctagaacccctcgagaggctggacactggatagccacagtgaggaggggtggtgggcagagggccagtggcaggcacagctgccctagccaggacccccaaggcccatgtgcctccttccaaggtgccccaagcctgctcgccttccctgcccccagccttagttttggtaatctgcaaaaccaagggccctgccctgggtgctgctctcccagtgcaaagtccctaactttggtgtgacccttaccagagtcaaggctgtctgggcctggctccttgtgacatccatcgccatctctccgaggggctaagaggtagatgctttgggaggcagagatgctcctgcctgctgaggcctagcacatgctgtagccttggagcgtaaggcccgcctgtggcagcaacggctgcttggatggagagctgcctgaggctggcagcccagggcttctgcactgaaagggctcagcctggcggctgctcaaatactctgccccctgccatggggtcagaggcagggcagaaagggagggtaggccatgtgggtaacagttgacagggccacggggacagagccatggggcagccggccacactctgtgaacatggggtagggattgctgcccagcaggagggggtgtgcagagccagcctacccatcttccattcctcagccttgtgcgggcagaaagtcaccaggctgccttggccacagaacacttactgaaatgcccttggacagggagggggtcctaagggggcctggcccgcgctggtgcaggtctggacttgctcttggaggcaaggggatccccagtggattttcatctgcagagaggttcgatttgcatttcatacaatccaggggtctgtatggaacttggggaaggggtggtggaggaaggtggccaactgatcaaaaacaaacaaaaaacaggggtatcattcttaattttgtgactgcaaagtccaggcctcaggcttgctttgggtgcctccatgggcatagaccatgacttccaggctctggcccaggcctctccttgggctcacctgggagtgacatccacatgctatgtacttgctggcacctgccaaagcctgctaaaattagctggagctggcaagtgggtcagggtatggagggtgccttgtcagaatgccaggtctctcgccaatggccagagtgatcactcccaagaaagcccttgatacaattgatccctttcccaatatagagcagagatggcctcatcagatctcatgtgacaggccactgacccccacagcccccagctctgagctactgtttgctcatgggggcagggctcacacccaggtttggagtggcactggggccttctggttcagccaggccaagaagcagccacccagcgagacttgcccttcttctgggccaagcacacagcacaggggaggagaatctaaattcagttctcaagaaaggctgaggatgtgtacaaagcctgaagctgaggcaagtgggccccctttcttggttgactgaactgccagtgccctctctagcctctatttagagcaacaggcatcccctagagttcctttctgggagccacctgctgatattcattggcatccatgaggccagaaagcggcccaacacccctacttccccacaccgtctaattctccgggaccagattctcatgactcatgccagccctcctgggcacccacccttgtcctgtctcagtgcctcttcttcaggataaggggtgacaccaacagtctgtactgcactggagttgagagtcattgtagcaggaacagttcctgctttccaggaattttggaagggcaagactgtccagaacctgtccagagaagaggggccaagaaggggagggcctcagagatgatggctcatggaggatgaccaggacatgcttagagtcttcagtagctcaagggctgtcccgaggaggatggatgaacattgtttctgcttagagctttctaaaaagacagaactgtgcagctgtgggctaggatgtctcagtagatagtgaactccccatttcatggggagagaaagacaagagcagaatcagaagggaccttgctctatgtcccagtggtacccccatttcttagttgctcagggttctgattgacagacatgacttgattttctttttcattcatcaaaagaaaataatatgacaagtttggtgatggatattcaagatgattaattctactatcaaaaaacgagacacaacccacatacccaactacaggaggttggttaaataaattatgctacacttacatgtagtcattaaaaatggtaagattcatctgctctattggcatggaaagatgttcatgacatactgttgaaagggaatgtgtagccgcccttgaagctggccttcaattagccctgcttctggtattcaccccatggtatagtctcttc

SEQ ID NO: 586480 - DNA, 4001 bp, Homo sapiens
ccctgaaaaccaggcccaaactgtataaaggccagaccaactgcccttaaatacaatatcaaaacattcacggccctgtggcagtttagaaggtaccccatggaaaatactaaatcctctgaaatgatctttaaaacagacccaattcctagtgactggccagactgttccctgacctgaaccataagagataatctgatatgcataatttacagaatgccacacacagaacaactgaacattctgcagtaactgtatgacagcaaaaatactggaacagagcagtcctgaagacaatcaaccaagccacgcagcagcctggaacttccaagcggtcacagtcccgaggggcgtgcagttaacccagcatagccagctctgctcgcgctcgccctccaggctacaccggccgtgcaggtgtcaccgagcctaggtccagaggcggctgactcggttcggcaggccgggcggcgtcaacagagaagcggtttcaccctcagcctggaccctcggtgagaggaacgccagcgacttcctacggagcccggtgtagggcccggctggagaacctgaaggccaggaggagggaggcagggaggtgggggaatgcggaacaggtggaggccaggggggaaggtgggggaggcaaggggcaggcccggaggggtggagacagaggaaggggagggggaggccgggcagggaggcctgagagagaaaggcggggggccgggggggaaggtgaagatctgggaaggccacggggaggggaacaggtgggggccaagggagaggtggagggaggtgggggaggggcggtggagccggagaacagggagggggaggccgggcagggagatctgggacagggagatatggggtggggagcaggtgaaggcccggcggaaggaagcggagttggggagactacgggagaggtgggggaggtccaggggaggtggaggctaggagagggaagccgaaagggacgaggacagtggtaggctggggagagagccggggttgggggcagcaggaagagagagagacggggggtgggcagagggaggacagggagagaggcggggggcagagggaggcagggtagagagacgggagtgagggcagggggaggccggggagagagagacggagggagcagggggaggctggaagaaagagacgaggggcagggggaggacggcgagagagagacgaggggcagggggaggccagggagagcgaggcggggggcaaggagaggccgaggacagagagacgaggggccgggagaggccggggagagagacgcaaaggaagaaggagaaggccagagagagagagagagagagcgagaccaaggtggggcgggggaggcggccggagagagacagagaccgaaggacgaggcgggaggcggccgaggagacagaggaaggccgaggggcgtgtggggacggaggagggaacaggtggaggctgggagtaggggaaggccgaggaggaacgcaggagaggggaaggaagccgaggcgggagtcagaggccgagggaacgggggcgccgggccacacagggccagaccccggagacgcggcccagaccctccgccgggcgacccgcggcccctgggtccagctcgcccccgcgacgggcagcggcgcggcccaatgggggcgcggggcgaggcggcgcggccaatgggaggcggcgggggcgggcgctgggctgcggcgagggccgggcgcgggtacctgaagaacagggtccggtacatctggtgcgcctcgtagtagtcgcccttctcgacgctggcgcgcagcttgccctccacacgctggacgccgccgcggttgcggccgccgttccgggcgctctcctgctcggccatcgccgccgccgccgccatcgggccggcgctccgcgcagggctgacgctgtcgcaggcgcggtcggcagcgcctcccggcttccgtcccgacggccgcccgacgcccttctacggtggcccgcgaggagtcgcgcgcagtcgggggcgggcgcgccggctagctgcacgtgacctggggcgggtccgcaggcaacacgtgacccaggggcgggtccgcaggcaacacgtgacccaggggcgggtccgcaggcaacacgtgacccaggggcgggcccgcaggcaacacgtgacccagaggcgggtccgcaggcaacacgtgacccagaggcgggtccgcaggcaacacgtggcccagaggcgggtccgcaggcaacacgtggcccagggcgggcccgggagcggcacgtgacccggggccgggactggctcgcgccacaatggcgggtggcacgaaactgcctggcggggcgctgcgcgtaaacaggctgcggcggcggctgaccccgagcaggaagcgtcccggggtgggaccctccccacgcgcgcggtgtaacagcagccattgagctatacagttcaatgtgtaaaatgcttataaattaaaaatacttttatagggccgggcgccgcggctcacgcttgtaaacccagcactttggaaggccgaggtgggcggatcacctgatgtcaggggttcgagaccagcctggccaacatggcgaaaccccgtctctactaaaaatactaaaatgagctgggcgtggtggcaggcgcctctaattccagctactcgggaggctgaggcaggagaactgcttgaacccagaaggtggaggttgcagtgagccgggatcccaccactgccctccagcctgggtaacagagccagactgtgtctccaaacaaacagaaacaacctcttaggatcgctgaggggcgttcctcctctttgaaaggccacctgcggtccttccctggccgtggctggggacctgcggctgtgcctgggtggacggctcactcctccaggatcgggtcctgctggaagggggaactgggtcggcctagagcttccagccctgtcaggctgcggaaacggggtccaaaccccagtcagagttagaaacggggcctgaggcccagccctagccgtgcagggttgggaacggcttggctgtaagaattggggtttgaaggcggttcgccgttcggtccgaagactcctccgttggatttacagggtcagcccactctcacaggttagcattgtttataataaaaaagaagaaacaaaggcctttaagctgggccctgcttgaatcaacatgatccagccgtgcatacaatggacaaaaacagctgttaaaaaaaaaaaggttcttacgggacacacttggtaactggggaaaagccaggtgcaaaatagtgtggtgtgtgtgctatcgtctgtgacctggtgccagcacctgccttcagctacagaagcagcgatgaaaactgtgtcctgaggaaaggcatcagttttcctaatgttctgcccatcaagcaacttgtaattcagtccgttttccaagtggaaatggtgccctacagaaagaggtgcctggcacacttgaggcctcaaggccttggaggacaggttaccattcaaaggctgtgctacagagcttgccaacaagaaccagcaaacccagtccctcccacatcccaggggcagaaacagacaaactgagaaaagaaatagactgtttatatcccatgcccttttaaaaattaaaactctttatttaaacctcttaatagcatcttatcaatttggtggcagcagcagaagcactaccaaagacagatattttgaaaagcatttacaaaaatacattgcacaaagtcctatcttgcatctttaaaaataaattaatattcaaaatatttccaccccaaatcccaaatcagttttatataggaaattttgatttatatatgtaacctgtaatatatgaaacatctgtacattttatctgccttaactgcatagttccaattctaaggagagtgaaaaaaatgctgcttgatgtatgaatagtttcatacatcagtgtatttgaggact

SEQ ID NO: 586481 - DNA, 4001 bp, Homo sapiens
tcactcttccctccttcaaatctattttccatgtgaccagaatgggcttttggagatagaaatctatctttcatgtgctttagttctgcagtgtgtcttatttggcttctgtggtcctggaagatgtggcccttccacatatctccagtcttcatgccacattccccttactaaactccagccacactgactgaaagatccagcttcctctttcttcaggtcctttgcagaagatgctgttccctgttttgtgtgctccccacctctacaatcattcaggtctcaacttaaaagtcacattttcaggcagggctttcctgagcatcctggttaggtcaggtaccctggtcatacgccccattgcactttgcatgcctcctttttaagatggaccatatacctgtaactgaataatcccttgtttaatatctcttccccttgccctgactgtaagcatttggactcccttcctacagttgggaaattccctaccttacgagtttgggaatagggagtatcagagcctgactcccatttttgaggcttcaaaggccagaagctggttctctcagttttgcttaaaatcacggcatgggtacgtggccaaaacttagccaatcgggacattctggggctttcaattagaagctagtgcccaagacagcagggactccagagaggctgacacatttgggtttcaggaactgcagggatgtacagaggcaggcagtgtccagggcagggggtggtggacaatacagcatccacgtttaccaagttcagcagtggcgtggaagaggctccgtgggctggttctgttgtgtgatgcccactgtattacagttgctgtgcctccctttatgcttgtccgttttgtcagctttgtactcctgccttcctggtcattctgtgagctctccaatagcctttcaacacattcttttttttttttttttttttttttttgcttaaatcagccagtttctgttgcttgcaactaagaactcacgatgttagcagagatcatgtttgtctcattcgacgctgtcaaaaaggttttgaacataatctattgcacctctgtcctacagactgagagttcctcgaaacagccactttactcaatcatgtttatacccttagtgttaagtgccggaagaatatgtactaaatgaatgaatggactgggctgaagagcaatgatttaccaacactggttatagttcatgcagccccttgacctaactgaacacagcattattacaaataagacatggtcccagctttcaggacctcttagatgaggagcgaaaggcaggtaaacggattttcacaatgccaggtgagaagtgctgtaacaaaggttatgtacagaacagaaggcaaccaattcccagacacgggtcagagaagactctccagaagtaccaactgtatgcaatctgttaagttagtggacgagaggccaaatcggtgcagaccgagcagccggtgcaaaggccaggagggggaaagctccaggcagcccgagagggcaccgtggcccgggcagggccgggcagtgggcgcagcggaggaggtggacccgcccaggaggcggaagccgcgtcctagtaccctcatcaagaagaactgcattcctggcccgatcggccacgtgtgcccccgaggaagcgccttctgggcatcccggccccggcgtgggtagcgcgggagggggcactcacctgcaggcgggccacacagaagaacgccgccgaggggtttcggaggtggatcctctctgtcagcaggttgctgccgtaggcaaagtacagaaaactctcctcatctggacccgtgacgtccttgcagcccgagttggccatatcccactacgcccctgcactggagcctgaagcagagtgtaaggaacggccagagagcgcaacactggggcccactaccccggcgcagtgaccgccgcgcggcagcctcagggttaggggactggcgggaagcgtgggccggtcgagtcaggagcgagcgctctcctgattggctgccggtccccaccgacctgagtcgccccctttgattggccatccccacggccttccctccgccttccgccgagactcagaaatagtctgtcctgaagcaatccggcgctggctcctcattggacacgacctactgatgtcccgcccctccttgctcaaggcttcctctgattgaggggtggacaggcactcctcacaggcgggtcgggtcccatggacactggctgaaggtcgtggcgcgtgactggtttcttcgctctggggtgcttgtgtgtggttctttggtactttctgtgccttaggaagttctggtcagatctgaggcgaaacagcggcccaggcgactccatcaacggctccctcatccggcagctcgccgggtcctgccttcctggcctagaggagtcgggcaggacgggtccgttcaccctttctgctggttccggcacccccagcactggtcatcaatctgacccctttccacggacccgtcgcctgctggagcggcccctctgaatgcttgggactcccttccctgttacatggaagttacatgcctgggcttaaatcccgacgctgccatttactagccaagtaactttgggcacctctggtctccgtttcctctttttaaaaatcgggatcataatataagttagggtcacagtagaaacccctatattgtgttttggttaccccctcccacacacacacacatcctgggtgtattttttaaaacctatattgttaacttttgaatgaacataagggcataggaacattgtctatccttgacacccagctattaatctctaaataccaccccccactaaaaggtaccaagtgatccttcgagaaatgactgatgccaggtcaggagctaggagtgaatgaggacaacttggaacatcttgtgtcagaagctcaggacgcctctcaagacgaacgaggtccttctaaaaggacatgggaaccagcctgaagttgcccactggccaaaattagaacaatttgagaatcaaaaataacaatgactgcaaactgaaaaatgattggaaactttaaacataaaaaagccattccccccaaagagtaatccaaattaaaaaaaaaactataacttcatttgccacactattggtggtgactattacaccaactttactctgcaaagtgataatttaagaaaacaaacaggtattccgcctttctagtagcagctgtatttcggggtaactgaaatacagctgatgacgagcatcagttgatgaggaaacagttctctttacaaaagtatgccaactaagtcatcctaaatgaataatggaattttataattgattcatgccaggatcatcagtgatatcatttggtgaaaaggtgatagggaacaggatattcacttgatgccaaattactccctgaggattactgctggttacaatttatttattttatttttatttttttgagacagagtctcactccgtcgcccaggctgaagtgcagtggtgtgatgtcggctcactgcaagctccgcctcccgggttcacaccattctcctgcctcagcttcctgagtagctgggactacaggcacccgccaccatgcctggctaattttttgtatttttagtagagacggggtttcaccatgttggccaggatggtcttgatctcctgacctcgtgatctgcccgcctcggcctcccaaagtgctggtgtgtccggaattgtgggttcttggtttcactgacttaaagaatgaagccgctgaccctcgcggtgagtgttacagttcttaatgatggtgtgtccggagttcgttccttcagatgttcagatgtgtctggagtttcttccttctggtgggtttgtggtctcactgacttcaggagtgaagctgcagaccctcgcggtgagtgttacggctcttaaaggcggtgcatctggagttgtt

SEQ ID NO: 586482 - DNA, 4001 bp, Homo sapiens
tgcagatgtcacccactacccaggctccaggtcttattttggtgggtgccccggactcagctcttggcttcctcccgaggactcagtaacctcaggtccatctcagggcagagccccgttgcgtctcccctacatctcccaacagactgagcgcacaaagcggggaaggaagagcaggagggcagatgggcctgtatgggactttctcacaccatcagcctgatattgaccctgggctgttggaagagctgtggtctctgcctatccttctgcctactgcacagtctggcaagccccaaccctgcctgggaaacttttcagggccaatttggggaagcaactgagggcaaaggatgccaggagagcagcctcatgccaaaaggatgaacagacagtgcccacacctctaagagaaggagggaaattcagagaagccccactaatgactcaggatgtgtgggcatagggccagatgtaaggagagattctagggagggaagtggtgggagtggaaggatagatcgttctaagatttatccaaatgctcctgctgaattaggactggcgaaacacatcctggggctcccagtcacccccccacacacatcgtggaccccacccacccctgaggggaggctccatcgccctggacccccaggccttgcatctatgcctgctgctcttcctggtatctgcaggggatgatgcccacactggcaaacagtgattgagttctagctttggtactagcaccatctgctgaatggccaccaccagatcttgggtacccctgctaaaaataaagcttttgctgtagagtgcacacagatggcagacaggggggcagtcgaagtttcctgtgttgcacccctatgcccagcccttgacaaatcagattccactcaatgcacagtgacccgggccagcggatattttctcttttaacaaaagagataaaagcaagactcaggaaggctgaggaacttgcagttcacacggctagtttcatgcgtccaggattcaagctcaaagcctgtgcactcaggagcaggtgcagcaaggtgctcgggaggggcagcaccctccaataaggcagcggaggaagaatgcttcaggccctcaccatcccagaaccttgtgactcccagcctggtccctgctgtcacttgcagtaacctcctggaaagttactgggaaactgcagcccattcaggaagggccctctctcctgatgccccgtgctccagcgctctagcccatggagtacaatttggttgccaaaagcctctccagccctcagcatcgtgagaagatgatggatcccctaagtgctggagcagaagcagctggtctccaccaactccttaggttccattccttccctggccacaccctcttcaaaggaaaccaccaaactggagagtggctcagggagtcatagggctaaggaagggtccagaaagcttaccacaggagcgtgtggaagcatcacaggtgcacagctgagagaaagagcaaactgcagggactaagaggggagcctgactttgcctcaccaattctgaggcactgtcttgtggcagacagagtctctgtggcccccagaggcacagccaggccctgggggaagcaacaagaaggtgagctcagctcagcccctggaaggacatgttaatagcactacccagagtcactacagattgctgggcagagggagatgagggagggagccccagtgtcaggggctctccaagccacagcctgccacctgctcgtagggagggactctagagcaggagaagggcagtagggtctccgccaggctccagttggccctgtggctcccaaatctggagcccagtggcagaggccagagggtctcagctggctactcacggtcggtaacgggctcaacacgcagaagacgtgggccccccacatccggcggtccatggtgagcccagcagtggctccctccaccagcctcagtaagccttggctatcttccttcccctgctgtcccctgacacagccgtttccaccgcaccctctgcttccccttctcaggtggctgtttgcataggcaggagctagccaaggggacacagaccgctgaatattcaccaggattgcaggacacctgcccagctcagcattgaccctgaggtgggactctgtttccagcaggcaggggctgagcccccaccctcatcgccttctactctggctataagtctgcttgtgtgtctgtcctgatagcaagggcccagagaggtgacagccacaggtcacttggtcaatattctctaccactttcttctctaagcccaggtctctggtggccatcattggagtgacccctcagattgatgggatcttaaagaataggaaggggacctgggcctgcccttgggaagctcccaggttatttgatgtgtgctcctagcctcatccacagggctggagagtgaggtcagagctgtgtggaactggtggggaaggggaagggtatggtattagtggagatggagggttggaatggtcttaggaaaggaagtatgatctgtaagcactggcatgggctggccaggaatgtgtcatttcagcaagacctgggtcctttactgggcaaggacgctggcctggatggtgagctgaagctgcaagcatcaaggctctggatttcacatgggggcttatcaaaatctctccaaaactctcacggcaaaaggggaaaatgaggttggttggaagccttgtgaaggattcatgggtcaagccatcttgaatagggggaggacaactctcatcggtagcagaaatgagaagacttacacagcaaactatattgaacattcattgcctggtcacttttattatagttttagactttaaaatgcagggtctccattggccaggctaaagacagtgttctaaatgcccctggatcttgcacagcactttgaaatgtcaaagatgtcacctctgaaagacctgaatatcccagtagccgacaggtcctgatgtttgtgtgcacgtctccactcacagaagctgctgggctgcgtgctagaacaccagacatgtttacagcccgatcacatcatgaatgttgaaggctcctcgcccccgctacatctggatttagggcttattttgacatcagcaggggtttatttttccatttttcttcattgtcaacaaaatactgaaaaaaaaatatttcgaaacaaaaacatgaaccaccccaagctccaaaaccctcctatcctgtgcaagtgttttcatgagcttaactgtgaaatgggtgcaagcagcatgccacacagagctctgcacacttttacacttttaggggagagcagagctcctctcttggcaggctgagagctcacgggttggaaaagcagagtgctgaaaaggtataacttgaagggaaagctagaaccttctgttcctcagctacaaagaagcaacagcaccaggaaaaaaaagtcttacgattaatcactgttgataattagcatcaatatcattagcattaatgatggctaattattgaggttgatagtgataattaataatagttattactgtctaaacgagtggttcctaacctggagcaattttgcttccctaggggacatttggcaatgtctggagacattttttgttatcaaaataaaaactaggagttagggtgaggagtggggtggtgagttgctcctggtatcgaatgagtagagaccagggatgctattaagcatctacaatgcacaggatgcccccacccttgatcatatgaagaattatccagtctcaaagatcaataagaccaaggctgagaaaccctgctctaactgtacatgttccccaaggatccctgcaggcctgtttcttcatggagctgtcttctctagctaattctgtatacactcaggattcaaattctgcctccatcacttgctagctgtcatacatttggcaagtcatttagcctt

SEQ ID NO: 586483 - DNA, 4001 bp, Homo sapiens
tcccctccctggcctgcccggctctgcgccatgccccctccccgccccacctgtcatcccagctctggctgcgctggatttcccgggggcttcgtccaaaggccccatcgccttcttcgatgcttctttggtaaaagcagctgtcaccacggccgcggcctagagaagaggccagacgcacaatgaaacctgctgcacgttctcgaagtcaggggcccagatctgcccgtccccaggacacgccatcacccctctacctcggctccgcgtgctgcccctgcctcgggaggtgccagccaggggggggccagcccctttccccatcagcctcagcacagccacgctgttcactgacagggagaagtttctctgaggagggagccaggggcgggagtgaggacccaggcacccaaccacctccacccccaccccacagcaccctccccgcctgtctcctcagcgctggcccctctcctcctaacccaacccatggcctcccctcccaggctcccgcagcctcagctcctggcccggtcccacctgttcctcctcagtcagcggctccagagccaggggctgcagtggctcgtcctgcagcaccgcggcgaactccttgtcctgcagctcttccgggacctggcagtgggttgggacagccaagacaccacatgctgccagatcccctccacaggcagaggccaccaccgccaacccccctcgcccacgcacccaccttgttctccttgacgtagagagccagcatttcctctcgcccataacggtagtcagccagcttgtatttgggcatggcaggggacgggggtggggaggccacgctgccgcccccggacagggccctgagcctggacacaacacagagagaagaagacagaggtcagggcagcctgactgtgctttctcgaatctccacggcagccgaggcacaagtgactcaccactcaggcccaaagttgagtgtctctgctgccatcgtggggctgggcgtgtttgagaggccgggggtggggaggaggggacctggcgttcactgtccaaacacctgtgggggaacaggggccatgaagaacagcacacgaaggagaactttaaagcgcagggaggacaccatgggggacatcctagtgggcacaacaatgggccccggactagctggtgggtcacctggggtctaaaaggactcacctgagccagccacgtggccactcacaccatgagttacccagagatgagtccagacggtgaaagacctgggggaggcgaggagatgggaagctcgagtcctttcggcctcagcagggcaaccacccttggcccggggctcacctggcagcctggcccgggaagaaggagggcaggggctggtgctggagtgaacgagggtacccaagccactgggaattggtctgacctcagtagagcctgggagggaccttcacatctgggaaagacccttaaggagagcaggggggaggagggagggttcaggacatggctctgccggcagccctgccctgccccgcatgacaggagaggtccattcgccggatggtgtctctgggcatcagcaccctcgccaccctctctgggaggctgagacaggaggtgtagtgaagaactcggggagggaggcagccgaggccaggatggacgttcagggcaaagataaaacaaaaacaagcaagcaaacaaaaacccactagagccacaaatagcttacagagaaaaggtcagttacggagaaaaggattagaaataaatctaggagcaaaattctttccctcatgaaaaaaatcagttggctgctcagaagctcaaatccaggggcttggtctggggagaaacccagtgaaaaggagcaggaggtgactctagggccacagacgggtacacgacaaggactccaggcaggcaagcctgagccaaggcacctcgggctggtttcccccacaggaatcacacccagaccaccgcccccaatcaataatggaggcttaaacaaccaagccaccaagggaacgaggatctcaggataccagctgggaagcagcctctggcaccatcaggtggaaataaggtcagggcaatggaggctgatgggggcgcggcggcagcctgttcctctaagggaggatggaggggactttcaggaggaggcgcatccctggggccccaggcagaggactcaagcgggtgggcggggtccaggtgctgcggtgttgtcactggctgggagggaggctggcccggcttggtgctgcagctcccatcaactccaggacgccacagtctgggaaagaagaggaagcgggttcaaccagggtgctgaggaggaaaggccatcagccccagctgagccagcagcccatgacaagccgaggcctgctcagagtccaggcactccagggggaaacaccgggctcagaggcaacccaaggccaggctggcctcccctgggacctctccttcctctgcctcggctggatgctccagtggtggtgtgttccatgacatgaaaagccaccagcctgtcactgactgcaggtggccacctagagcaatctggggactggatgagccttgaggacatcacgctaagagaaacacaccagccaaaaaaggagagctaccccttacttctctttcatgaggtctctagagcagtcactcattgagggaggaaggtagaagggcagccaccaggggctgaggggacagggagctgttgctgaagggtccagagcctcaactgaggaggggatcctggggccgctggtggtcatggccgcacaccaatgtgagtgtacttagtaacacagaatggcacaattagagacagttaaagtctccaaattttgttgtatattttaccacaataatcatttttttaaaaaagctttagggaacaaaaggtatctggagataaccaccgcatacctaagttttccccactccaagaaaaacaccccacattccttcaaatcagcctcaggagaggccattttgggcctcctccagttcattccttctagaaggccagaagctcatcctggaggcatgagggtgggagagagtagaacagaaaagggaccacctggccagcacaatggcttatgcctataatcccagcactgtgggaggcttgaagagaggagtccgagaccagcctgagtaacagaacaagaccacgactctacagaaacaattctaaacattttttaaaaaagaaaaagtggccaggcgtggtggttcatgcctgtaatcccagcactttgggaggccaaggcagccagatcacctgaggtcaggagtttgagaccagcctggccaacgtggcaaaaccctgtctctactaaaaatacaaaaattagccagtcctggtggtaggtgcctctaatcccagctactcgggaggctgaggcaggagaatcgcttgaacccaggaggcggaggttgcagtgagctgagattgcgcccctgcactccagcctgggcaacagagcaagactctgtctcaaaaaaaaaaaaaaaaaaaaatttaaagcgatggcctcacactgccccctgccaggcgcagcaagggcagctctcctaggtgcctccggctcaagtcacccatcctggctgtgtcttggctgcaaggggcacacaaagggggaatggttcatgcagactgaggacagcgacaccaagacaggggagagagcaggcccagagcaggaaaaagcccatgccacccgccttcttgggaagaaaccaggagagtgaggttaactctctaggcacccccacagcagggtctggtgccggaagctgatggtgcctggccccttccttggactaaaggaactagtggcacacctgcaggccaccatggggctcccaccctccaacaggttctggactgggggcacctctgctcctcagggggctcttggccaagtctagagacattctgggttgtcaccactgggcagggggtg

SEQ ID NO: 586484 - DNA, 4001 bp, Homo sapiens
ttcagcagctgggggaagattaggtaaaccctcagaaccagaaaatgtgcccagtgacttaggcacccaccttcaagtggctgacctgggaagaaagaagaaaattgggatttttcttttggaaattgaacagatctcccaagtagatctggagggcccctaactctgttttcttaaaatcaaataatttggtttgtttagagatgtctaaatacgatatctgtgctggagagacttgaacacttcccttcaactcctgaagttgcttcccctccaaatgtgattatgctgaaatctaacattgtgtaatacagctaaaccctctgtgatccagtttgcctaatcacacaagctcctgaacacaaattcacttctccctgcatctatgtctccagcctcattcccagacaataccccactcggtcagctacttcacaatcagcagatttcagggcctttccaacccactcggcttcccctcctaggactattgatcctccccgaccatctgtctgtgcctcaccatccatgtcaaacttgttgtgtcttgcaccctggtcacttggatacctgtgttctctcccattggcaccacacatgaaggaggggcagagagagaggctggctgagtaacttgtctttgattgaaggacttggagaacagatttgcctcatattaaatctagagctgtttctgtttctgcaggaactctactggccctccccaaagccttcaataaaattcactccatgggccttatgtgattaattattttgcatgtaggaatgaacagatgatcataaatgacatcaaagcagaaatgaagaaacagttgcaagattcagagaaaagaatttagatgaagcaaaatgtccttgtcaaccaagaaaatgagaatttctttttccagtgctgcagaattctggataggcctttggaattttccatagtttagaagaggggttgaaatgattttaaatagtttttttttttaaaggaaagtaagacccagctgaactctgaggtgacaaatggcccttaatcattgaggaatgtacacttatagaatcctgtattcctaacactttaagagaccgcaaagtttattgagttcttcaccgctcaaatgtgctgcttctcagaattacttgaatgttctttaaaaatgtacatctcttggatccatcctgagattctgattcatgaattaaatgtttctgatgtccacagctcagaacttggacatcagtcatttttgcaaccccctttattgtacagatgggaatttgaggtgtccccgtggctggagcaggagaagcttgaattaagggagcagatgtttaaggggccatgcagggaaaggggttgaagaccaagatattaatctcagatgtctcctcaggggccccttctgtggacagtgaggaggagagttcaaatgtacccagtcttgtcacgtcgtaactcactccgaggttagatggcttatggggccatagaaatatcttttgcctttgctcaatagggagcttgaggaatgtttaatgcctttcaaactgtattttattcctggaggtggttccagcacactcttttcttactttgttaagggaatgtgggaggagacagatttcactccccaccaagaacgtgtgtgctccagagctggagaagatgatcctaaaatttcctctgaactttgcctacttaaaaacctggaagtatgtccttgattgttccagatcttgctcgcctgcatgatgccttgtagaatgcaagtgttcaggcagtaaacactctaggaatcatgttctttctggttctcagagcacccccagcccccgccactcccaggctcaggctcacctttcctggtgacaggctctgaagttggccacaagaagccccaacctgctgctttcccttcggctgtgagtgcagaaggctgtttcctctcggcacacggaggaaatcactcagacttcagaaatcaggaagctcagggtgggccccatggttatggtttaaagagacagaaacatttcccattgagctgtgggttggcaatacttctcctaccgactctactttctgctgtgactgaggttatgtgtctccagcagggcctcatgatgtcaaatatcttgccatgctctaagaagggagggatgttgtagtctctgaggcctgactgtacttctaaaattgattactgagctaatcttcagttgcctttgccctatagggacatttccccatataaaataggcccagagagtctcctgccccggaacaaataacgtaatagctgttctcatcatctgtccattaattagacattcatgtggccagtgccagccccagatccagtctgccagaaaaacctgaaggcaaagtcttatcattctctgagagaggagggctttcccagctattgaaggacttgagggtgaactggtatgttgaggatgaacaccttcgcactatcttcaatttagccttattaggaggctttagtctagtcgtctatgttggtatcaccagttctagttattctatcttctctcaagagcatcatgaggtcagcaaaaaagcgaatcactgggtggtaagaaggctacagaggagcaggctgcatatctggttaggtcattaaccagctataggacctcacctaactcatttaaactttctggagttggctttctggagtatatggggaagacaataacccgagtcttaccctactggataggatctgctttttaacctctttcatgccagaccactttttttctggtagggaagagacccagcttttactgtttcccatctttttgggggcacagagtctcctggatatctgacatgtccactgtttccattcatcattgctgaaacagggagcctgtcattctcccagtagaccggcagggctggggctattgtgaggcaggtggggcatctagagcacacagcttaaggaggcactcactctcaggtcacccaagtgcagatcttgtaggtgggtgaccctgggagtgagtgttttcttaagagtgaggtgcctagggcttctcactagcctcatcctagcccaagccacatagatcagctttgaataagtctttgatacttgacgtgtacctttcataaagacgctttcagagcctcttcaacagctccgggccatttattgtttccatgcatgtgtatgatgtcttacttcagccactcataactctctgtcagagggtttatctgactacaaaagtatatgtaggtaatgcatgcagcagcctgaagttgtcagagctgatatcctaggagcagatttcaatcaatgtcagttaggacttatggataaacaccacaacttatcaagttgtccaccacgtgagacaactctgtgatgtactgcatacaaattgctgagtccccagcaggactgagacccagttgtctgcagtgggaacatcctcatcaccgtatacagtggtaatgtgctcattaatgcaacttgcattggctactatcccttcccgtcccacatttccactttcctactggtgctttctgggatcttcttcctattgaaaagtaaccgtttctgtctttattttcctctacatttctattagctcttgattatgtctcactgtctctgggctttgttgcctattattattcattgatacttactatcagttgtggaaacccaggtgaagctcagaccctgactacacttgagtctcagaattatatctagaactccggcttccttttgtaccctgtattaatgcttccttcctctctttccagtctttgcatgttcattgttttcttccgtatccttataaatgcagtgaagaaaatgtattagtccgtcctcacgctgctttaaagaaatacccgagattgggtaatttataaagaaaagagatttaattggctcacggttccacagcctgtacagggagcatgatgctggcatctcctt

SEQ ID NO: 586485 - DNA, 4001 bp, Homo sapiens; identical to SEQ ID NO: 586484

SEQ ID NO: 586486 - DNA, 4001 bp, Homo sapiens
gaaatgtgagagaaggaagagaagactgaatggtaggagaaggagtatttcaaagagatctgaaagatttgtgcataagggaaaagcctggatgcatattttggatcctggtgagtattttaacaattttcgagccagacttggtggttcatgcctgtaattccagcactttgggaggctgaggcgggtggatcacaaggtcaggagtttgagaccagcctgaccaatatggtgaaaccccgtctctactaaaaatacaaaaaaaaattagctgggcgtggtggtgtgtgcctttagtcccagctacttgggaggctgaggcaggagaatcacttgaacctgggaggtggaggttgcagtgagccgagattgcgccactgcactccggcctgggtgacagagagagacactgtctcaaaacaaacaaacaaacaaacaaacaaagaaaacaaaaccccacaattttcagctgctggtggtggtagctgtgggagttagaataagatccttcacccttgtttattttgccccaacatcatcagaagagccaaacacacacacacacacacacacacacacacacacacacacacacacacacgtgaagtcaccttcttaccccagtgactgtgttcattttggtccattggtgttcctgagaaacagagagacaagaaacttatttttcagttctaaatcatgaaaaattcttatatttcttttcttttctttttctttctttcttttttttttttttttttttgagacacagtttcactctgtcacccaggctggagtgcagtggtgcgatctcggctcactgcaacctccacatcctgggttcaagtgattctcctgcctcagcctcccgagtagctgggattatgggtgtgcaccaccatgcccatctaatttttgtagttttagtagagacagggtttcaccatgttggccaggctggtctcaaactcctgacctcaaatgatccaccagcctcggcctcccaaagttctggaattaaaagcgtgagccatcacactaggccaagatccttatatttctaaacaaccatgtttcatttgtctactcataagggacaaggtgggtgggaaaggaatgacttcctactttacagagaactggaatcacttgctgaggggctgagaagtgggtttcatttgtaagcctcatgcccagctctctctcgctttcttcctcccgtcctctcacagatcagcccggctcccttctgtttttgttttgcctgcacactcttcgcttctgtcagctttctctgtaggtgtgccttcccttacaccttaggctcagtcctccctttccctctctttcttttcccaccttgcctccttccctcctctactctctccaaacctcctccctcatgttgagtctttgctgagagactcagtgaatgaagattatgactctgggaaaccgtgcagtcctttaagctggaaatacacttcacttgatccattaatggcttgaatttttctcattccccaacagcccctggttatgaagcccttgcaatgtaggaactactatggagtgagaaatatcggtacgttttcatcagctagtttctcttgcttaaatctggcaggcatagaccaagcgtacaagcacagaaaactgaaagccaccgattaatgcccaaattcttcccagttagcactttttattgactttatactatggaaattctttctttgccagtaatgtgtaaagtaaattacatcggtttcctgtaaactggctccacttaaggaaaaggcagtcactctaaattgcttctcttaaaataggacaaatttgttctaagaaaaatgaaaatgtttgtgcatggcttgggacctagaaatcaacactgcagaacttttcgtaaatctgggcttacctgatttactgttcaaagaaacagttggctccctgttcagtcctgttgtcttatagctcagctccaagagaaaaagaaagtaaaaccgagactccagtcggtcttcttcctctcttgaatcttcctgagcttcctgactgctaatgaacgccaccacgtgcctgtgtttgaaattctctttcatgccattatgcaaaataaacagtttaaatggaaagttaatcagtagttatttgctgtcatgtgggccaactgtctcttcttctcaaaagtgaaaaaagagtgttttaatgatttcatctggactggaaagaaaggcatgaatgccaaggaagttggtggatttcagtccttcccagctgggatatgtcccaacagttagaagtttgtctagatgcaaatggccccctgagaagggcttaaacctcattgacaccagcagcagggattgttctaaagcagatgccactgggagagaagaggagcctctgataggcactgcccaggggaagaagggcacagaaaggggaacctgagaggggacatttttgtctgagtctgattgtaaggatcattaaccatcaaaacatttttacataactcattcatggcttctaggattctgggcctttcttccctgtccagctctgtaatttcagagaacctccctgtggggagaaattgtctaggaaatgtctatagtaatactctggagtgttggctgggtcaaatggtatttctagttcaagatgcctgaggaatcgccacactgacttccacaatggttgaactagtttacggtcccaccaacagtgtaaaagtgttcttatttctccacatcctagcatttaaaacatttccttttgattgtcttggagtttccaggtttatcatagactcagttgcaaatagtgataattttccctccttgtttccaaaaatatcttatgttgctttctcttgtataattacaattgcttgctaccttttcaaaagtgagttaatgtgcttttattatttatttacctgtagggcacctaatatcttatcattaatattgatgttggttattggaaattaattagtttattttaaaatcagtgtggctatactttgcttagtcctatttcattaaagtcttttatctgtggtataaatttagaaaattttattttgacgttgactgatataattccatgtctttttccttttgacctactaatattgcaaattacatcactgcgtttcctaacataagtgatatgtacatgtacatgtgcaaaggtttgggttcctaggaatacagactgttgagatgaagataaaatggatgaaggaagtttattagggaatcttctcaggaaatgtgctagagggagaagggaagaacccaggattaggcagggagaagtgagactgagatgtagtcacaacaaatatagactctacagggagttctaaagtttggttggactttcagaatgaaggagagtgagcagaactttataatccccatcggatgcaaacttcctctggaaaagacacttgacttacatagggcatctctcttcagcataagctaatttctggacaggtctgacggctcaacagctgagagctaacaactggtctcactcccagcaactggagataggtccttctgtttttgcactgttcctctaggtttggagatgcaaatattgcttctcctgcttcatcttttagatcatctgtagagacttccaagcacagttttaaatatctccctcatgaaatttcttgttcaagccttctcactcctgtcccttctgaacatgagcatacatggaacatttcccctatgtcccatggttctagtaagtgatgtgactacagccttaaaggaggagtaagatagatgttgggaggaggtgaggaaggagagggcaggggctgagtagaggtgcatgttttagagtactatgacattttaaaattcattttattcccatggttcaaggcaattttggaaaatgggtcaagccgaaagaatagaccacagatttcctgcagtcatattgagatgtatttgacaattgtt

SEQ ID NO: 586487 - DNA, 4001 bp, Homo sapiens
actcttttatcctctctctctcatcagcccatcaccaaatcctattgattccacttccaaaaaactcgaaattacccatttctctccatctttgtgctaatacaacccactgtcaattgtatacaacttaacaggcttctaattgatcatctccccttcaatcccttttctactctacaatcagatgttcttttaaaactaaaatttgatattttttcttgtttaaatttcctagtggcttactattggtttcaaaataactgaagtcctcagaatggcccataggccctgtgtgatcagctctctcctctctcctatgtgtgagccacactaccctcaatgttctggaaatctaggctccttccaccttcaaggcctttgcagttatcattccttctctttggagcactcaccctccaacctagtgcccagcttgttcctgctcaacccgcaggcctcggctctccagagagtcttccccaacaccactgtctaccagcaacaccctctgttatgatccactgcaccccagaggcttcttacagaatatgtattactttaggaagttaattgcttgatttttttactgtctcctcttatactacaagctttgtgatgagaagaccacatatgtcttgtatttctcattattccctggggacaagcacaatactgggcaaagaatggttatcgatcattgttaaataaataaatggataatctccctgcttcttgcctttgattgatcattatgtccagcccacatctgatctgtgaaaatgacaatccattcctttattaattaatatgtagtgttatagaaacatggtattaattttaaatgttttatttcattgctacctacaaacattttgcaatggagaaagatatttgaagaactcttattggagcagactttgaacaaaacaggcagaaaatggtagttgttaaagacagagtcacctcataggaagccaacaaatatgaaacactgtgaaaagccagatatttcttttgaatgactatttctttatccttcaagaatagggtataggaaacagcttcttgtaaacaagagaaatcatggcattttttaaaaatcagctttggtggctggtgttaggagagaggataggacaccagcaagaagaaaacaatactgtgacattctgggtttttgtgacattctctgggtgtttcttcatatcctccttctagtgtgtgggctctttaatgctgctctgctgttaataattcagaggcaaagccaggagactgtgcttctgtaggtgctgacttcaggtggctgaattctcctctctctgcctaaggaacaagcacccatcagcatccagcttctcctgaactgtagagagtcacaccaggtggcatctccctcctcctacccgctaaaggggagctcaatgcccagtaaacccaggactgtccctgaggagacagtttccctaacgggcagctccgagcagacagttaaccctgtaacaagacctcagactgcagagcctccaatcctgacctgggtgcagtctttgtggggccacatatggagctgtgccccttacacatcccaatgttcctcttcccaccagctcccccagagctaattctgtccgctcacccaactttatccctggaagaatcaaagtttctatataaattccacaaccagcgagaggaaacatttatttgtaaaacaagtatcctctgagcagcaatctctggaagaggcattgatttgtagggctcagccttgaaaacagatcacagcctaaaattagcaaagccaggaaacgggaaccagcgagaatatagtctgaaaacatgtttaccagacgatttaagatacaggtccctcctcaccaaaatcgcacattcgtcccgacccccaccacacacacccctattcccttacctgaaaaatcaggatcttgcacccctctctgattttgcacacaatactaagccaggatgttgagaaacaggagaagagaggaagtgaggggaggagctgtccagatttacttgtgcaagggacctgcccacctgatcatccagcagctctaatagaactttctgcagggatggggttgttctgtgctgtccaagatggtgacccttagccacacgtgactactgagcgcttgaaatgtgacgagtgtgattgcagttctgaattttaaattttattttgtttcaatttatttaaagttaaatagctactccattgtcagaattctaaaaggcaaagtcaggcagaacaacttgcaccaggcattttccccagaaggaaagaaggaatattcagcttggtatgcctggtggctaccatactgaaccttgcaaaggctctgcagtgagacaaaaaacatgggtcatgctgtgacattctggaagaaacttctgggccaaaactagagagttatcagttattctgaaagacccttgagcccctgaacccctgctcagcacaacaggcctcccagctaagcccccatacccctttctcccagtacctcaggtatgtcctctgagtccacagtgtgtccttatttccagggtatgtccatgagtcatctgctagaagcaaaagagagtaaatgactttcactggactgactaggatgggcccaaaattcacctcctgagatggtcctggaaccactgaaatattctaaacactgacatctgacactacttaccactaaaatggaaactttgagagtattgtaatggggtcccagctcaccgttataaccagttatttttccattgtaaaaggggtctcaatttaccattataccccacagctgagaccttatttagaattacatagcactttagtaattataaaattgctaataattctaaagagaactgtaagagaaagacatacatttctttgaggatagaatgtgattggccctgggtatacaagcacaggatggctacactaaaaagcagaacaaggcaatggaatacatcttgcaccaacagtaaggataatttacattccagagcaacatgacttaaataacaaagaccacttggtcccttggtttgacaggcaaacgaaggcaagtccaaaagaacaggcagcatgagaaagcatctccgcgattctgaactgagataccttaaaagactaggattatattttgtttctgaagcctaaacctggctagaaggtatatattattctatttaattacagaaattgatgcaaaatatagtatttatttttagtactattaaagcactggatcattacttagggaatctttattcaggttacagggatcactgcagtaggaaagttctctgttagggactacatttgcagtgagcaccacgtttcatctaatgctttaacaataaagcaatgtgtagacaaaaatgtctacattaaagatccagaaatgaaaacaataatttgtgataccacattaaaaatttagaaaaggaacagcaaattgaacctaaagtaaggaggatgaaggaaatactaaagggaagaaatcttgaaacagaaaaaaaaaatagagaaaaccaataaaatcaaacatgaattctttggaaataattaataaaattgataagcctctatctacataaatcaagaaaaggggcaaaacatacagtatacaagttattaatatcaggaatgggaacgagatcatgcaggcattaaaggggttgggcctgatcacctcaacatctagctccagttaaaaaagggggagaatcaggaggttatgtatgctaacctccaaaaacatatgaaagagacagttcaacctactgcaccctcaggggaagctccggaatggccacccccacctaagccttgtgaactgcaggcatgggagcctgagatgccgtttgcggcacctgttattgcacaacctgccgttaactatggtaaaaatcagactcagccaccagttaattacggttaaaaattcagacttgtccacctgtta

SEQ ID NO: 586488 - DNA, 4001 bp, Homo sapiens
cctgccaaaggtcacatatttacaatggagctagcatcaggaaatggctccttttgctgtgtattgtccttgattccacaggtggaaaaagagacttttccaaaaaagtcaacaaacctcttggaacatgtgtacaatgctgccactccctggtcaggagacaaattaattggacagctagaagcctaccctaaaaccaacacacagaattttattgcaaaatcttgagtgcatttcttataaaaggttattcaaaaataaaattgctggtggcaggagtttctctgaattgaggtcttttcttttaaaacagccaattgcctgtcacaaaagccagtcaaactatgttatgttagccaatgaccagcaacaatagctctcccaatccaagctttctgagtggatcaggctgcattgaggaatacattttttggcagatattcacaaataacaaagtgttcacaggtgagtcagaaaggatactgatggcaatgctaaaatgagtcatggagaagattataaaagaactgaatagagcgtggtggacacaccgtaggcttgaaggaatgtgatacgtgttggtctacagggcagacaaaagtggaggaattgagaatgaagacaggcgtcttctccaaaggaaaaattttactaatcgtcccacaaaagagaccaaagttcatgagagattggaaggcagtgtgcaagcaagacagtagcagcctctggcaagctggtgggagggtctggctcagggaaaagggtgaagcaaatgaacaaaatgcacattccgatttgaaaattgcatgaacctgattttaccatgagaagagcttattttagcaaattacaagaaagcagcctcttccatactattttagaaaagatcaaaccacttcttgtcttccttgttcataagtatctccttcacccatctgccccagcccatgtatttccaggtattggaatcatgtgttttgcggtttggtgtgcgtccggcagggtgtcataggaaaaatgtggggcatctgggggagcatggggtagttttcagaagttgaaagtcacaagacaaggtccactcaggggtcttgtttggaacatgaggctcctggggtgggaaaatatcccacatttgccctggggagccctaagaatccatcctcagctcccaggcttgtctgagacatggtacgtgtctggctggtctgggacaggagaaattaggagggtaaaattgagaagaatgccccggcatgctaggggagatgggggaaagcctatcaccctctgggagcttcagttctcccatctgtcccactgatgagaggatcagttcagccttactccctgagagtttcatggagatcgacttggctaagtaatgggcaatggggcagcaaagcccgctgtcctgggactgggctgtgagtgcaggcacagattcttcaggctgtgctccaccagctgtgcacctgctgatgcccgcaacactcatcaccattgccccgttttactgaccagcgaacccagaagtgaggggatctgtgcaaggtcatgtcagaaatgaacagctgtgaccaaactgtgatcctttcaattcccaaagtctctgtgagcataaacccagttctccttaccagaaacggttgttgtgccctgtcctccagggtggcagtcactgaggctctggccgctggtcctctctcaggaaggtgaagtggcagcagagagagtcctgctctgcgtctgtgtgcggggatgctgttcacagggctgagggaggttgagcagacgcagttaaggaggagccatgtgctggggctgaaagctccatgactcagctgcacaaaaagaaaagtagagattatggagtgtgtcccccacacctctgcggactaggacaccctggtgttggctggaaactgattgggaacaagaccctgaaaaccagccgaatgcagcgatgtgctgcttccttaacgggtcacttcctgtcatgagcctgccctgggacagtgtgccccatcccatttccttttttttttttttttgactgtttcaagcaagcagtatttggaagaaggagatatgaagggaattacagactctcccacttccaagttcagaaaaggtccctagtgactggaaagttctgggcagcagctgctgccctcagcacccatcaccggggcaccttctcctcccagcactcttgggccccttctcacaggctctgcttctggaaagtttctgctaaccaggatcagaaaggcactctggtccaaagaggaccagaacaagcccttgcagggtttgactctgggctcgtgactgaccctggtaagctgtctggcacgtgatggagcccaccctgtggggacattgtggagtctacgtgtcagtttatctggtaagggttgaaagcagggtgatagaacctctatttttgaattgattgccatttaaggctagagcagtggacataaacctgattgccatttaaggttagggcagtggacataaacctgattgccatttaaggttagggcagtggacataaggcaattatgcgatggagaacacagtgggacttaggcggagggccgtcatggcccagagaatccccatatccttttctgttgacatttgaagtggggcttacagtcatatggtaacaattgtctaagacttgatgggaaaacaattttaaacaatctcctgctagcccagaaaacctctccacagaggcagaagagaaagaaaacaattttattattgaatgtccattgaaccagaatgtgatctggatcccagacaatccaggaagagattgcaaagacggagagggatgccacctggttatacagccaggcaggtgccacctattacacacgtgttctcaagttaaaccataactaatcctcaagtaagaggacttgacagcaccctttgacatgcatagttcatcctaaattcactcagtaatcatctgtgttggctaattgtctttccagaggaaaagtaaacttctcacatcctctatggcaagaggaagatttgcaactcagaaaggtgctggcagatgtcaggctcctacctaagttaggctcctaaattaggcccctattttcacacagagactgggaggtggggacgctaccttccttgatgtttgcatttcaaagggatggcttccagatgctctacagacagccctgggctgtcaaacagcttttaaaaagatttgcattacaaagggtagagaaagatttcacacttacaaggtttctaaagaaaatgctctaagaagggaggggtaattcttttccactttgttttttccccagaaaagagaattaatgttttctccttatttttgatttttattcgcccttacatttttaaattcttcaaggactttcaacctagtcagcactcataatttatgtgaattgagcagagcagggcagaaagtgggctgtaatctgaccaggatttcacccttgctagatagggaccaggtactcccccagcacctggctggaatctttcaaaaacttgaccaacagagttcacatcaaaatcttataaacagtgaggggcaccgaagctaaccattcccatcaatgtagcaaattcacttaattctggcaacatcttcaaactccttctcttctttccttttggtttgaactatttgcaaacattatttttatccactgaactgggtgctctggcaccccagctaaggactgattttctgctttgagatctgttctctaagtcttatctcttctctagcagttcccaggctcctcttatggctcaaagagaccccagggagtcaatgatgaaatgtgttaactggtctctatcagttttctgggtgagatcgtgggctttttagaggccagggactgtctttaggtcaggatcttgctagaacttagccctagaaagtgctcaaaaatacttactgagtaaatcagtaaaacata

SEQ ID NO: 586489 - DNA, 4001 bp, Homo sapiens
cagactttggagaagactgtgcagtgagggttacagaggactgggattgcaggggctgagctgggaaggaagccagagacctcaggggagaagcagccaccagttagctctgtctgggcctcagcatcccatcagtaagaatgttgggcctgaactagatgcctgtgaatgtctcttcccctattaaggtctcaacatacttcataacattttttagagcaattcttagtcctttttgcaaattagggccacatcattcccaaccaggaactcctgtcccctttcccatgacagcaatgtgtcctggcttcatagactaacacagttctctgtgccaagatcccataaggttctctctgctggattttctctgtgggactgaggaggaagttgcatggtccatgactgtttttccagatcatgtaggacattcacaaccagatgaaacagatccagatgaagggtctggggtgtggggaaacctaagtccaggggaacctgatagacatgtttttctcattgccacattgttagatgtttgttctattctgttcacctggcaaacactccagtcctccccagatcccagaagtatatatgcggatattgctttatgattggtaaagatcaattttgcagtgctgggctgggcatggagggagtccaggaaggtctgttgactttctaggaagaaagaagaagcaggccaggcggacagccttactcagacctgaacagccagattctggaaggagtacaatatttcacctaccaaagggagttagttcttcctaactggtggcctctcaatctctttgtccctggcttccttacatccctggtggaaattgaggcagcactttaccaatgtaatctcattcctcctttagagagaacgggcaggcagcttaacaggaaacaacagccgggtgggactaggctgtggcatgcaggaacctgcactgtgccttcgcagggttcggggaatgggtctgcacgcaaggcacctccctgcctcctcctagaccctccccggaatggcacctcccatgttggccacagtgtgcattgtctccaacacagaagatggaacagatagtaccatccttgtcatattgctctggaagaaagcaaaactcagagaagcatcttgccaaatattaaacagtgactttgtcacaaggcaaaaagttctccagacgtgttggtcacagctctttttatcacattacaaacctgcacacaccacagcacacacaaatacacaacacacacacatacacaaaacacatgtaccactcacacacatgcaggtgaacacacaaacacatacacaaacacaaatatacatacacaacacacacacaacactcacatacacacacaacacaaacatcacacacacaaacatcactcacacacattcatgttaacacatacaaacatgtaaacacacatgtacaacacaaacacccacacatacacatccaaatatgacacgcacaaatactcagacttacctctgcaccagctcacaggcaagagaaaggaccacgtttctggtctcccggccacgcactctcacggaggaggcagagaaaagcttccacagtgtatgaacacaaggaggacaaggccgatgtttgcttatattttcagcaaaatgttttcagagagctgggctggagacctgcccttgaaagagcagtgtccgctggagatggaggaacaggaagtgggtaggagcaccggccttcctgagtcagaagagtctgctgttgcactttgcagcctcggaagtagaaaaagggaggataccagtggtgggattatttttatcctgagccaggataactagaactcagagcttaaaaagaggcagatgcctcagaaagatttgtgtcaggaggagtgactttccctgatctctcttttctgaaccccacctcttccccagggaacttctatgcctcagtattggggcaaacagtcattgtctcctttcttccccaacctctccttcctttaatagtttctctcaggacaaggtctgacactcattacctctaaggcatgaatcattggtaattacaattgttacagcttctagaagatctgcactataagaaaagggaaaatacaaaagaatgtctaaaatgtaggattaaagagagcacttgttatgggggaagaacaatattttaaacacaggccaagggagaaaacacctcagcatcctcaaaaacatgttttctaggactttactgacagatctgataactgtggctaaagggaagccattgaaggaagaaattcagaacataggagcataggtgatgatattgttaccacatgattttaaaatgttaagattccctaaaaaaattccactcaatctactataatagttctaattttctttggttctgttctggttgataatcatggtgtatttattaaaattgttacatagtatgtgtgtgtgtacatatatatatcttttaatgttctacttaaattattctgtaaataccctgacacaattaattttttttttttgagacagaatgtcatcctgtcacccaggctggagtgcagtggtgtgatctcagttcactgcaacctcatcctcccaggttcaagcgattctcatgcctcagcctcccaaatagctggaattacaggcgtccgcacacccggctaatattttgtatttttaatacagacggggttttaccatgttggccaggttggtctcaaactcctgacctcaagttatctgcccacctcggcctcccagagtgttgggattatgggcgtgagccaccgcgcctggtgtaacatgattaattcttttttttttttttttctcgagacggagtctcgctctgtcgcccaggttggagtgcagtggtgcggtcttggctcactgcaagttccacctcctgggttcacgccattctcctgcctcagcctcctgagtagctgggactccaggtgcccaccaccacgcccagctaattttttgtatttttagtagagatggggtttcactgtgttagccaggatggtctcgatcacctgacctcatgatctgcccacctcggcctcccaaagttctgggattacaggtgtgagccaccacgcccagccacttaattaattcttaaaagtcatgtgttgatctttaccattccattgcctaagtgtttagaaagtatttagaatgttattactccacccataattgaaattaaccatctattttgaattttaatcatttccatcttctgcaagctgactctggagagttgcccagacctgcagttgactgagccagggatcaatcagctcagcgtttagccatgagaattgggaagtgtttgttactgcaaggtaatctggcctaatctaattgatacagcatataaatctgatgttggttcttttggtttgttttttattttttgctgactctcacttttggtgatttcttttctggaattacattcacagtctttgattgtgaacttaagtatggaaatccttgggattgaaatcaaggtggctttactccagagaagatttgtgtacatttttatcaggaactgacaagggggtgctggtactactaaactgagaccacttcaaccccattttcagatttctggcttaatccagaaattcctcaatctacaactcactttacaactgattccaaatttaggctccagagagtatggctgagagcttcatttgctcttggggcaaccaatcttccctttgagtttatggctctactcctgtttcagtttatttatttatttacttatgtatttatttggttatttaaaaaaattttgcccacatggtgttatccctcacttcctgcaagccaaataatgtagtccattgttttgttgagggaggacttctctatgctaacacagcatatttacaaagaatgtaattcacaatctctgttatgatcttgtttcttt

SEQ ID NO: 586490 - DNA, 4001 bp, Homo sapiens
agtcaaactttaatctgatccaacctccccattcatataaattcacacaaaacactggagctagaagcgaatgttaaatgacattgttaggatgcaatcagcagtatgaatactgcccagttctgttggacaaaagaccttcccttccttaaacaaagaaatttaacacaaagaaacaaggaaggtgaaaacctacacattaagtgaaacataagagatgtcaaacaattgtaatgtatgaattttacttagatcctacctcaaacaattttaaaaattatgagatcttcagggaaatctgaatacaactggtagtattaaaatttatagttgccttttgaaggctgtttatgaaattgtggaaatgtttttaaatggtctttatctttcagagacacatactcaaatatttactgataaaatgatgtaatgtctgacatttgcttcaaaataatctgtgatagagttgagaataggagcagatatttgaacaagactggcataaattgataactgtgagattttaatataggtacatggaagttccttatattgtttttacctttgaataagtataaatttttcacaaataaaaaaattaacccatgtatagtgtaaccactatcgagcagagactgcatatcagaacaccctgataaaacatgttttgtatatctcgtttattcttcaaaaatactctacagtgaaactaattttattattctaattttttaaatgaggaagctggtgtggctcaaaaattctgggaaacatgcccctggtcactgtgctaagaggtattgggcagagaagacattcgattcaaagtctgtctgaatctaccatgctcactcttaaccgtgcactctactgcctgttcttggctactctcaggccatgattctaaattttcattgacatggcacagagatagaccagtggagggcaaaggagatgatccacgctttctgcaaaaaggtgagctgggagccagcctgttataagggaaccgtgaggagggctccgcatttctcgtggacttttccatctctctcatattgagaagccaaacgtgagagagatggtcagaaatatcactttaaaactttctcaagttttaaaactttctcaagtggttcctggaagatccagaggacctccagctaagagaaaggctgagaaatgacaaaagcatttacaacagaggtgaacagttctaaactgtggccagacccaccggttctagaaaatttcgtagctccttgagatccagttccctctgctataaaaaaggaaaataaaaccaatcttgcagggttgtccttaggctttcatagagtgatttctataaaggtcttttatggcaactctttttgtactgaatggcgcagcagccccacatgttacactgttagggacacagcttgtctctgcttaatgctggaaaaagtcagcagactgaattctagtgttcctccgccatgagtgatctgggtaccccttggagaatcatcaaaatctctgggattgggattctgattctttttctgtaagaagagggacttagacaggtggactctaaattgcctgtcacctttacaaatctgtcttaggagcccttaatttcttatgaaggttatcaggcaacactctgtgtctatcacaacagccagtgagtggagggtgcactatgcagccatgtgtgtcctgttacatatgagatgcatgggctccatgcaaacaaatctcctcactccccttctactcacccctcccacagcaccttctatgcagtgctgcttagcacagtgccttgtccctcctaagggcagagtccactccagccacacaccctgtccccactgcccttcgcagcccaatagcaccagaccctcttctcagccaggctcaccttctcttgaacaagttgaattttcaggttttctccaaggaggctgcttgagctgttgcttttgcttttactgtgagttaaaagtgtctgtaccgccaccaaaacctctcagtcaggaagctcaggctgggtggagccacacacacaaaaatgtttgtctttaaagaaacagaaatacggctccataatctggtgattgcttcagttttgcccggttgaaacgttttgcccatgggcctgctataaacaccatttccaaagctacatttttcgcttcaggttatagtgatggatgcaaaagagccttattaaatgacccaaatattgcctagaaaacaaggcacaggacctgattgtcttcccagggtggagtgggaggctgaggggtgatttggggaagaagagagacaggcatataccttgccatttccaagcgtagagctgggggttcttagtgattgtataatatgggttttttattatagtctttcaggaaggcctcaagttactcattcaaaagttaacagcactgaggctcaaaggcagagtctaaatcattaggaaccaagggaaaaaaaggaaggtgacgcctggaaaaataatctgcccatgaacacatagtttctctagttgcttttcgtataattcttccaagtttgaaaatatgcatgacctaacaagtaaagatgcacccaaggaatagatcctacatcccttccccaccttcctctctaccccacatcttcctaccccagtctcaggcagagacagattttccagaatttacccagtggatggttccaatctgctctggaggtttcttgaggtgagaggcaggttcccaaagctctcacggttgaccagatattccagttggctacgtaagaatactatgtttagagttccaagcccacagcccctgtcgcggccttgccaccctccagcgccccacgccaggagtgggcctagagcgctcgccttgcccctctgtgatccgggctccggcacccgcccaggtccgcaccactggcagcctgtagggagtcgctggccgtcgtcgccgctaagtaggatatatctgcatcttcaaaggaagataaaacaaaagccttctttggaatatttggatttttgtcactttctgtgagctttagttcaagaacacaagttgaatcactcaaacatgaaaaacaagtctgaaaccagtatccatcaatacttggtcgaagagccaaccctttcctggtcgcctccatccactagagccagtgaagtagtatgttccgccaacgtttctcactacgagctccaagtagaaataggaagaggatttgacaagttgacttctgtccatctagcacggcatactcctacgggaacgctggtaactacaaaaattacaaatctggaaaacggcaataaagaacgcctgaaagttttacagaaagccatgattctatcccactttttccggcatcccaatattacaacttattggacagttttcactgttggcagctggctttgggttatttctccatttatggcctatggttcagcaagacaactcttgaggacctattttcctgaaggaatgagtaaaactttaataagaaacattctctttggagcagtgagaggattgaactatctctaccaatatggctgtattcacaggagaattaaagccagccatatcctcatttctggtgatggcctagtgaccctctctggcctgtcccatctgcatagtttggttaagcatggacagaggcatagggctgtgtatgatttcccacagttcagcacattagtgcagccatggctgagtccagaactactgagacaggatttacatgggtataatgtgaagtcagatatttacagtgttgggattacaacatgtgaattagccagtgggcaggtgcctttccaggacgtgcatagaactcagatgctgttaacagaaactgaaaggtcccccttatagcccattggatatcagtattttccctcaatcagaatccaaaatgaaaaattcccggtcaggtgtagactctgggattggagcaagtgtgcttgtctccag

SEQ ID NO: 586491 - DNA, 4001 bp, Homo sapiens
ggctcacgcctgtaaccccaacactttcagaggccaaggcaggtagatccctcgagatcaggagtttgagaccagcctggtcaacatgatgaaatccccgtctttattaaaagtacaaaaattagccaggcatggtggtgggtgcctgtagttccactcgcatgtatatatatatatatatatatatatatatatatatctcacacacacacacacacacatatacacacatatatatacatatatacacatatatacatatatacatacatatatacatatatatacatatatacatacacacacacatatatatgcaagtgaagtgagatgtctctgtaaattaatttaagaaaaaaagacactagtgagaaaacagcaagctgaaggaagcagaggcctcccacaggtctgaagaagaaagaaatttctttcccaattaagcgacacagccttgcatggttccccagcagagtatgaccaaaccaatgagtcttggctggactcctgcctgcagctccacatgatgtcaggacctacacacacacacccacatacacacacgcacatgcacactcctaccacacatacagcttcccagccagtagcacttcaccccaacatgtagaaagtgcacttaaggacaaaaaggtacccaaactcaccctcactcacgctctgccagcccacatttccctctgctcaatttcccaggccactctggagaccccagcagagcaactgagagaaaaagagagcgttcttcctataattcactgaagactgtaaaggcagcctctgcctccttctcaggaaacagcccaaggcaaacgtggactcaggcatctgagcacagcatccagccatgcggggattcatcccacatctaatcgcagttcccacttacagagcagggtggttggagatgcctccagagcccagcgtggggaagaccttagacccagcccagcagggcaaccatcaagaggaagggaagaggttaactgctgaggaccaggttggctgaaatgtaggtgaaatcagaaatattgcttttggtaaggtcttgacccctccaatccctccaatgcccagttcacagaatcctaactgtgcaaggggcaggaaagatcagaaaagcagacgtggaaaaatcagcatcccccaccccctgctttgcgggaggagctccgctggcttcctcctgggggctgctctgcggcaccatctagcttcatggggcatctgaccggctgcttccgcctgcttcttcctcccttctgccagtctcagccctcctcctcttcagggctcacacccactccccgacacgccttcttttaggacagccactctcatagatgtctgggaatatgcctctgtccccatcctgccgaatctactccccagcaggctggggagacacgctttggaccaggaggaaagcttcccagggcccctgccattcaactctgccattcaaccctgccattcaacccagcctcctctcccatggctgagcaggctgccttcccggtgccaagcccatcctcccccacagccatgcaccagtgcacacacatctacacacgagtgcacatgtcacacatgcactgcggtcgtgtcccatggggtcccacggcgtcccacagtctccgaggctccgcaatccacctggctctatccctccatctctcacctgggtggaagcagctgctggtcccccagggcacaggatgtgaggaaggtgaggagggtgaggggagaatggccggagagcgaccctcttcccaggccctggtcttcctggcaggagggtttcgggtgtttctgcaaaggaagagatttctagaaatagccttcacatccacagaggcataaatgcagtcggagaggaagttccctgtgcaggccacaggctcagaacctcgagagccgtcggggctcagggaggagccagcatcggggacacacgcgccttccctgggtgctgagcgcctcgtggggtcacaacacagcagaaactgaggagcccggcccgtcccgcagctgcagactgagaggagggaggagaaatgacagcagaggcttggccaggggctggggcgccggggccggtgccaggctgagcttcagaagggctgcaagaacaggggcttggatagggcaggaaaaggacgtcaagccagttcctgttcctgagaggacagagattgtggcgccgctacaagctctgagcaaagccagctccgggcctctgtgtgcccttaagtggcctttaggacttcctctcacaagtccttcctcgcttcccttcccttccctaaaacccacaacccggggaactccaagcctgacagaccaacgctgcttctcagggaatgaatgcttttccccagcttgcaaaacgtgaaatgctagacttcgatgctttcaaatatttcacaaaatgaaatcccttttgtgaaagaacatagtgtccaaactacctggtctctacttcataaggaagtcaaacacggaggaagacttcttaaaaaatgtttactagggtaaaaatgatgtaacattaatagtaccatcctaaccatttctaagtgtatagcccacagtagaaagtacattcacatggttgtgtgccagatctgcaggacttttcatcctgcagcacccaaactctccccattacaccccaactcacctccccgaaccccagcccgggtaaccaccgttctactttccgtttctatgattttttttttttttttgagacagagtcttgctctgtcgcccaggctggagtgcaatggtgtgatctcggctcactgcaacctccacctcccgagttcaagcaattctcctgccccagcctcccgagtagctgggattacaggttcccgccaccacacacggctaatatttgtatttttagtagaaacggggtttcaccatgttggccaggctggtcttgaactcctgacctcaagtgatccacctgcctcagcctcccaaagcgctgggattacaggtgtgagccaccacacccggcctgtttctatgatttttggcaacgtcagatactcatgtgagtggagtcccacagtgtctgccctcctgagactgagcagaatgccctagaggttcatccaagtgagtgcgggaccctctgcgctctgcacagcagggccctcttcacaggatgcagaggctagggcctcgagggactggagctcaagttagttttccaaatgtctgaggtggtgctaagctttccaaagggaccccgcagaaggaggagcagtgggggtggctgaagtagaggggcatgcttcagatatgaagtctctacagtagtcaaaaccacaggctttggggagctgctgtcagcctatcacatcccgagggatccaccctccccctggactggtcttcatgcgccagccttgaggactgctctaccttgttatgaacctgagggaaaccctggttatgctgggatggctcaagaagagctttggggacacacaggacacatcttgatggggaaagctgacaaagcccttcccatgtcccactctacctgtctcctcattgaaagaggatctattttggaagaaccccacccttcctttacagtaggtcaacgcacataaaaccaactcattataatgaaaagacaaaaacccgaagccaggtactgcagttcatccccgctggggtactaacagaggcagaggctcagcaagaaactgtttccccaaaatagagaagaaaaggctcactcattcttaaatgaaatattaagcatccagggattgctctaagtaaaactgaagctgcaaataactcctcaaagattcagcaagtcgattatttgctgagttgaccattttgcaaaatgatctttcagcaaatcagctcctagagaattgatttccgtgcagaaggcaggctgccgggttctggtttggcaccgatctgaggcaggatgggggctccct

SEQ ID NO: 586492 - DNA, 4001 bp, Homo sapiens
agagggcagcgttctgttaaaaaaaaaaagggatagaacaacactgtccaacagaaatgactaagagactcgagaagactgatattcagattgcagttacccgccgaatcacactgtgatgtcagcctcccttgctgttactcccaaatcagcatatcagcagtagaactctactgctttttctgtgtggtattgagggttatgaaattaaagagtaggaacttggtccagcatgagttgctgcagttctggagacaattgtaacaagctgcaacgagaactgcagaaatgaagaatgagaattgagcagaaatcagagctatcagtgatcaagggggcctaagcccctgaattcacagtaattttccttaaggatatggccgggtatttggataaatctatagatattagaggacactgacttatatatgcttgaagcccagagtttctggcttatgacatgtgctgcaggtctgaggggcattcatttacaaaactttgatgataaggggagcagagaatgtggaaaaacagaaaagaggtaaatgaagccagtgagacaggaaggggcattatcttcagcaacaggaatgccaacagcagtcatcaatatttattgagcaggacaggggagagacacagtttagggaggcttctcccggctgactcttgaaccaagcccataaaaattgtgatgctgacaccagaaaattccagtgaaaaggcacagtcaggaaatgctttagactacatggcccaaggggcccttagagatccttcaacagcctctaatttgtcacagacatgaatccccactcactggatgttggaaagaagattcaatcacagagtttccttcaggcaagtcaggtgtctttataactctgcaaagtagagaatcaagaagaagctgagatttttcctaagtggagagagacctaaatggaagttcaggagggacaacggactagcactcttgtccttgttcgctggaaggaaccatcaagttgatggggatggacattgggatagattttgagagcaagagagaacaaagaaaagggttgggagtggcggtcagaacacatctgcctagaacctggttacctactttgtaacatgcagaagttgtacttcccagaaaggtgagggacctgccccgggaggagatcatcaggacacaaacatcagtgacaggaagagagcgtgtccttctcacctgcttcttgaaattgctctttggtttccaccactgggaggctatcggttgctttcttgtgtcttctggtgctctctgaagttaggaagtatttagaagaggaagatttgtgcttccaggtcctccaccatctccccaaacccagaagcacaagctccaaaaaagtaaacaagagacagaaaccgctgactccaaacatggtctttaggaaaatggtcttctcagaggggcgggacagattgcaggttatactaccaaggcaaggttctcggcgacatgcaaaggagctgggcatctggaacccatacaggtggtactgcaaccccagggctgccccctccaggacaagccgagcccccagctgagccacataagcccagagcagcctgaggcttccagcccctgggacatctgtgttgccctcccgtccctggatcagggtctcctcctccttcccctttcctgataattcccagtgccagatcacgtgatacagagtgaaacccatatagagggcgctgggtacagccaccaagatgacctggaagacccagaaacgcagcggggagagggggtggaaggcatcgaagcaggcagccttgcagcccggctgctgggtgtgacacacgaattcactctgctcatcaccatagactccaggcccactggcagccagcagcacaaggcggaatcccaggagcacgggaagcaagaggcgccccacgggggtggagcgccggctctcctccgccagcagccgccgcaggaacctgccacacatcctgttttggagcagaggacaagagatcagtgttgttcactgtccttcagagggagctccagtccaccttgtcactcctaatccaaggatcactgaaggcaagcttttttattcctctccaagtatctgactgattaaataccaagactctgattgcacctctttactacttaatgaaatcatctatgtaaaataataacagtgagtgtgtgtggtgtggctctctcttctgccctccccttctgtactgctggagtggagaggaactctcaggttggagagaccaggatacatcttcatctctctctttccctccttccctccgtctctctttcccaaaggctgaacgtaagagagtagactgggatgttttgttaattttcctttgaaaggtattgcttccccagctgatggctgccaggcctggtgctcctacagcatcatcttaagcaaattagtgctgatgctgagagggaatgtgcattctcttgcggtcttcttttctcttcctccatgcccttggatgatcacaggtgtgtctggatgtcctcttctcccatcacagtggtaaagttgagaggtagttaggttatggggctagatgtgatggatgaaatgaacagagcaagcatcgaggcttgctttagtctgatgctcttaggccttacaagctgaggaagaagagaacatttggaaggtaacccagcagaatttaccagaattacatactataggatttggggccagagccagaactgactagatagaaattcagatttttgacccccacttgccattgttccttgggcatattatctccctcatggtgacaggcgaccatgatcaaggataagtttcagaaatccctctgttccccagccaaaataccacaatgctacaagcccaagttcaccatctctatatttgtcctaatcagctgccttccccaatgcccagcagctgtttcaaaccgtccccatttagcctaaattctcactcatctggttaccctcacactcagaagaccatgtggtatggtctgaatgatgatcaagatgcatatgctagaacctaatacagtagtcccccctcttatctgcgatttcactttctacagtttcagttacccacagtcaacagaggtccaaaaatattaaatggaaaattccagaaatacaaaattaatgttttaaattgtgtgctgttctgagtagcactatgaaatctcacaccatcccacccaggatgtgaatcatccctttgtccagggtatccaacgctgtagacgctccttgctggtttgtgacttaatcgccattttggttatcagatcaactatcaatactcgttcaagtaactcttattttacttaagaatagccccaaaaagcaagagtagtgatgccagcatattgttacaattgttccagttgttctatttctttttttttttttttttttttgagacggactctcgctctgtcaccaggctggagtgcactggcacgatcttggctcgctgcaatctctgcctcccaggttcaagcaattcccctgcctcagcctgctgagtagctgggactataggggcgcaccaccacgccgggctaattttttgtattttagtagaaacagggtcactatgttggccgggatggtctcagtctcctgaccttgtgatccacctgcctcggcctcccaaagtgctgggattacaggcatgagccaccatgcccagccacaattgttctattttcttagtagttattgttgttaatctcttactgtgctaatttgtaattaaactttatcatagggatgtacatatggggaaaaaaaacatagtatatatggagtttggtactatccacaatttcaggcatccactggaggtcttggaacatatctcccacagataaggtggaagtgctgtactcaatgtgatagtattaagaggtggaaaggtggaagtgctgtactcagtgtgatagtactaagaggt

SEQ ID NO: 586493 - DNA, 4001 bp, Homo sapiens
cttttctcccccagggctcaactaaatcatgcactgtgtccctagacataaacaaaaccaaagcaaaacagaaaacactaagggaaacccacagcatccaccagctcaccattacctttgacacctaacaaaaaaagaaacttgagatccttgaacagctcaactgaactgttaagtgtacttaaaaatggaaggaaaaaaacgaacacgttccacaaataagttttcagaaatttaccatgaaaatctccggtagagcacaaactgtttccagtgcaggagtgctctgatgcatgaatatataaaggggagggggagaaagagagggagagagagaggcggggtggcggggggctgggggagagggagagagggaggactgagggaaaaaaccgtatacacttcaattgtacattcaaaactgtcccctctagcagatatcattacatccagccgatatccttacatcgaaactaatgccaccaaccctctaaaaaataaaatactatcccggtagttacaggcacgttaggaactttgcagaaaagcacaaagagacggtagagattacaaccgccaccttatccgctgctgaagagtttgtgtgcgtgttaagtgtttcgcccagcttctccttccccggctacaaacggcaaacacacgaatgagctagccagctcttaaactgaaaaacctctcgaagcaggcgagtgatggaagagagactctgaggggcggcatgagggtcaaataaaagtcgcttttcagttcgctcctccaagccccacagcgaccgcaggggggtgagattcccaaagccactttcacaccttcgataatgcactagcaaagagaagcccgaagaggctgaagtttccacggagggcaccgtcggggagacgcagcccgggaggacgggagggttgggctcgctacctctgcacacgggcgagccggggctccgtctctcaggtgagctgctcctccggtggctctctggggaccgtctcgggcggcccttggcccgcggcgcctgctcggccggggctgcggccgccggcggcgtcgggctggacgggctggggccgcgggccgcgccgggccccgggaggctgcccagcgaggcggcggcagcggcgacgggcggacgcgtgggactgtgctggctgccccgcaagagctggtagggcaccgtggcgcggatgggctgcagcagccggccggctcccgcagccggggcgcagcccacgccgccgccgccgcccgcaccgttcccgctcccggcggcggcgacggcgggcggggaccccgcggcgctgcgcctcatcctctgcgacgggggatgaggggtctgagaggaactggaggaggaggaggaggaggcagtggacatggtggctctgcgggccctggacgccgccggccgacacggaggcgcggggcgggaggcgcgcgagcgtgtgggagccggcgcgatagtgcgtgcgagtgtgtaagggggaggggcgggggtatcgctgtgggggaggagtctcggggctccccctccccaacgcacacccccgccgcctcggcgaggggggaggggaaggctgcgaaaacaaacgtccaacggccgcaaccgcccggctgggctcggtgtggcggtcacggccggggccgcaaggagcccggagccgccgccgccaccgctccaggcatcgtgctgacagggcaacggcccggatcacgcagccccgagggccgctcgcagccttctcctcagccctcgcagggctgcacgcacgggagaacccggcagctgcaaggagggccgggacccctgcttctggggaccagggtagagagaaagggcctcgaggtgctggcgctcctcggagtccgcgccaccgcaaacgccgccgccgccgccgccgcttctacccactcctcactccgaatggcaactaattcgccccagccgcaccccgcccccggcaccgcctcccagcgcccaggacccggcagctgccgcagcgagcatttccattggcttaggcgctccccactagaactcgagtgattggttctggaataggagtgagagaagcagtgtccaatgacaatggtgcctcctactttgaaggcggggcgtgaggggtggcagcgtgaggtgggggctgtgcgcgcagggaggagcgtaaaagttgacagccttgaggtaagtgcgagactaggaaagtgggactgtgtgtgtcctgcgcgtgtcccgacacccccagacacgcaaacgccccgctaggcaggttgcaggggctccaccctcctgggccgtctgtatgacttgagacacaggacacatgaggcaaactttaatttgcaagtacacctgcatccggtgggatgttttagttagaaccagaagactggatctcttttagtaagctgagttttcgtgaccagtagccttattaatcaaaagaacttctggtgatcaggagaaatgtctggaacctgcactgaacaaagtaaaatactcttacagcctaacatttgtagttatgcagtgaaaagagattatcaagttctatgttccaagacaataacactgaatagcaggggtcaacaaggaattttatgtcattacaccatcagttagatatattaatgaagggcgcccctggcttttccgaagcagatagcttcttgggaggaataaataccagatgtaatgtaataatccattgtggtaaatttgttttttattctgtaatgaaactgaaagcgtacaaagattttggatgactatcaaaaacataaatttaccccacagtaaaccaaggttttaaaccttaatcgggagcaattaatgtaaggatcttcatcagataactttcattaattttcaagaggttaaaagagaagcacaatgtcaaattggtctgctcgtggtgtctgcccacactgacaagcttcctctgatttcaggcactatatgcaggggtcactttcacgtacaggagccatccttcttttcttccttgtgtgttcagacgagaaagcatactaggttcagtaaaaaaattgatgaaactcaataaaaatacaaaaatttcatgcagtacttcatccaagtaaaactagtgatagttcctcagtttaccacatattataataagagctaacatttattcaccatgtgccagccgctattctaagaacattatgtgtgttaattcattcagtcctcatataatccacaaggtagatactattattatccttactgtggtctcagttgtggcataaataagctgtcttgcctgagatcacatagttagtatatggggagctaaaaatttcacccagacagactggctcaagagtctgaggaagcactctgctatagtacctggcagctcaaagctgtggggtacataatctgtagagtattcacaatggcccacaaatctcatctgtgagataagttcccatcagttcaaaggaaattttacaaatgaagacagaccactactttttttttgttttccagaataacatatattttaattatgaataaaaactttactctttcaaattttatataaatggcctatctcattaatttaaaaactgcattattttgtgtgtaaaaagaatgataaatgatttcttttcagtgacttttctcagaatagcaagaacaaaaaatctgacagattaaaaatatgtaaagctggctaggtgcggtggctcacgcctgtaatcccagctccttgggaggccaaggcagacggatcacttgagctcaggattttgaaaccagtctgggcaacatggcaaaaccccatctctactaaaaatgtaaaaatactagctggacgcggttagggaggctgaggtgggaggatcacctgagcccaaaaggccgggagatcaaggctgcagtgagccttgatcacaccactgcactccagcttgggtgacagaatgacaccctgtctcaaaaaaaaaaaaaaaaa

SEQ ID NO: 586494 - DNA, 4001 bp, Homo sapiens
tacattgttaaaaccagtcccggcagctttaatatatcccctcaactgaaatactgttctgctttagaaaaattaagagattttgaggctatttcactattttaaaacatagcattttcctccttcaaaagaatcttgacacatgtaattaagaaactgtcagactactattaatttttaatctaaaacctaaatgaaataattacaggaatcaatcaataaggcacctattcaaaattaccgagcaattacataaatactcaaaattaatactttaggtcaattcttgtagatttcggtctataatatgctaagacatcaaacaacacaaaaagtgtagcatggggaggatgaatggttcctgccttaaatagactgaaaagagctcatttcagacggccagggtgcaggccccccacccgccatgcccaatgcgctcaagctgaaactcttttatttttaaaagttaatttatttccaccagacacatatttcagggatctaaaaaaacggcctcatccaaattctgtacaaaaatcacatttaagagggaaaggcctaattactcgaattttcagcaaagtgtatatactgtgctctggaaagcctaactggagagaagagggaggagaggaaaaggggagcaggaggtattttttagaactaataataccagcccggctaatggcactgccatgtatttgcacagcggccggccctccatacctttgactaaagggttctttgacttggagacgcagacagtccatcatttcaaactgaagtggcagctggaaaatgtggaacagctggcaaagagctgggagaaaatgttttacataaatatatgtacatataaactggcagagggccatgagcactgtacccaaggccagaatctacccggcagtctgcactggggagatgagaagttggggcaggatgaccagcggcggagggagcctccttaatcctctttccacgcggggtcaggcagggaagcctggggtgcagcgcctctcgggggacggcatcttacagaaggaggtgcaatgggggacaggagcacaaagttcaggaaaggataaaaggccgggtgcggggtggagcgtccgcttcggacaatctgcttaaaagtcgcttcacaaactctgcaagtttgggatcaatatttacaccctctctgccttctcccgcccgttttcccgctgctactcaagaaagtaactgtcccctgctgctctgtgtaaacgcggcaccttaaatgattattgcatggaccacggttactttgtgtgtctgtgcgcgctgcccctggaaaggaaaagaaataagagaatcccaaatcatatacagatggtacaactttcacttttcctctatgacgacgaaggcgcgcctctctccatccgctcacaccacacccccgccctccgaagcatagcccgggctggagaagccccagcggcggcggcccccgcggcggaggtccccgcgcgcacccaccatgcctcccgcctccttccgcccatcccgagcgccgtgcgcgcccgaagcccgagccgtagagcgccaccgcgcaaaggaaggagccaggcgcgtgcggggctcgcggagttcttctgaaccctttggatgggggcggaggcgaggggcgccgccaccactgcggcaaacttcgtcccccctccgggaggtgaaattctccaatccgtctccggccggtccgcgggtcggactcttcggaaaggaccttccaggaggagggagcgaatgcaagccttgctcggacgcctcaccggcggctctctaaatctgggcgccttttgacagccattttcactccatcccgtccccacgctggggaccacctctggccccggaggcgcgggcgcggccgcaggagcgggctgcggggtccgcgaaacaaagaacttcgagcgggacgtacctgcggcggcagcggctgtcaagtccccgaacttcccatagacccgcggacggggcgcaggctggcggctccccgctccgcgcggccgcgggcggctacggctaccgcgagcggccgggctgggcgcggggtgcgcccgccgcgggcatggtgcggcgcgggcggccgcggggcgcgcggggaaggcgggagagcggcgcgggtgagtgggagcggcgggtgtgcgcgagtgcgagtgtgcgagcgcgccggtggcgctgcccctgcccgctccctcccgctcgtgcagctccggcatcagtttcggggatcgtgtaatccgatcccttctgactcacaagccctgagtgacagttctgatttggttcaaccgcgggagggaggggaaagagaaagaaagaaacccccagccgtacgcctctcctggcatccaatcgactttctggaaaaaggtcccatcccggcctggtgccccgtgctgggtggagaagccccccgccccgacctggcaccgcctgcactactcacggggtggaaaagttgtccctcggctccgcgctcccctcccgcgcgctccctccttcccttctctcctcctcttcctcctcctccccgcgctcctcctcccccaagttttaacagatgttgccggactctcctcgctccctcgcactctctcttcctccgccccggcccccgcccagtcccttttctttcagccactctcgggctcggaggggacgcgctgagcagcaggacgcctgccgccgcagggggcgaagttgggaaaacttggagtgctgctcgccttacttttgctttctcgctccttccaggccgcgccgggagcccccgcttctcccgcccgccgggtccccaagcccggagtgggtcccagctgcgaggcgggcggcggcggctgggaggcggcgcgtcgcgggccggggtcgggggctgggggggagcccgggcgccgcgagccacgcgcgcgctccctccccgccctccgccgccgccgccgccgccgccgccgcctcctcctcctcctcctccttctcctcctcctcctcctcctccgcccctccccggtcttcacacagacacattcatgcctgctcctcctcttccccctacttgaccccgcgccctcccggcgcgccgaagccccacccacccggcgaggggaagggggcccgggcgtgatgtcacccgcgccctctctcttctctctccacaccgccaggacaccccccaaatgcgcgccctggcactcgtgctgcgtcctgtctgctcccatcttctcccacccagcctctctttctcactcttgctcaagggctggactcccctttattcttttaaggcttctctgattaccaccgccccccatccttggctccccatctccttgttttacattttcccaaagccatccccgaaactccctctcgcgggatgatgcctttggaagttcagggtttttctctccaccggactcgtctgccctcggggccaaatccgcgaagcgaggaggagctcccaccacacagcctgctgtccctatgggccactttataaaagacacaaaaacaaagaccccaggcttggagcctggtctctaacgtgccgcttttccttgagctacaaagtgtctctgtccctgcttcattttcagaggcccatgctagtaaaagttatttggcctccttcctcgaccatccagtccttgttcatctgcgtcattttaatatatccaacctggacatgtaacttaaaaaaggagttctcggggggaaacacaggaagaaaaagaaagaaaagaaagcccctgtgacattccaacatcccctctttctggttaagccgggtccacccagccagaagtgccccggagctccgggttgcttgtgtggcgttgccgccaagtgtcttgactgaaggaagagtgtgggtggatgaatgatgagctattagaatttgaagagcattttgagattcaaatgcttaactgaagaatcttttaacgaaattgagggtggtattcattgtt

SEQ ID NO: 586495 - DNA, 4001 bp, Homo sapiens
ggatgggagacaaccacggccgcctcaccgagccaccgtgcacggcactgcgcaaacaagctcccagcacagcagccccggctctgctacctcccggccgtggatggcacagtccccctctgggtctcagtttcctcttctatgaggtcaaagccaccaccccatgctcacagagccgtctgctggctatgcctagaggcacggggtgggcacgcagatggcagctgtgatttccctgaaaccagacatctgtgccacacagactcccaaggacggctgacttcatggcagaatttgagatatttcagaagcctagtacaaataaagaagaaaaccagaaactttttcctaaaacctgatgcaattcaggatgactaaaaagagctggaacggacagcatcgccctccagaattgtcactacctcatctaccgaattcctaggatacaaacagttctcactttacacagggcacgttcccgaaccggcctctcaggacggaacccaaagacaatttcacaggatttacaatttgcagctattggttctcctttgaccgaatccttgaatttgcttaaaaaacaatgaagagttgacaagatgggccactggaaaatgaaaagagcatcggcacttcacgttcattaaaacgtgaagagatgaccaactaatgctgctttcataccctggatagtgctgagtacctaacagctctttaggtcacaacgtaaaattcggcttccagctggtccagttttcccatctgtcgtatccacggaatgtccaaatgtaagggaaaaatgtggagtgtccagccgcccaccagtccacccagcaccacagcctaacctcaccgaggcctcccagcactcacacagaacactcgcagagaactgcggctccatccgcattccttaccttcattactgtccctacctccagcccctccagaaaaaagcgaaagcggcagagaaacctgtgaaaacaagacatgccaaaaatactgactcaaaataccaaaagctctcaccctgaggtggaggggtcaacccaggcttcgtttctaggagaagttgtaagggcttcgtgttctgcactgctaggaaacaccaccctgacttagggtcgtcacagaaggtgcacatggcggggccggcgtgcacccaccactcacgccaggcgctgcgcgactgctgctggacacacacgatcccaccgaatccagacacggtatggcggttcccactttcctcactgaggaaaccaaagcttagacgttaacttggccaagggcaaaaacgctacttaactccaaagtccagcctctgaacccacccgtgtgcggggcctgaggtgtgagtagcctaactgtggactacaaaagcagttccaccacgccttctattctggagttagatccaatgacatttcctgaaaattacatttacaaacccaaaaaaggacaatccccttccggataagaccccaatgccatgaagcacagagcggcaggacgatgagaggataaatcatttggaaagaaaccacgctgcccgggtggaggagcgccagagggaagcaggccccatgtcctccctcccgcaggaagtgcaccaggcccgtcctttccacccaggctgtacaaaagggaggaggagcactcagggcggcctcccatccgccacacacccagtcagcgcggctccgaagcaggagagggccagctccgagccctgctcgtggagccattggtgctgcggcggggagaagaggccacaggcggggacgccccagacactcccgtggggcccgtgccagggtctcctgctcctcagaaagagcccttgtgtgctactgtggtcgccaacagccccgccggccactggcccaggactcagcgtgccgttcctccaggacgcagaccggggctccctaccagccttgagtgagagaccacaagcagcctctgaagtcatcttcctctctcttctcagaagcatttctcgaatattctgctgacaagaggttagcaggacttcacaagacaccccaacacacacacacacacacacacacacacacacacacacacggtctcaacacagttcagaaaacacatttgccttcccaggcccgtgggaggagtgctgtgaggctgagacacagcccggcttgctgacggcacaaatgccggtgcgccctcggcacagtttgtttgcttcatcgggcggagaaggccgagttccagctcagggagcccacaaaggagctcttcctatggccctgccaaacgcctggagcaaaggttttgtctggaaaagctccccgagctccctcaaccccggcagcagtgctgctctatggctgaggatgaagctccagtccatgtcccaagcagtgtctcaattctcaatggtcctgtaatctaaggctagctcgaaacaaaaaacaattattttaaggtctaaaatatgcagaaagagctgcagtgaacacatttacacttcccaaggacaagcatctaaggaagatccctggtaagaatgagaaagcctgggcttgtccaggaaaccaaagcttcttctaaatgtgccttccctgcacaaaatgcctcccccacaggctctgcttttcctgtcgcctggaacaagaaagctccctgggcaggcgaggccgggacctctgcactgagatccccactcagtggcctccatggctggcagagagcgagggagacggagagagaaggagctcagctgagctgttgctttagagtcttggttaaagtgaatccaattatgcacccttctttcctatagcaacactacaggggcatgagaacagggtacgcacctaaagtgaggcttgcctatactttctagaagtcttcctaaggctgctgtgctggtgtcctctgattggttgagtattttttatcattttggttttgagacagggtctcactctgttgcccaggttagggggccgtggtgcaatcatggctcactgcagcctcaaactgaagtgggctcaagtgatcctcctgcctcagcctcctgagtagctgggaccacgggcacgtgccacctatccccagctaatttcttttttttttttttttttaataaagatgggatctcactatgttgcccaggcaggtctcaaactcctaggctggagtgatcctcccatctcagcctcccaaagtgccaggattccaggcgtgtgctcccgcatccaggcagtctggtttattattcacacagaagtacatctgatattgctgaccagaggagagttgagattccgtatgaagtctatttgttcaattacctgaatcctctgagacgccccagttgcccagtattcacagtggttgtggtcgggctcagcgtttacttcacaatccagactcctgggctttgtctctgacatgtgaatgaatgatctcctctgccatggcttagggagccagggcctgtcagctggtctcatcagagctgaggctgccctcgaggtggggttctgtctgaatgcatctgagttttgctttatttctctgtaaactgtaggtgagctgggtgaacccagtagcttcagccacagctgggaactgaagcagcatctgaagtccctctcattctcccagcgtgagccggcggaccctgaagggaacactgagactgaccacagctggacttgcgccgcctcgtcctcttagtgaatgaggtcctcagaggcttaagcacgcgttagttatccaaaatgcttctgttcaggtgaatgcacaaagcgttgaggtaggtcaactgcattttgtacggtggaaaagtaataagcagtttgctttttgtattataatgaaaatgaaaacctttccttaaaggaaaggaagcataatctcagaaatctgaatccagggaatcccaaataacccccccaaattttaatccttgacattcataatcacttggattaaaatctaagggaaaaaaagaatca

SEQ ID NO: 586496 - DNA, 4001 bp, Homo sapiens
gtttcaaactataaatatttatgagctttgaggaaaccggctttctccacagtcatgttttcatttaaattattttaaaaaatagatgactccatgcccatagtaccaatttcactggttattaaggggcatccaggggagagtctcctcctacctccccttccccagagggaacagaagttcccagtcagtgtagcttgcgtaaggggacatcactgagtgatgccagcacagcgctccttgcaggaagccaccacaatatctgctatacctccagagggagaggctggggacattccgggagagctctcaggtggggaaaaaaaaacaaacaaacatgctggatggtgagcaaaccaatctgtgaaggaaatgaaaatggaaatggaggcaatcgccccatgtgagctgtcagagtgcagctggaggagcaggaaacagcgtattcgttaggagatctgggaatctggggccacgcctaagtctgcccatctgcaaagaccccttgtccagaaggtgtggaccacggagattgtgatgttaatttcactgaactgggccacagggtgcctgatgcaacaccgttcctgggcgtgtctgtgagggtgctcgagatgacattaggattaggacagtgggttcaggaaggtggactgccctccccaagtggctgggcaccttccaatccctcaagaccctgaatagatcagacggcagagggaggaggagttcacccctcatttcctgcctcgccgccggagcttggacatctcatcctctcttgccctgggactggatgtccaccatcggctgcccaggttctcaggccttcggacatgagctgagtttgaatcacgcctcgggcttccctgggtctctagcttgccacacagaacatgggacttctcagctcccagaatcacgtgagtgaaattctccatcataaatctccttttatacatctatgtatcctgttggctgtgcttctttggagaatcctgactgagatcagggagatctgtggccgaggagttgaacggagtgagactcaccctggacccagggtgtgcaatgagtaggtgctcaaaacggcagcactttcggtttccatctggtgtgcttcccgaaccctgcaagtcaacatttaagaattcctataatctgaattaaagacaattagagacatcagaataaagccctgctcaagcttctccaagctcacaaataaaatcaaagacacaaaccaagactttgaggaaatttcttctgcacccatgaagtctttactgggaaggccttctcagtgcggccttactggaccatcctatttaaagccgcaactcccaccaaaaaattccttatttccttttcctgccttttttttttttttttcgtggcatagaatctcagagctggaaggagctctaaaaggctggaccagtcaccgtccagatgtgaactccttgcatataacggccttccacagaagtttatcagcctgtccaacacacatcctagaaagggttccctgacctgccccgcactgctcccaagcacccttcctgtgctcccgacagcaccgggtgtgcactgctcccctccacagcactcactcacacgactgccaggcatccttgctaggcacggcctgggaaacattctccgtttcatttcaaatgcctacaatacagtaggcgctctgcactcggcatggctgacaaggacgtcactgtatccaggtctaatctcgccccttccacccaatccagtcccctgtcaaagccaccaagcgccgccactgtggcaggctccgaggacacaacagagaaccagacagacaaggccttgcccgcatgaggcttccaagctcactggagaaggagcaatacaaaaagcaagtggacaggaacatcggcgaggtgcctgcggtccggcactgtgagtgtgctctcaaggaggaagccagtcagcggacctacagtcaaggaggctgcttaaatgagggctgttggggaaggcggctcaggaggaggcatttacaagaccttaaggaggggccggctgcgcagcaggggcaggaggagctttcctggtggaaggaatctcacgcacgaagaccctgagcttcgcatttttgaaacactaaagaaaacatgagggaggctggagcgtgtaggagagatgactcagcgcaggttggagtgcagggctatattggcggcccaggctccacactgcaggcagccatatgcctctgccaaccaccccagggccaagcactggacaaccagggaccaccctgatagcacagaggctggggaaattactcaaaccagccaatcctaaaccgcggatgctgccttgcccatttcttttcagaaaccacaatcgaggctcttgcccacaagtacccctccgcctcctgacccagcgtggtgctccctggagcctggtgctccccgtgtggccccgtgtgctgtgcctcctgtttctacaaatctgtgagcacaagctccttcctcacaacagtcccgtctgtgtcttagcacacctgatgacgtccaatcccagagacatttcccatcactcctctgctcctctccatctacacaaacactgaatttttcattcatctgaaaataagggagatagtttttgagttcatttaatagccttgctgagactttccatgagaagcaatggttgacagcccctggcaaagctgggcctgcgtggaactgacccagcaactctgcgtctaagtacacatcccggagagaccctggccgccgcgcacggaggcgtggacacggacacacagtgcagcactgttggtcgcagggaaaacggtaaacaacctgaatacgcattcacagggaacggatcagcaattatggtaagtaatgtgacggtggaaagaagtaaaccagatcttcacgcacccccatggacagcacgcacatgtgctgctcaccaaatcctttttttttgagatagtcttgatctcgccgcccaggctggagtgcaatggcacggtcttggctcactgcgaccaccacctccctagttcaagcgattcttctgcctcagcctcccaagtagctgggattacaggtgcctgccactatgcccagctaatttttgtattttttagtagagatgggtttcaccatgttgaccaggctggtctcaaactcctgacctcaggtgatccacctgtcttggcctcccaaagtgctgggattacaggcgtgagccactgctcccagcctagcaaatccattttttaaatgatatattcaaaataatgccatttccataaattcttaaaaacaagtaatatacatattgattatggactcaaaacatgtacagaacacaaattgaataattatccagctcatgccagggtttcctcggtgggaagggcagtagcagcagtgacagtgagaatgatattgaagctaacattcactgaacacctactctgtccaggcacaggtctagcacacattaactcattcaattcttaagagcggccaggagacatccatgattactgtccccatttcacagatgagaaaactcaggctagagaaatgatcaggaatgtgcaatgcactccggtgacttcttaccgcctcctctgctcccatcaagtcagtctgggtctctgctgctcttcactgatgcccctgctctcattcttgcccacttccacctcctacccctggaggaggtctacactccccacttaacaaacaatgacccttttaaaaacacagttgggtcagttcaactctctacttaaactttccaatggcttcccatcatactccactttatttttatttatttatttttgagacagagtctcgctctattgcccaggctgtagcgcaatggcgcgacctcggctcaccgcaacctccacctccagggttcaagcgattctcctgtctcagcctcctgatagctgaaattacaggcacgcgccacca

SEQ ID NO: 586497 - DNA, 4001 bp, Homo sapiens
tttttcactgccactcaggctggagtgcagtggcccaaacatggctcactgcagcctcaacctcccaggctcaaccaattctcctacctcagccgctcaagcaactgggactacaggtgcattccaccatgcccaactaatgtgttcatttttgtggcactgaggtcttgctgtgttgcccaggttggtctcaaacttctggcctcaagtgatcctcctgcctcagcttcccaaagtgcagggattacaggcacgagccatcacacctggccgacttctacagcttctttcacaaatatggcgaagagaaaaaaggaagcaagagacaggagaatctggagattcattgcaatgcatgtcgagtcacacaaaacaattatgccacaatggaggaattctgaacactggatatctggtgataatgagctattactaatgtttaggtttgctaatggtactgcggttgtgtttttacatggaggcctcatcttttagccactcatatacatcctaaaacgtttcctaatccaactacacaaagttggatttgcttggagaccatggggagggcacaggtgaataggattggcacagaattgatgactgctttagttgggctgtaggtactttacagtcaatctactattttctctacttttgtatacatttgaagttttcgtattagaaagtgtggctcacacctgtaatctcagcactttgggaggcccaggtgggaggatggcttgagaccagcctgggcaagagagtgagagcctttctaaaaaaacagaaaagtaaaaagagactcatggctggttcccgtccagtctccactgctcttcttctaagctcagccggagggcacggccggttgggctcctatcccacaaatcttccagtgggaaatggacagataccattctgctagggcacatccaggagggggctaagtgccaagcccccactccccatccccagaagctggcccgagttcccactcccacggtccccaggcaccctagagagggcagaggcagaccgggcgccatgactcatgcctataatcccagcacttgagggagaccaaggcaggaggatcacttgaggccaggagactgagaccagcctgggcaacacagcaagaccccatctctacaaaaaaaaacttaaaaattagctgggctggtggtgcgcgcctgtaatcccactacttcgggaggctaaggagggagtagggcttgagcctgggaggtcgaggctgcagtgagctgtgagggcgccactgcactcaagcctgggaaacacagcgagaccccatctcaaaaagggcgagacggggtggggcagagacgacgccagcaggcctcggggaatgggtcgggggggagtggggtgcaggcggggctggatccagcatcctcgccccaggggtccccgcccgcggcggcggaccacggaggggcccggggcgggggttagcgccccggcccacctgggtgcaggtgctgggcggggggcgcgcgtcaccttgaggatgttgtcgaagatggtgtcgcggaactccagcagcgccttctggtcgaactcgcggccgtggatgatgcgcatctgcttgaggaacgtggacttgccgctctcgcccgcgcccagcagcaggatcttcaccaggcgccggaccgcgcgccgctcgcgggccagcagcgcgtcgatgtcgcggctacgcctccgggcctcgcgctccgcgtcgcgcgcgccgctgcccgccctgcgctcgcgggccccgccggcctcggccggcagcaggcagcggctgagggtccgcaccaccccggacatggcccctcaggccgcggccgcgccccgccggcgcccgggggccatggacgctcccgccggcgagggcgagcccgggccgaggcaccgccccacgccccgccgctcgcctcaggccgcgtccgccgccgccgctgcagtcgctccgaggcccgcactcgtcgcccggccgccactcgggcccggcggaggggcgggcggcgccgcgtgaggcccggcggattgggccggctgccgtccatctggccgtgagagcccttcgattggctcatctcgccaagggaggcgggcatcccttccggcctcggggcggggtcgacgccgaaagaggcgggatctttgaggtgaaggcgcttctcattggacgcccaggctgaggttctttctttcagaatgaaagggaggcggggtcgcccgggaggcggagcgatcgtccgccatggccaattataattgctctgagtggacatcagacgtgcccaacgggctttggattgggtgttcgggggacggggcgtgacgagaagtgccaggtgtacagaaagattctcccttggttcccagattgggtccgcctgtgagaccaggacctcgcggagtagcccaaaggctgggaaatgctgataagaggttcagctgctcgtcgtattccctccgatgatcttgtttctacactattttccttccagaaacactggagggggatgggccataaatttcaaacacatgcaccctttgagagtggcatgggcttctaggaggctttgcgaaaagctgactaatcactaaaatcaccagaagctcccccaaaagtcttatgtctcacagtgattgagagagtggggtctggagttgctgggcctgagttggaatctccagtcgaccagttactaggtgtactagttgcataactttttttagcagctttccccaccccccccaacaaacccttttggatgttcttagcttccgtttcctcatctgtaaaacgggggtgtcattgacgacattggttatggcttgacattgctcaaatcgtcatgaagatataaactgagaacatgaacttaccaaacacttagcacgtgagctagcccaaaatcagctcttgatagagatcagctgattacagattcttgactctcccagatctactgaatcagaacctcctagaaggagctcaggtatcccttaagattaaaggcgtgagccgccgcgcctggcccagtgtgtagtcttttatctctcgccaccccccaccttttaccctgagtccccaaagtccaatctctgtgcggtgtctgttaactctgctgattatttcttttgcagtgccgaagctttttagtttaattaagtcccatctatttatctttgtttttgttgcatttgcttttgggttcttggtcacaaagtctttgcctaagccaacgtctagaaggatgtttccgatgttatcttctagaatgtttatggtttcaggttgtagatttaagtctttgatctatcctgagttgatttttgtataacgtgagagacgaggatccagttttattcttctacatgtggcttgccaattatctcagcaccatttgctgaataggctgtcctttccccactttgttttcatttgctttgttgaagatcagttggctgtaagtatttggcttcatttctgggttctctattatgttccattggtctctgtgcctatttttatattagtaccatgctgtttttgtgacgatagccttatagtatagtttgaagtcaggtaaagtgatgcctccagatttgttctttttgcttagtcacagatctaaactccccagaaggctgggcacggtgactcacaactacagtcccagcagtttgagatgctgaggtgggaggatcacttgagcccaggaggtcaagggtgcagtgacctatgatcgtgccactgtactccagcctggacaacggagcaagaccctgtttcagaaacaaaacaaaacaaaaaccaactccctgacaaccttgaatgcacataatatgtattatttgtcacttgctacaaatactacaaatcatgccatgaatttgtatcacttatgagtcaagattttgtaatccttggaaaatgattagaaagtcttgcttgtttgtggaaatgacctcccatagga

SEQ ID NO: 586498 - DNA, 4001 bp, Homo sapiens
aggagagaggtagggaaaagcaaaagaccaaagctagaaaagacagccaaaagaattcagtcacttaaagatttctaaaaatcattctgaaatatttccaatggtaccagtactggtttagagaaataagaattctggccgggcaaggtggctcacgcctgtaatcccagaacttcgggaggctgaggcgggcggatcacctgaggtcaggaattggagaccagcgtggccaacatggtgaaacccggtctctactaaaaatacaaaattagccgagcatggtggcacgcacctgtagtcccgggtactcgggaggctgaggctggagaatcgcttgaacccaggaggtgaaggttgcagtgagccgagatcgggccactgcactccagcctgggcgactgcgcaagactccgtctcaaaaaaaaaaaaaaaaaaaaagaaaagaaaagaaaaaaaaaaaaagaaaaaagaaaaagaaataagaattccataatttcttctgaaaatgaggcctctgctacatctttctctgaactcacttatgatgactgtcaagattcaacttctggttctgtattatacattcagttatatttaagtcttaatctagaacagtggtccttaactaacgctgtattttgcccccagaggacttctagcaatatgtggaaacacttttggagctcacaggttagggggctgctactagcatccaatgagcggaggccaaagatgctgctgaacatcctacaatgcacaaaaacaacctggagaacaaagaattacccagccccaaatgccaaccgtgctaagatcaagacacactgatctcttctgaacataagcaaaagcctactcctgggacctttattctagtccatccctaacagtcacctaattaaaggacaaaacaccaccaccagatgattcatttttcaattgctttaaacatggtggatggctggctcaaactaagagtcacacagaaatacactgaaacaacgtatcacaccaggagagcaaaaactgcaagaaaaaaacttcttaatcctcttatttcatatctatctcacattcaattcacaagagaagtacatacactaacctcatcaaaacacagtatttcttattaatgtaaaaacttaggcaaacaacattaactgagaaagatttatgttgggggcgacagggtgaaaaaagccacccaggtctttaaaatgcaaagttatttcacagtttacttgcaaaatgactcagatcattattacttttagtcatgccaactttgctgctcccaagcctactagtaatggagaaaaaaaacccaccattttttctgcagtcattaaaccaatgaaacagaagcttactgaaaacaggtttgtgcaacatttcttttttattataactggtataaaaatacaagcagtccttggaaatgcaaatgaagattctgagaaatttttcatctatctaaatacctagagtgtgagaagaaaacatgcaaacaaaagaaaaccctaactcacgaatcttaacctgtaaagattttcctaatgcttccctcagtgaaaaccctggtttactctttattttcttccccgtcaaacatttggaaaagacctccacgtagcgtttcacgaacagaacagtgctaagaacaaataaaagccttgcgtgtacctggcaaatctcattcatcagaaacggtggcagcggagacagaaccctgttgtctggcgtgaccctctcgctctttcacagcagttttcaccactcgagtatctgccttgcctactactaaagcaaagcttcccaaccccacttgggtggcttccatgcccccacagcaagaaaaatcaagcatccagcgcagccttttctcagcgcagggggaatgtaatcagcgctccttgaccacttaaggagtcgccataggaagttaacaggaaagacgcttcagccccatctcagaggccccacaaaaggtgcactgatttcaccaaacgtggcactctgggcatgagaaaaccacagtcgaaacacaacctacaccgcacacgaagaagggttttccgggagggggttggtggcgcgggggggggggtgttttcattttctagccgcgaatgccccttcatctttacaaggctgagctaaacttcaaagcaaagggtttccacgcgacccgccgcctcggactcgcgcctgggctctttgctgggtcgcacgaaagcatccgagtgaagtgacgcgcccgccccgccgcggggagtcctcgcccgccggggcggagagagaccagacaccgggagagggggacccgccttgcctccgcaccgccggacccagctcccgctcagaagcctcctcgggcgcttcctcccccttccctccgggtttccaaacgccgagggccgcgcagcgccgcacccggtcccccgccgacccccgggccccgacccggccgcccttaccgagcagcagcagcttgacctcgcgcgccgccttctcgccgtcctcacggaggttgcggtcgatcatcttactccgctccaccgccgccttgtcctcggcgctcagcgtgcagcccatggtgccgaaagcgagagcctgccgccgctccctccgcgcccgagtgcgggctccaagcacaggggaatcctttctctctcctagcgggcgttcgaacgcctcccgacgggggccacgccgcccccaccacttcctaagcggagtcgagggagacgctgtccgcaaaggggcagacagcaacgggcggctgttcctcacgaccaggctctgcttcccggcccggctcagcgcccccaagtcccgggtttggggttttgaatctctgggtacagtggccgctgcactcccgccggtggccgcgccgcagcctcgccaagcccagccgagctcggcctccgcgcgccgccgcggccccgcccctgcccgcccctcccaccaccccgcgaccactcccagagcgcgcgcccgcgcacgtgccctcggacagcgccccccggccccggaccccggcgccgcgccaccactgagggcctggcgccccctggcagcgtccccggggcgcgccactgccccgcggggctgtggccttctgccctgggcgggagtggggtaatttctttccgtttactcacacggagggagctgtgcgtacctgccccttcgggtgggggtgggagagctgccaaagttgccgaaaaaagccagttctgggcgtttgagcatgcccagcgccggcagccacgcaaggtttttcaaaatgcaaatccctgtcggctggtttcagggccgtgagaaacagggaactggggaaggaatggagcctggtgaaaccagagatgggcacagtggagaacaggaaagtcgggggaggggactagaaaagggcaccaaggtcactttcttcctaccttttgcttctctttccttcttcctatccctccctctttccttgcactctcacgtttttcacaagaacgcattttgaaggatttcctcgtaacctaaaaaaaatggaagacaaataatcaaaagtatttttaaatgacaagagcaataaaacacacccacacaagccaatctccacatcgtagcagatctcctctagagcagcacataagcttccatgccaaatttggagccaatatttatgaccgtgtttgtaactcctgtaccattgggcatgccatttttacaggccttagcttctttgcccataaaatgaggagtggatctatggtgctatctccccatccttccagctgtaacaatcggcggagataagttcctgtggcccgcgggaggcattgctactcagcacccaatgaatgagcagaggcttaagatctcatctctccctgtcagttgcactacacctttcccctacagatatcacaggaagcgttaactgattagaaaatggggctggtagcaaggaaaaacatggtccttgatgtactaaaaattgg

SEQ ID NO: 586499 - DNA, 4001 bp, Homo sapiens
tttttcaattgctttaaacatggtggatggctggctcaaactaagagtcacacagaaatacactgaaacaacgtatcacaccaggagagcaaaaactgcaagaaaaaaacttcttaatcctcttatttcatatctatctcacattcaattcacaagagaagtacatacactaacctcatcaaaacacagtatttcttattaatgtaaaaacttaggcaaacaacattaactgagaaagatttatgttgggggcgacagggtgaaaaaagccacccaggtctttaaaatgcaaagttatttcacagtttacttgcaaaatgactcagatcattattacttttagtcatgccaactttgctgctcccaagcctactagtaatggagaaaaaaaacccaccattttttctgcagtcattaaaccaatgaaacagaagcttactgaaaacaggtttgtgcaacatttcttttttattataactggtataaaaatacaagcagtccttggaaatgcaaatgaagattctgagaaatttttcatctatctaaatacctagagtgtgagaagaaaacatgcaaacaaaagaaaaccctaactcacgaatcttaacctgtaaagattttcctaatgcttccctcagtgaaaaccctggtttactctttattttcttccccgtcaaacatttggaaaagacctccacgtagcgtttcacgaacagaacagtgctaagaacaaataaaagccttgcgtgtacctggcaaatctcattcatcagaaacggtggcagcggagacagaaccctgttgtctggcgtgaccctctcgctctttcacagcagttttcaccactcgagtatctgccttgcctactactaaagcaaagcttcccaaccccacttgggtggcttccatgcccccacagcaagaaaaatcaagcatccagcgcagccttttctcagcgcagggggaatgtaatcagcgctccttgaccacttaaggagtcgccataggaagttaacaggaaagacgcttcagccccatctcagaggccccacaaaaggtgcactgatttcaccaaacgtggcactctgggcatgagaaaaccacagtcgaaacacaacctacaccgcacacgaagaagggttttccgggagggggttggtggcgcgggggggggggtgttttcattttctagccgcgaatgccccttcatctttacaaggctgagctaaacttcaaagcaaagggtttccacgcgacccgccgcctcggactcgcgcctgggctctttgctgggtcgcacgaaagcatccgagtgaagtgacgcgcccgccccgccgcggggagtcctcgcccgccggggcggagagagaccagacaccgggagagggggacccgccttgcctccgcaccgccggacccagctcccgctcagaagcctcctcgggcgcttcctcccccttccctccgggtttccaaacgccgagggccgcgcagcgccgcacccggtcccccgccgacccccgggccccgacccggccgcccttaccgagcagcagcagcttgacctcgcgcgccgccttctcgccgtcctcacggaggttgcggtcgatcatcttactccgctccaccgccgccttgtcctcggcgctcagcgtgcagcccatggtgccgaaagcgagagcctgccgccgctccctccgcgcccgagtgcgggctccaagcacaggggaatcctttctctctcctagcgggcgttcgaacgcctcccgacgggggccacgccgcccccaccacttcctaagcggagtcgagggagacgctgtccgcaaaggggcagacagcaacgggcggctgttcctcacgaccaggctctgcttcccggcccggctcagcgcccccaagtcccgggtttggggttttgaatctctgggtacagtggccgctgcactcccgccggtggccgcgccgcagcctcgccaagcccagccgagctcggcctccgcgcgccgccgcggccccgcccctgcccgcccctcccaccaccccgcgaccactcccagagcgcgcgcccgcgcacgtgccctcggacagcgccccccggccccggaccccggcgccgcgccaccactgagggcctggcgccccctggcagcgtccccggggcgcgccactgccccgcggggctgtggccttctgccctgggcgggagtggggtaatttctttccgtttactcacacggagggagctgtgcgtacctgccccttcgggtgggggtgggagagctgccaaagttgccgaaaaaagccagttctgggcgtttgagcatgcccagcgccggcagccacgcaaggtttttcaaaatgcaaatccctgtcggctggtttcagggccgtgagaaacagggaactggggaaggaatggagcctggtgaaaccagagatgggcacagtggagaacaggaaagtcgggggaggggactagaaaagggcaccaaggtcactttcttcctaccttttgcttctctttccttcttcctatccctccctctttccttgcactctcacgtttttcacaagaacgcattttgaaggatttcctcgtaacctaaaaaaaatggaagacaaataatcaaaagtatttttaaatgacaagagcaataaaacacacccacacaagccaatctccacatcgtagcagatctcctctagagcagcacataagcttccatgccaaatttggagccaatatttatgaccgtgtttgtaactcctgtaccattgggcatgccatttttacaggccttagcttctttgcccataaaatgaggagtggatctatggtgctatctccccatccttccagctgtaacaatcggcggagataagttcctgtggcccgcgggaggcattgctactcagcacccaatgaatgagcagaggcttaagatctcatctctccctgtcagttgcactacacctttcccctacagatatcacaggaagcgttaactgattagaaaatggggctggtagcaaggaaaaacatggtccttgatgtactaaaaattggaacatgctccctggttttcatctggaaatcttattctctaaaaatcatttgggaaaactgggcttgagttttccaaggtgaggctgaactgatgatacaagcagaatagctttcgagtaggtcactgagaccacgcttgtgagctagcagagactgagttgcctccttatgggacatgtcctttcctgttctcctatgggagtcacaccacctgctgggctgatgagatgcaatttcaagatctgcctcaactataatcttttgtaatataacaacaaaaaggaacaatctttaaatgtacttagtcaccttctacactgtaattctaggcactctaaatgctaatgtgtatcagaactctggaattaaacttaaggaaatcaaatttcaacacactgtgtattagccattcttaattatcttttatggtgagtctttcctattaagttcggaccagagtgtggaaccaacagtttcagcaaaagaagaagcagtgctggctgaatattggtagaaatgactacaaaacttgtgtttcggagaaatgaagtatgtgtaacagaagtttgtcaaataggtaacattacttccatcctttgaagttagtcaaataggtgagttaaaatgtgatacataaacgaataagaacagcaaattagatttatatgtagcacaattcctaagagaatgcagagtaatgaactgatcagtatggggggaaattctaagataagaaagttttgaaaaaacgtttgaaggaaatgataacaggatattggtggggagtttaaagaagtatgtattagttcaggctgccctaaaaataccatagcctgagtggctgaaacaataggaatatatttctcaccgttctggaagctggtaaacctaagattaaggtgccagtttattcagttcctcagtgagggtt

SEQ ID NO: 586500 - DNA, 4001 bp, Homo sapiens
atctagctaattaacaaatgtattacttcacagttatcatttttgtggtaagtgcacataacacctactctctttacatttttcaagaatacaatagatcatcattaactatagtcaccgtgctgaacagtagatctcttgaaatttattcttcctatttaactgtaattttgtgtcctttgaccaacaactccctttccccttgttccccccaaccaccctagcccctagaaaccacctttctaccttgttcttttccgtcacaactgaatctctagttgactggcagctctgatatgcttatctcaagagtcattgcttttggcatgtttaatagtttttgtcttagtctaaattgtggtattagctctttcattgttttggctttccatttgtatttttacaaaataagagaatatgtaaaaaaatagataattggtatattgaaaacacacatctattgaaatgttatttaaacacggaaatttttaatacgttttatcaccattcttatgtcattgatcttagtacaaaaggaatataaaaatgaatttgtaagaatgcttgtctttcccttttacctttcatttgcttttcctgtgtccatattactttcactcttgctcagaaactaacagaattctatggtgtgttaggaagcatatatttcctggtgtcattagtacttaacccacatctttcaaagtcaccaacctctgggtagttactgacaagtgctgtgggcctgtgtgcaggcacagaacctgtgtgtaaggggcaaggatgtttcctttcctttaaggagcaagtgctgggaatcccacagttggcttctgaaacactcttgccactgggagcaaattagacacaacgaaggaatacttaaataagtttaagtatttaattcatttaatattaagtatttaagtgtttaaatacttaaaatatgaggaaatttgttatgtgaaatatgcacgattctgaaataagatgaagtccttttgtgtataaccaaaatcagggagaaagtacaactcataattgaatcagaagtaagtgcttgctttgtattctttatataggtcatcatttttatttcaaaaacatatttctgtttcagtgaaactgcatgtaaaatgttttatgctttatagaaaaaatctgcatatggattatttttattctttcaattaattgaacatttattgaatttatagtcaaggtaaaacagtgctgagttttgaaagaaggaaaaaaaaataaaagagacataaatcctgacctgaatgaatatataaatgctctaaaaggatttaggtagagtatttttcaagtgtacaggcaatattgcaggcagtattcaggagcctaagtaatattgttaatataatttaaagtaccttatcattgttctctaacttgactaattgatttttaactatacaagtaaataacaaacattaacttcaacgtcaaacaattcaacctatttctgtttaaacaaaataatataactctttataacttgtagctaaaggatttctttcagtattaaaaagctgacattcagaaaatgattagggtgcaataaaataataaatgtatctgatttttattttaataatagtaaaccatattactgacagagaaattagctgataaatatttgcctccttgcttaacaaaaaggtaataaaatactaaacagaaaaattattaaatattgatagagtacaaataaattttccttaagtttccaaacacatttttataataaatttcccatatgataatacactcgaaattaaagtctgagaaaagtaaatatatcacaattgaaaaaaaagtcaggtttttgaaagcaaaagggaaaagaaattacctaatagtagcagctttacggttcttgcatctcgctcagcatcctcctgaagctttttctccagttcttttgatcttttggctgactccttgctctctgaactaattccacttcccatcttgtggtggtagatacttgtcagtttatatgttcagatttttcaaatgttgagcacagctgtggtttggacataggaggcaagagtaatgctctgctgaagtacctagcagtccattccctaatgctctaagattctgctttgactaaggagatgctttctcatctgtcacctgatcaggtggtaaaaccatacccccctgatggaggctagagaggaagttcattatgctttcaaattaaatgactgcttcgggcacatcttcgaaaacaggcttatctgctttatagtataaaataatgtagaaagttgtcaaaatctatacactagagatgatctacaataagcaattcaaatagaatgtttctcactactgggcaatttttattactgtgattaaaagttattattactaatcagcgatgcttacatcttatcttcagatatttggcccttcaatttctttataatcactcctatatcacaatcagaatatatacatgtaagttatccaacttttatggtctacctatgcttagattattacttaaagctattgagcatctattagcatctgtcagggaacaaaaaaaatcttttttttaacaatggatacaaatacatatagtttttatatttgtacatattgtattgctacaaatataaaattcaacacagttttcttaaattattgattttagtgtcataggatccatctctataaattgagcttttgccgcctgtgagaaagtcaatccatcaacactaattgagggcccacttggtgtagacactgaactatgttcaatttaggcagcgcattaactctttagggccattaagcaacagctgctgtgctggagggactcttactgatttggtaccaagggaataaaaaccaatgttctttgaaacagcaggtaatttggtttttcctacaaactaaaaacagtaattacacctaaataagttccatagctttcaactaccccaacagataccatgtacttcttgaaaatcttcaggattgagggcagagattatgttgcacaattttttatttatatgaagcataaagtgcttggtagatagtcaatcaatattttccttatgaacagagtcggttgcctgtggcacatctttcagtgtgcattttgggatttgtgaatgtgcttaaccagaaaatgccagaatacagtcaatccaccaacctgtcagtggtgctcttcttgtgggatcatgtgcaaagtttgaacaggtgagtttttacatattcatgcaacaagaaaataggctgccagattaaatacatagtcctgctttgtttactttttccacatcaaaaatattaggctgaagatacataaacatagtcaaaacttcctgggttccgttcttccaaagccatattatgatagtataaagatgtgcagtggtggataggcaaggatttgtgcaaatcatgtggtattgcttttacaatgcaaagggcctgtcccaaaggaaggagatttgcacggcctaatgctcacctgtgaacacaaagtccactctgaaagcaacacttagcacatttaatctctttttgcctagtgcttttttatagaaattgaatataatagcaccctgaataaacagaattcttgcatgttctatggcagaaacgaactgacaggctacatcatataatttgcatacaagcataaatatacctcatagctttttggcagagacgtaccctgcttttaggaacatacatgttttactaaggcttcctaatgggattactaactaaaactgaccaactctttcaggagtaggagtatacattttctgcactgtataaaacgatgaacttccacttttctgttgtaaccagtaatgttcatcaacttgatgagattatcaggtgattttttcatcagtgattaaaatattcttgacataaaactctaggtatgtctgtgttacagagagggagagcgggagagctagagagga

SEQ ID NO: 586501 - DNA, 4001 bp, Homo sapiens
ccagcttcgatggtggcgggtggggggagagaccagaggggaaagctgggctgttcgtggggttgcctaggcaaccgtcacccggaccgagagcacctcattggtgaaatgcccccaccctagccccgttgccaaggcaaccgcatccacggcagagacctgtagggtgggtgaccccacccccggccccatcgcccccgcccgacccagcctcccgccctccccagaaccggcccgggtggctgtttacaggatttgggaaaagccgattgggcgctaataggttctggacggctcaccccggataatccccggtccggctgcgccccattagccgtccgccgcgggtgggggtgacagcggcggggaaggcagccccgagccgctgctccctccagcgcagggaccgcccgccccgccgcgcccgcagaaagcccgtgggagccgctctcgagtaattacggctccgcaacgaggtccccggccccgaggcgcggaggtgctctctcccaggcgcgggcgggcggccccaggcggcctggccgcggcgccctggacacccggggggcccagcccgcaggctcggcgcccgggccccaggggcccggctggctccgctccgggagcctgagtccttccccgcccgcgggacacctgtgcgatccggccgtacacactgcacttggccggcccaggcgtcccccacccagctcccacttcccccaggcgcagggcgttcctcttccccactgacatttcccctccttgtaagttcagctttctacgccagtgccaaggggtgaccctcaaaatcgggggatggggggtgcgggcagaactccttactctacccaacccccaggcccgcacaaagcctcttccacctactagcagcccaggcctggcggcaccgccggaggcccagggcagaaggaagcacggctggaggaagaaactgggggcgggggcgacgttctcagccctcggtccccatcaccccccagggccctcagcagcccccagactctagggatatagcagccggcgctccatagagaaatgagggtgcaaccgcctccgcaggtctggcggggctcaggagagtgacgggagggtccctggatctggcagctggaaggcgcgggctggtgcggcgctgcgaagcgcagtgggcctggccctccagcccctacgacctccattttgcctaaaagaaagctgggcggggggcgggcgcctgggagctgggcttggggtgaggatctgtaaagggaatagggcgccgagggctccagtttcggcgagtggggccagaaaccacgggcagcacccaaatcgtgggtagggtggagacgaaaggaagggtggcgcgcggccttgcctgcttctccccgattttggagttgtgcaaggcgagggccggcaggggtgcgacagtggaggacacgaggggtgctccccgggggcaggcgggagggtggcggtggggaaagggggcggggcggggcctagaggaagcccggaatttagccccccaacttccgagggagcaagaggcagtcggggctgggctggggtctggggtcgggcaaaaacttcgctgatggtgcggggaagcgcacgcacggtggggggcgagggttccccagttccccttccgggtttgggagcgaccgggcaagaggggaagggagcggaggtctggggagttacgtccgctcccaggaggccagccccgggagaccgaaggaagagaggttcccctgggggaaattggggctggggggcgagaggactccttttgccagcgaaggtacctgtggcggtgggactctgcggcggaggtcgctggcggtgcgcgggcggcgctgtcttcctccgcggcggaggcggcggcggcggcggcggcggcggcggcggcggcgcggatggatttcctcagtggccccagccccgccgccagcgctgcctccccagagcggagggatcccgcccgccagtgacgcggctgccgccgccgcgcccaggacccggctgggcgagaccaactgcctcgcacttgggggaagccaggagacaaaaccccaccgagggagcaaagacgggcccagtcgctcccaaggttctcaccctacgctttgtggacgcaaaccgtactcaaagggtttgcttcacggaaaggagtaagacatcccccctctgggactggaggaggtggtactggcatatgaggagggtgagaccgctcgctggtcacgtgatcagcctcccgccccgcctggaatgggtggctccagactgggaaggggagttcgacgccccagttcccggttgggccacgccccggccctgaggaggccacgcccctcaccagggggcggagctaaagagacctggacggggccggcctcgaggctgctggaagaagaagcgcgattccgagaaagtccccgagcgggagtgggtaggggctgatgcgggcgccccgggaatgccatgagaagggtcgtgtccaggcatttcctcagcctcgcccactgggcctttgtagaccccctttcagggcttgccactgaaataacaactcatttattgagagccacactttttttttttgagacggagtctctctctgtcgcccaggctggagtgctatctcaactcactgcaacctccgccgcccgggtgcaagcgattctcctgcctcagcctcctgagtagctgggactacaggcgtgtgccaccacacccggctaattttttgtatttttagtagagacggggtttcacggtgttagccaggatggtctccatctcctgacctcgtgatctgcctgtctcggcctcccaaagtgctgggattacaggcgtgagccaccgcgcctggcccgacacttattttttaattggagtacagtgacgcgattgtaggtcactgccacctcaatctcctcggctcaagtgatcttcctgcctcagcctccctagtacctgggaccacaggcgtgccccagccaccatgcccagctaatttttaaatttttggtagaggtggggtcttgctatgctgcccaggctgacatatgttaagtctcacaatactgggaaattaagtgctaacattctccccattttcttttcttttcttttttttttttttggagacagggtctcactctgtcgcccaggctgaagtgcagtggcatgatctcggctcactgcaacctccgcctcctgggttcaggcgattctcctgcctcagcctctggagtaggtgggattacaggcgcccgccaccatgcccagctaatttttttttgtatttttagtagagacgaggtttcaccatgtcggccaggctggtctcaaactcctgacctcaggtgatgtgcccgtctcggcctcccaaagtgctgggattacaggcgtgagccaccgcgcccagccttctccccattttctaatagtggaaagagacctgaggctgcagagtttagatatgaacccaggcagccaaaactttactgtacattccagtttatctgtatgagcctctagatgaaccccttcctccagggaccttgcctgtaaagggacaagaacgtaggtctaggcctcagtttccacatctgttaaatggggatgttgacagcatctgccctccaagtcccggattcttactgagaaccccatcgattgtggaaatgctttgggaagttcaaggcaacgaatagccttcactgagtccttgtaatttgaaagtatcaaaacacgcagccataagaaagaacgagatggggctcacgcctgtaatcctagcactgtgagaggccgaggcgggtggatcacttgaggtcaggagtttgagacaagcctggccaatatggtgaaaccccgtctctgctaaaaatacaaacattagctgggcgtggtggcacacacctgtaatcccagctactcaggaggctgaggcaggagaattgcttgaacccgggaggcgg

SEQ ID NO: 586502 - DNA, 4001 bp, Homo sapiens
ctgagtaagtagaagacgcttgtcttttttcctaagttctacacagtgataccaaatattaagatattagaaccttgcatagacaatgctgtacttcagcatatgaaactctgtttaatatgtaactcctaaggtttattgtgtgaacatatctaagtggccagcacttgctgtactgggaacttcgccatccataaaatgggtcccttaaggtttcaagaagcgtgcttattgattgggtagtgtaacttcctttttttcccctttaaacgcgttggtgtttttaaagctacaaacccttaacatgatagaagggacagctcattataaaagctaggaagagccgggatttggatgtgaaaggttaaatttgagaaaagaaatatgtaaaaagtaaaacacaaaaatgcctgcatcttctaatcatcactcaacagtgaagactcttgcccttaacagatttattataactagaacaggaaggcaagtgagcatattataacgcttcatttccattgtttttcttaattttttctagtgctaaaccataataaataagatcagttcaaaattttcttgctgaagaggaaaggttaattatctttaaacaatatctattcaaagacctttcctagtctacaggatgcctgattgagttaaaacaggaagagggattagtgtctgaaggaaggtcttgatgaccagtaagaaattgaagtaaaacttataaaactcccgagacgtttcagtggagaatattgaatactgggtcatatgttctcaatgaaatggtaatctctatcaatagtctctaaaactttaaaattgtgatcactaaaaaaatttttcatatgcaccacagtgtatgtataattatttataaataagtacagatactactgtattaatcgcatactaataaaacataaagtgaaaattataaagggatgagatttacaaataaatatagaaattctaatattttgttcccaaatttcggtggactgttctttgcatatcactgaaggccactggtgaaattcaaaattaaataatgtacttgtaagactttaaaatacggttttagaaaatttctttcaaatatcatcctttctagtagtgtaaaagatcaaagaaccaagtagctatccgcttttttcctacaagtgagttttgaaaaacagctgtctaatggaaagcaagatttcttgtctattttccccttcctaggcatcttaaaagttaggacatttggccttaaattacttatcagatccttgctccctcctctacctcctaggatttccccacatcagctggcagtccccaggcactgccaaagggtggtgagaagagaagctacaaaaagggggaaaaataagctaaactatttgctttactgttactaagcaggaaaaatcggaccctgcttcatttcagagaaggaaatattccggaacagccaacttacttgttgtctctgcaacttcacttctttgcgaagctgctcaacttccattttcagtttttccttctctggcaaatcttcgatgtgaagggcaggcattttcgccccagaaccgggctcgggctagctctggcagcggagccgctggaagagcggcgaagctcggcgcgtcccgaaacaactgaaggcctggcccgccgcccacccgcgcaggatgtgactgcagccctgctgcggtccccagctccccgagggcttggctttctccgggacgcttgtcacgccagcgtgccccagcttcctaggacctgagaactctgccttttctcaagtccctgcaacccaggaggcctgcccgggtgctagatgagggttaagtttgagactgggtccaagcagcttcccgctgctcaatcgcccagcagggatgctggccacggacaggccctgactcaggacctgccacgcccgcgggggacggctgggctggggctgcaggactgggaacagcagaagttttactttgtgttctccgcgcacccccgctcctttttttttttccgtttccaagtcacatccgggttttgtttgtgaagctaggaaaaggagtacactacccagcaggaaataactacccttcacctctcaaagagttttaaaaatatgctagatatagcttttccctaattacatacataggttgttgcaaaagtaattacttttctctaattacatatataggttggtgcaattagttttgcaccaacgtaataaatgcatagtggagaatgcggacgcttaagaaaaggctgaaaagaaaatgaagcttagccctaatcccagaaatacccaccagtgttctgctcatttgtgtccatccggcttgttcgaggcctaatatgggtttatacattttgggcgaggagggggcaacagggtgtgaatatcgtttacaagttgcaagaacattttctattattaaataatcatctgcatcctcaacagcagcagagtttgtattttttttatttttccgggggaatgttatgtagaggggtgcatcaaaggatgatataagagaagacagaagcaggaatcttagagttcttaaccgaaagcctttctccactccccaaccctaagttttgggtgacacttgacaccaaggattttgaattcctggctcctgaaccttcctggatgtaggcagtggattcatttagtattagtttctccactttctggcaagcactatttatctagctgttgctctggaaagccaggaaaagtgtccgatgtgaaaaaagtttacatgcaataaaactttccctttaactgtaactaaagtcttgttgatggtggtcaaaagagtagaagaaaaatcaaacatgaatgtaagaaaccttccctagcagttggatatttctctttctttccagagataacctcctgcctcacagagtcaaaggcaagtgaaatattaacttaatatttcagagtagctgacccaagacacccatgaccattccctgtttaggaagcaggagtttttgttcgttcctagtttcttaccacgctccgctcaacctcaatgaataaattagaatgaaaaaaacaatgaaccacttaatgaatactcctggcgtgtagttgcagctctgccacaggccatcactgaagaagtcatttaatttttcttagttttggttttctaatttgtaaaatgtatagtaaggcagggaagtagtgaatcagctaagctatgttgtgtctctaattgtgttggtatgtctatatatgataaatcattttcacaaagaaaatgtttaagagcttcactttcaatatttgaaataccagggttttccaagctcagagtagttagagcatctactgaagtttacttgtaaataagcagggagactagacaaatgtccatatctgtcttgtgcactaattcatttttaaaattttctattacttaaatttaaaaggttggtcaaaaataccttaaattagtgaaagtaatcaacgtgaatgtggcctaaattaaataggttcagcacctaagttaaataaattggttaaataaattattgtgtttttgttcttttttttgtttttttgtttttttgtttttttttttttgagacggagtctcgctctgtcgcccaggctggagtgactggcacgatctccgctcactgcaagctccgcctcccgggttcacgccattctcccgcctgagcctccggaggagctgggactacaggcgcccgctaccacgcctgactaattttttgttaatgtgtgtttgttctaagtcataaaaatataattattttggctttgaagtttctttcccatgaaatcatctagttgcttagagggataaatacttataagcccatattggttctttaacttttcccatcgtattatgagacgtattagaaacaaaatacttgttagtcttttttattgttattaaataattcatattctaatatcttaagtaaattgattaaactga

SEQ ID NO: 586503 - DNA, 4001 bp, Homo sapiens
taaaagagaccccagagagcttcgtcatccctatcaccaggtgaggacaaaatgaaaagacaggtgttcatgaaggagggagcaggccctcgccagacgctgaatctgctgatgtcttgatcttggatgccccagcttccagagctgtgagaaatacatttctgttggttaaaagtcaccagtctatgatactctggtacagcaccctgaggagactaagagggtacatgtatatgtatgtgtatctatatgcatgtgtgtttgtgtgtgtatgtatatggagtttttgcagtctgatattaaattggtttgacttccaagagcagagagacattgaataatggggaaaaggaaccccaaagcctgattaatgatgatgtatgcgatgtttacccaaaataaaaagtccaaggtgaacttaccacaagtgaataataaacacgaagacaatcaccttgcctacaaaacaataatcctgagtacataaataataaaacagcttttggatatttcaacttaagaagagaaaacttttctttatcctaaaagttcattttatttaccctgaattgtaaaaataaggactttaacttgtctggtgtatgttctaagccttagtaatgatttaattttatctttacagcaaaacgttttgcctgtatggaaagggcaacaggggagtttgagattattataaacatagacgaagcccaaaatcccagttttgactgggagcaggcattttgaacaaagtatgaagataacacaagatccttttttactttgtcctgataaaatgagatgttttaaaattatgagattgctgttaccacttgtggaggttttgttctactgttaataactttcctaaaatgaagtgatctaaaatacatatctacattctccaagctttcatcactgtttgtttggtggtttattcctttgccatttcttctccttctaatggcagtgaactgttggtaaccctttccaagatttgtcagaagtttgtaggaggaaccagtgagttcttatgtttgaactcatctttatttgccaaagaagagtagaatgtacttatgtattactgaccatgacagtggagaggggttgacatcatagcttaaagtattgcagcaatatcaaaacattgtatcaaaatatcaatatcaaaatattgcattataaaaagaagtttagaaaagtaaaaacaaaatgcctatattattgcatgcgtatatttattttattgcttatctaaaatatggtttttgtctcatattctcctttttctctttttcttttctttctcttttatttctttctttccttctttttccctttctttctctctctcttctttctctctttctttctttcttcccttctctttaaaaatgaaaaagcattcttatctttgtggtcatacaaaaagaggctaaggattgggcttggccagaggaaaatggtttgccaacctccttgatttagaatctaaatcaagagatagttatgattgattatcaattttcttaatctttgataaatttttagatgaacaatttatttgtaactacattgagcctttccagccaatgttttctaacctggtactcccacagtatctctagcttaaaataaaatactaaagaaagcagcaacttactagcattctttccagtgtcacttctttcttgagctggtcaacttccatcttcaatttgtccttttctgtcaggtcctcaatattgattactggcatctttttgcctgctgaagatgtagaaggttagcagctatgcatgaattgctggagttatttcaagtcagtcttagccaacaattccctcagctcttaacttacaaagtaaactgttctttgttttattttaaatatcccacgataaccaatttcatatgagctctctctcttaacaattctagcaatgcacactagccttgggattttaaagcttcttcctaatcttcactaatatgattaagtcaagcatttgactccaaacacctgttcagcaggtttgttgggaggggtgagttttgtcagtatataatctaaaatacttaaagcgcctccttgcccctggtcttttgtatagtgtaaaatttggggtttccaatccttactttcaattccaaaaccctccacctatgttttatgtcatttaacttaatttgaggtcatttggatgacggtccattaattccctaaatctctagagtatttaacctggtattaaaagggaaccatataaaaagtatcactataatttcattataaataatggattgtttaaatgtgtacccgtagaatggaaatatagtaaacagtcttattaatcagaaataaactagcgtattacttgtgagcgtttttccaacaacacatgaaatttgcctgtaactgtcacaatgaatctggtaacaatgatgagaaaatttagcaggctaaaggggacatagcaagtctgatctaccaataacctcctactagaacagactctttcttctgccctctttgcaattcctcttctccccaattagaccagtgagtaatggggaagaaggctcaatagctggtgatagtcctatgaaattgcctgggaaagatttcagtgtagccaaatggcattgtacctatagtgtctcctccttctccctagtccaatttttgtaatgaagtattattataaaagtaagtgtatatagatcacatactatttcagagaacaaaataacattttacatctacatgaaaatactctgctaataatctatcagcaattaacttatttccttgaatttaaatggtgttttcatttccaaaaccattgaaggaagattctttcccttcccagtcttaaaataccttgtttttctccggataagtagtagtttaagaatttttttttttttttttttttttttgagtaggaatttcgctctgtctccaggctggactgaagtggcgcgatctcagctcactgcaacctccgcctcctgggttctagcgattcttctgcctcagcctcctgagtagctgggaccacaggtgcatgccaccacgcccagctaatttttttatttttagtagaggtggagtttcaccgtgttggccaggatggtctcaagtttaagataattttaagggacaaatgtctacataggccaacatagaggtagaaaataacacactgtgggtacttgagcccaatgtgtcctatgtttttatttttgctattctgttctttaagaaacactatgactatacaaaggttatttcttcctgtataagcctgttttgcatttgggaacccaaattttattctcatcttccttcccagtcttttagactaaatataaaacttcattaagtatttttgatgatcatttttaccttttgacattgttctttgcacaatttttcttcattttggaaaacttttaattcctttaggtaatggctcttcacactccagtgtgtgcagaaatcactttaggaaactcgttaaagttatgagtccaaccttagagattctaatttagtagatcttgtgttgggtttagaatttcattttctctattccaggaagccctctcatatacttaccaacaaaataatcgtttactggtacttgctagccatgtgacactgaccaaattacttgacctgcctgtgccttagtttacagggaaataggggcaataatattacctaccctgtagatttgttgagagtattaaatgggggtaacataggtaaggactttgtaatggcgtgtagtacatagcaagcacttgcacgtgttagctggtgttattcactttgttgtgcttccagaatttcaaactgtactttcttatatggcccttgccatataatgtatgtgatcttataggtgctctaaagaagataggtgatattactgatacacttaaaggagatcatgcgtacataatttgactcctttaatatcatgcat

SEQ ID NO: 586504 - DNA, 4001 bp, Homo sapiens
ttcaagaagaccaaggggcactgggtcgggcagtggtgagtaaagctcaggatagggatcaccaggtcagaaatggcttcaatgcaggatgggggatcaccaggtcagaggtgactggagcacgccagtttggaggtgagtggtgcacagttcaggggtcactaggtcagaagtggttgaagctcaggcctcaggatccctcacctgcaggcggaggcggcggggtgagtccccaaagggctgcagagagccatcggtagatgaggccaagcgtgagaggcagagcaggtagtcaggggggaagctgtactgtgggtgcagcagcgggaacactctctccaggagctgtgcccagaaatccgccagggtgtcatccaacccctcaccagattccccatagaagtctcgcagccgagagaacaggccattgaatatgagggcgtgctgggcatacaggcggccgtaggagtgggagaagagctgggtcagagagtgctgggctactgagagcatctccagaaaaaactctgcagcaaatgcagggaacaggtggaaggcaggtcaggccaaagaatggggagaaaagtgaacaggcagaggcaggaggagatgggagagaagagaaaagacaagtgaatcagaaactgagtaactctcagagatggggcagacagggaatgggggagggcagggccctggagacagagtctggggggtgggcgggctgggaggggatggagtcttcacagatggagtaaggagtggggacaggagccttgctggggtcctaagcaccgagaggagctgtgaagctgagtttggggaccccaggtcctcaccatcaaattttctgtgcctggcagccagtgtgtgaaccagaaaggagccgctgtcctccaccaggcctcggaaggtggcctcagtctccctgatcagcctctgctctgtctcactggaacagcaggtgtactcctggggacagacccggaggtgctcacctggacagaggagacgtgaaggaatggtgggaagtgatatcctaaaatcccttccatttcccgcctatctctggggactatgccttctcttctacctgcctggtctcttttctattgtctgcaccctcttccctacctgaacctatcccctaccttattgtctcctgacccatcccaagttcactcccattagccacgggatcatctatttaacagctgccctgagggccaagtcagtggtcagagtgtcctcaggtgaccctccccaatgtccacaccccagacctcgagggacttggagaacagcttctaggggatgaagaatggggcttggaagggtggggttacttggtgagcaataaagtattctcatagaaggggctaatagaaacagcgaggagaacatggctgtgaagaaagaaacacatagggggtgttaattaggaggaggggattcctggggtggggatggagtaagagcgctattctttgcataggagggttattgtgatcccggtaaggaagttacaggaggagaacagacattactgtgggatgaaaagattagtataacggtcactctgaaaaggaagagagttattgtgagatgaggaggccccgcccccgccccccacccccaattctctagtcttcctctttctcctcacctgagatcagggcgggagggattaggtttaagctatatccccgggcccccagcacctgccgggtctctgcacaactccgggtgacctttgcctcgctcccgggtccgggaccaggaccgggacacagaggcagcagcagaagcaggagaggtcgcagcgcggacataactgcagccaccccaggacggcaaagtgggtcctaaggaggaaagcagagcctcccaaactcgggaatccggtactcggccgcgggaccgctccgcgggccagagaaagagcgctgctccggaaaactgaataccgagcacgatagctggaccaggcggcatctgccgagacaatgggagcggggagccggacagggggcggggcccgaggcggggccccgccaataatggctcggagccggcttcaggggcgggggcaaggaagaaattaagccaatgtagcgcggaagctcggcaggggggcgggacccggctggcactcaggaggttggtgaaataggggcgtggtctccctcgggggcgtggcgatccggctcaaaaggcggggcctgggtggaacctagcctatggcaattgagaagccagattaaaggggttactagcagtctggtccaaaacccgcccaatggagtaggagattgagggtagcgggggtgggacctgggtgggggcggggctaaagcgggccgcccgcgtgcccaagcccacgtgagagggcaggacgcctgagagcttgaggccacacgaggctgtggagcggcgtgactcaaacgtggcgcgcatcagctcgcacacttccaaacctcgcgatagctactggccctgggcgagccgttgggattgcgcttgcgcacagcgtgtcttgtacgttcccgcgcttttctggaatctttcgcccccggaagggcagcggcgggcgcctgtgtggaaggtggggtggccagagacacccgagggacctgaggtggggaccttccctgaaccctgctcggccagaagtcactcttccaggctctgacaggtttctccttgacccaagaataggccctctcgcgaccctcccggccctgacactaggagccttcccgggccgtgccccaatggcctccgccacagagctggagaatcctctccccaggcctccatagactgagagtccattctcttaagcgcttggaaggctctttatcctggagccgcttaccccaggggcagtcgtagatatttttaccttctggaaaaataggaaacgcgcacctgcctttcctccttttgcgtttccagccctattctcatggcgcctccacccccaaatccttaagagcctcctgttccattccaggtggaatcaggtgctagtcctctggaaacgaaagcctggggtcttcttgtattttttttcttatttctttctttattttttttatttcattttaaaaaacctgtaagttcccttgcagagggcggtttatacttccgaagcctccagagaggggtgcgtctgaagctgccctgctgtctgccttgcttggcttttttttttttttccatttaattttttttttttagagacagggcgttgctatgtggcccaggctgatcttgaattcctggacccaagcgatgctcccgcttcgccctcccaaagtactgggattataggcgggagcactgtgcaccacgcctcggcttttggagagcaattccaaacccactgcccagtttctggtgtctgtaatcccttggtgctttaggtccactctttgccttattttatttatttgtcattacttttttttttttttgagacagagtctcgctctgtttcccaggctggagtgcagtggtgcagtcatagctcgctgcagcctcgacctcctgggctcaggcgatcgtcccgcttcattctgccgagtagctgggactacaggtgcaccaccacacctggctagtttttttggttttggtttggttttttcgtagagacaggatcttgctatattgcccagactgattttgaactcgtagggttaggcagtcctcctgcttcagctgctcaaagtgctgggattccaggtttgagccaccctgggcaccttgcctttttttttttttttttaattatgagttaaattcccttgcagcaggcagtttacacttctgaagcctctagagagggctgtgtctgaagctgccctggtgtgtaccttgcttgggttttgtttttttttttttgggtgtgtctcatgttgccaaggctggtctcaaactgctgggctcaagcagtcctcctgtctcagcctcctgagtagctgggaccacaggtg

SEQ ID NO: 586505 - DNA, 4001 bp, Homo sapiens
gagttataaacagtgcaatacctcatttcagatttcctctgcttgtcatagagaaataaagccacactttagtcagctgtattaagtctgcatctgtcaaaaggcgtgtggccctcccagggcttcagggttggtgagagtgactggggcaccgcagggcagggcagagtgggcaccctcattttcttgaagtgagacacgttcttgctgggacagaacgtgacggaatactgggtcctgctttcagcacgagttagaaaggccgtccaggcaaagcccctgctgcggtcacgctgagaccaccggagctccgggggagaggggtctgtgccttgagtttgggaagctgggtgctgctctcaccagggggtgaggtgtctggtctgtgttcagctgttcccataacaggacagcggcctgggtggcaccacccacccgctcccctagtcagtggtatggcaccgccaggccgaggctgagtcctacctgggttgcagccccttctgtgctcctggaagcctccttggtcaggcccatcaggctggaggtgcacttggaacccgctgcaggaggtgtacctctgctggacctgccgaatgcctgagcagggctagagagaggaagagacccgccctgggagcccgcgagggaaggttcccggctggctggcgggtgcgtcctccctctgagccagtgagtctgccccttggcacagggctttataggccccctccgccccgctcctctctggctcctctctggccaggctctgggcggcctcctcagaaggctagtgttaaccatttttttgctggccctttttctcccacactttggcaatcagctcagttctactagacttgtttttgtggaagtttctggtttaactgcttttcttcacccacagatacaaacctttctttaagtttgaaggcatcatactaggtgttgtgtatcttttaggcaataacctgtcctcctgggttgaagcaagcaatattcttgtttttgcaactgacctgcgttaaacactaaatttcataattaacttagtagcatgtgcatgatccataaagaatttaacaggaatttcacagacatttgcagagagaagtgtaatcccaagaaataggcatttctgacaagtaacttaggaatctgagtactggttaagcatctggaaatctgaaatccagagtgccccacagtccgacactgttggagcgtcgtgacacaagtggaaaattccacacctgacctcgtgtggcgggctgcagtccaggcagttcaaagtttgttttatgcatgaaattgttaaaagtgtttttataaagttgccttcaggcagtgtgtataaggtgtgtatgaaacacaaatgaatttcgtatttagctttctcattctgtacctgcagatattccaaaatctgcaaaaatctgaactccgaaactcttccggtcccaagcattcagaccagggaccctcagccggtagttttctctgagtgttagcggtgcctcaggtccctcctcccgcgctcgctgcagaagcgtcggaacttacctgccgtccagatgttggtggcctcttccccaccagggccgcctctcctgctcatggttgcggatttcacagtctcgtgcaggcggagaataaacctccctccccggactctcggggccgctgaactgcctcatgcggggcggccacttccgagtgcgccccctactggccatttgaattttcactcgccgcttcgggaaccgatggccgccccatgagggcagagcgaggccccccaagcccgcgtgggctgtccaggccgaaggggtcctcaggcaccgccagccccggctctccaggcggaggggtgggtcttcctcagaagggaacttcagcgaatctcactcctacttctaggtgtcgttttccctctgtaatgttttgaagtggtgagattgaatgctgagtgatcctttgtccgctgagtatgagtaatgcggctgctgcagcctgaggcgtggttcagagacctgcgtgggctccccccttccccctcccccccaggagagctggtgcaggcagaggactggggtgctgggcctccaggtgcactcggcccctcgggacctgctccccgccaggagagctggtgcaggtgcaagagtggggtgctgggcctccaggggcactcggcccctcgggacctgctggggctcaaggcatctgtgcaatagcaatttaaagtctttcagatgtgtattttaggaaatatacacacatttcctaaacagaatgctgtgttaattttttaatggaaaaatactaacgtggagttttcttccagcagtagaaagttgacaactctaatatgtacctttttgtatttggatgataaagagctgatttgctcttagacattttttgaccagctgtgaagttgagatgatttcagcattaaaaatgcctgagacacaattttgaaagatgtgagtcatgagaaagtacagaaaaaaataagtaaaataaaaattcaaaccttgaaatagctgagacatgtcacttaaaaatagctgcaccctgctagtgcaaacccatggcttctggtctctctgcccatcccagcggctgaggaagagctcagctcccaagctctccactcacgtgccctgggtttcctggggagcctgccctgggcgggcgagtggccgatactcctagatttcctgcttgcagcatagagtcagcggatcggggcatctgggtcttggagcgcagccttctcctgtgggcactgggcgggtaagtaacttgtactgtacagctactgatgtaagagacagggcccggactgcaggaacttccgtctccaagacctacttaatacttgatgtgtgacggcatggcaggaatctcgtggactatttgtaaggcatagagaccttttgccgatttttaaatctttttttttttttgagacaggattttgctctgttgcccaggccagtgtgcagtggcctgatctcagctcactgcagcctccacctcccaggctcaagccatcctcccaccccggcccctgagtagctgggactacagatgcgagccgctaattttttttttttttttaatttttttgtagagataaggtctcactgtattgccaaggctggtcttgaactcctgggctcaagagatcctcctgtctcagcctccttcagtgtagaatgtgacattgtacacatgcatgctgggcgctgtgcggtgctctgcgtgcttgatcttaggtcaccctccttcagagcctgtgaggcagggctgtccttctccccgtctcatggttgcagaaactgactgcagggaggtggtgtcaccgcggcctcacagctggccaggagcagatctgggaggggccggctgactctgagcacatggtctcggcctgtacaccagaggcgtcctgggtcaatagtcatcttttcaggcactgatttccttgttggatctgatgtcgttatgaatttttaagaagtgaaaatatttttctgttcatccccaggatagaataaaaggaaagaacttcaaggggaatttcatctgatcattgcttattgagctaaatgcacacatagccaaatactggataatgcatagagaaaaacacgcacaaagtaaggcagtgtgtctccagcttcaggagccctcccgagtgaatgccacgtaggaaaccttggccctcgcctttgacccttcagtcctcgcgtgcaaagcccagtccttgtgctgagaggccccagacacagggcctgcagtgccttcccagcgcccctccctctgccagcactgactgactgagcaaccccttcctgctccctgtcccatccccagtcctctcccatgccctccatggtaggcagcagcatgggtccccctgattctgcaggagcagagccctcagggagttgcatgtcgccgtccaaacaaccctggttttcagcgtt

SEQ ID NO: 586506 - DNA, 4001 bp, Homo sapiens
ttttgaatgttttttttttttggtcacccaggttggagtgcagtggcacaatctcggctcactgcaactgccgcctcccgggttagagtggttctcctgcctcagcctcctgagtatctgggattataggtgtgcaccaccacgcctggctaatgttttatatttttagtagagatggggttttaccatgttgcccaggcttgtatcgaacttctgacctgtagtgatctgcccgccttggcctcccacggtgctgggattacaggtgtgatccaccgcgccgggccaggggttattgttttgaagtgctgcaaaaccagactagagatttgttgacctattgcttgaaaatacttacttaaaaaaaaaaaaaaaaaaaaggctggcctataatcccagcacttcaggaagatgaggtgggaggattgctcaagttcaggagttcgagaccagcctgggtaacatggcgaaaccctgtctctactaaaaaaagacaaaaaaagtagctgggcatagtggtgtgcgcctgtagtcccagctactcgggaggctgaggcaggaggatcgcctgagcctggcaggtagaggttgcagtgagccaagatcacaccactgcactcgagcctcagccgagatcacaccactgcactcgagcctcagccgagatcacaccactgcactcgagcctgagctactgcagtgaggccccatctcaaaaacaggcgggtggggaagacaagatgaatcactgcctctgtgtcagttattctaaaagtactgaataaccttcacttagctggggctggtgaatttgattttggttattttgcactcttgattcatctttagtagataataccattgaacagcataaatgcctctgctctcaggctctgtcgggaaggttgaaagactccgcatttcgcctctgtatttaatttcttaaaaacggcacagaggacttgttttgctctttaaatgtagaaattttggaacgtattagaccgtggcgtggcaggaagtttaaaggtgggcagaaccctcaacttaacgtttattttctttcctaattttgttaaatgaactccaagggaaaaatagtttaaaaacgagtcattcatttctttcccatgtaaattgagtcttttgatcgttgccagacaccgagaagatacgggacctggtgtctgatgtgtcctagtgtctgatgtggtcctgggtgagaggaacctagtgtgccattcaccactggccccacgtcctcactggaggtggccatggagttataaacagtgcaatacctcatttcagatttcctctgcttgtcatagagaaataaagccacactttagtcagctgtattaagtctgcatctgtcaaaaggcgtgtggccctcccagggcttcagggttggtgagagtgactggggcaccgcagggcagggcagagtgggcaccctcattttcttgaagtgagacacgttcttgctgggacagaacgtgacggaatactgggtcctgctttcagcacgagttagaaaggccgtccaggcaaagcccctgctgcggtcacgctgagaccaccggagctccgggggagaggggtctgtgccttgagtttgggaagctgggtgctgctctcaccagggggtgaggtgtctggtctgtgttcagctgttcccataacaggacagcggcctgggtggcaccacccacccgctcccctagtcagtggtatggcaccgccaggccgaggctgagtcctacctgggttgcagccccttctgtgctcctggaagcctccttggtcaggcccatcaggctggaggtgcacttggaacccgctgcaggaggtgtacctctgctggacctgccgaatgcctgagcagggctagagagaggaagagacccgccctgggagcccgcgagggaaggttcccggctggctggcgggtgcgtcctccctctgagccagtgagtctgccccttggcacagggctttataggccccctccgccccgctcctctctggctcctctctggccaggctctgggcggcctcctcagaaggctagtgttaaccatttttttgctggccctttttctcccacactttggcaatcagctcagttctactagacttgtttttgtggaagtttctggtttaactgcttttcttcacccacagatacaaacctttctttaagtttgaaggcatcatactaggtgttgtgtatcttttaggcaataacctgtcctcctgggttgaagcaagcaatattcttgtttttgcaactgacctgcgttaaacactaaatttcataattaacttagtagcatgtgcatgatccataaagaatttaacaggaatttcacagacatttgcagagagaagtgtaatcccaagaaataggcatttctgacaagtaacttaggaatctgagtactggttaagcatctggaaatctgaaatccagagtgccccacagtccgacactgttggagcgtcgtgacacaagtggaaaattccacacctgacctcgtgtggcgggctgcagtccaggcagttcaaagtttgttttatgcatgaaattgttaaaagtgtttttataaagttgccttcaggcagtgtgtataaggtgtgtatgaaacacaaatgaatttcgtatttagctttctcattctgtacctgcagatattccaaaatctgcaaaaatctgaactccgaaactcttccggtcccaagcattcagaccagggaccctcagccggtagttttctctgagtgttagcggtgcctcaggtccctcctcccgcgctcgctgcagaagcgtcggaacttacctgccgtccagatgttggtggcctcttccccaccagggccgcctctcctgctcatggttgcggatttcacagtctcgtgcaggcggagaataaacctccctccccggactctcggggccgctgaactgcctcatgcggggcggccacttccgagtgcgccccctactggccatttgaattttcactcgccgcttcgggaaccgatggccgccccatgagggcagagcgaggccccccaagcccgcgtgggctgtccaggccgaaggggtcctcaggcaccgccagccccggctctccaggcggaggggtgggtcttcctcagaagggaacttcagcgaatctcactcctacttctaggtgtcgttttccctctgtaatgttttgaagtggtgagattgaatgctgagtgatcctttgtccgctgagtatgagtaatgcggctgctgcagcctgaggcgtggttcagagacctgcgtgggctccccccttccccctcccccccaggagagctggtgcaggcagaggactggggtgctgggcctccaggtgcactcggcccctcgggacctgctccccgccaggagagctggtgcaggtgcaagagtggggtgctgggcctccaggggcactcggcccctcgggacctgctggggctcaaggcatctgtgcaatagcaatttaaagtctttcagatgtgtattttaggaaatatacacacatttcctaaacagaatgctgtgttaattttttaatggaaaaatactaacgtggagttttcttccagcagtagaaagttgacaactctaatatgtacctttttgtatttggatgataaagagctgatttgctcttagacattttttgaccagctgtgaagttgagatgatttcagcattaaaaatgcctgagacacaattttgaaagatgtgagtcatgagaaagtacagaaaaaaataagtaaaataaaaattcaaaccttgaaatagctgagacatgtcacttaaaaatagctgcaccctgctagtgcaaacccatggcttctggtctctctgcccatcccagcggctgaggaagagctcagctcccaagctctccactcacgtgccctgggtttcctggggagcctgccctgggcgggcgagtggccgatactcctag

SEQ ID NO: 586507 - DNA, 4001 bp, Homo sapiens
ttgaggtcgcacccagtgctgcagccgactctgcctccacactttggcatccttgctgtgtccaccagcagagaggtggtggctgggctgcctccacctaccttgtccacactttctccttccttcagggctacgaatggaaaatggtaggaaatctttagtgcttgatacactgctacattctgcctgcccttatttttttctgggcagaatatttagtccagagcaaggtgaacctggtgaatggctgggttttgttacactgcccaagaggctgaggactcctctcgagctgacagcgctgattcggcctcctgctaatctgttttattgagcagagcgaagtggactggtgaaagagggtggaataatagcaggtgtcccccatcgggtctattctgtgttccttcgtctttaaagtagcctgtcctgggaggtatcctgagggtgggtgcaggtctgcctccgtaggaacaatccccaccatgcacgtctctcacgccaagcagctgatctcacaagaacacaattacccagttttgcaaatgaggaaacgaaaactcctcgttttgaaggaaatgaggaaatggagcaaagccactggagacccagcccctaggctggcggggagcccgagcctgtccaaccccaaacccgggcaggaaggacagaggtcgggatggaaggctgcctcctcaacttacccgctgtgtggcttggggcgagttccttgcccactctgtggcccgtggcctcgtgtgggaagcgggaccatcacagtgccgggctccgcgggctgctaggaggacgcgcggcgcactgcgggccgggaacgtgctgcgcgctgacaccgggtcagctccctgtgatgggacttcctttccaaaaacgtaggcgttttcccgggtcgcagtcgcagtcgggagactgagggttagggcgcggccgcggggtctcctgggccggggcgcggcccacgtctcaggcctctgcggctctgaccagaagccgctgcgcctttggccgcttcccacccgtcccgtccccgcaatcccaggcccagggttacagcggctcagctctcttcctctcgcgaatctgcacactgcttcagtggtctggaccctggctgcataggcagatcccaagaggaacttttaaaacaaggatcctctgaccccactcccaaagattccggtttcattgcgtgggtatcagtattgttaaaaatgccctggcctctcctgcctgaccagggtagagagcctgggcttcagctcctctcccagcaagctcctgcaggtctgtgaggaagccccgcaggaggagcaatagcttcagggctggggagattcgtaaatttgcctccagattggagaccccatttcatgtgaggtctccacccttttggatggaagctggacatagtttagttggtggagttgctttgttctgtggccggaggctgtccaaccctcccccaaccactgtctggcaagaatgggttgcaattgcaatggaaaagaagcttcacaagagaagggcagcatagtttttactttccatgagccgaaagcaaagaatggagctggaggcattttgctgtagtttcagccttcccaacagtttgcagaagaagagatgagtgagccagagatgaaagcttcctgaagaacttcagtccaacctctagttcagaggatattattagccatcatttcagccaatggccagagaatgggttaaacatagaaattaagggttactcacgtttggcggcatcaagtggcaatcttgcagccaggagcagaaatcccaggaaatagtagagacattccatgctgaattctcacggacgcaggcactcaaggtttaactctgaattcctctgggcccgtccaccaagagcaacagtgttcttctggcatctgtggtgcctccctctctattttaattaaatacagggcctcggggaggatcatgtgatggtattaagcggcactgcctgatctggtctctcaagttcaacctcttacaactcatgtgcttatgactcactccttcttggcatctatttattcacttttcagatgcacattatttcaattttgtgattccacatttactagattcaaggagtttttttcctatagactctatttcaatattcattttttttttttgagatggagtctcacactgtctcccaggctggagtgcaatggcacgatctcagctcactgcaacttccacctcccaggttcaagccattctcctgcctcagcctcctgagtagctggaattacaggtgcccgccaccatgcccggctaattttttgtatttttagtagaggcaggtttcactatgttggccaggctggtctcgatctcctgaccttgtgatctgcccgcctcggcttcccaaagtgctgggattacaggcatgagccaccgcgcctggctcaatattctttaccaaataaaatttcaatcctccagcctcactgattatcgacttactgtggttcctatactgcatcaggcacccagctcacgtttagagttcacagttacgcaccctttcctaagatgtagttgtccacctgctcctgtgctcgtgattgcttgtatatttttttcctccaagaggaagcaaagatgggggaggtgtcttatcaatcatttgaaattgtggaatacataagtggatgataacatgaatgttgtgccaggatgtgctggaaacagctgcccaggcctctggtagctgagaaatttactcaaaagcacatttagaatatctgtgcaattccatataacttttgtaataacctgcataatttttggtaactgctctcaaagcatttatgtgttgcattactcagagccaattgcataaaacgttctgtgtattttttcatattatagaaagcaggcattaaatgtacaaacaagtgtgtctgtaagataaatttatacagtcaaatcattcctggttacagagtatgcagaaaatgtggcaacatgaaaactttaccatatgtgacctttctcaaactcacattcacatggccattttcagtgcagtagaaaccttggttgcaggtgagggtaaaacttggggtattgatttatggttcagtgtgtcaaggaggaatggaaatagcctatgaaactaaaatccatacagcaggagtggctgacttccatccctaaggcggcaaacaactctgtagagtgccttttacagcctttgcagcaaatatgaaggggaaaacaacgaaaggaacacattattcatgactgaaacaattttcaaatattgatgaataaaggaataatggaaatacttattagtttcatgtaatgtaaagcgaataatgtatatagttatttgctttttaaattacttaaaaactttttttttttttttttttagagacaggctctcactctgttgcccaggccggagtgcagtggcatgattatagctcattgcagccttgaactcctaggctcaagtgatcctcccacctcagccttccaagtaggtaggactacaggcacacaccaccacactcggctaattttttatttgctttttattttttgtagagacaaaaatctcactatgctgcccaggctggtcttgaactcctggcctcaagtgatcttcccacctcagctgcctacagcactatttgctttttatgacaaacacataacttttacaattaaaaaaaaacaccttttcaatttaaggaaaagctactattaacatttttaaagatatttttgtcctttgttgcagacacagttctggctcatatttctagccagattagccaccccgtctctaaataaattggaagtgttaaattcttctgtaacaaaaccttcgttttgtttagggagacacaatgatcaaatcaacttttatgtcttttttccttccctgcaccatcaaagagaagaggcactgataggacaagagtcaaaat

SEQ ID NO: 586508 - DNA, 4001 bp, Homo sapiens
aggggagggagagcattaggagaaatacctaatgtagatgggttgacaggtgccgcaaaccaccatggcacgtgtatacctatgtaacaaacctgcacattctgcacatgtaccccagaacttaaggtataatttaaatatatatatatataattttaacggcggaagggagctctaaagatttcagtataactttctgtcccccctaaaaatcttaattaactgtggcccaggacatctagaaattctctcaaaaaacagaagagaaaaaaattttaatcacttcccttgggaactcattttaatgcctaccagcacattagtcagggatagtctctaaattacagtttcaccattatgtagatatgtccagtaagcttttaaatgatttttggagcaacagtgcaattggtgataattgaggaagttgatccccaagtccttaaacgacctttcacaggacaaatctagaaacccttgttataacaggaggccacacgttctttttctcttgatttctagacagatgacttcctaccagagttatgataccctagaaaaatttttaactattctctccccttatcagtttttatcagggcatgagatgaatgggacatctaacctggttagcgaaggagagtttgtgtctttggagctgggtggtggccagaatttacttacctaaggtgaagtgggatgaaaagaactaaaggtctgagttcagtccaaaacctaagagaccatgcttcaaacagaggaacttagaatgagctaatgaaactctaaaactcttaaaacctatgttgctttcatgggccacacagacattctgtactggaaaataatgtaatattgcaactccaggtggattcaacaacactggtctttgtacggccatcactcagagatgggagggatcccataaggactacaatgagggctcttgcattttatagtccttttgttttgggtacatcaaggcatggttttgatcaagtaatgaaataccattcttacctcccctatacccatttttattcccaatataaaggaagcaaatatgaatactgtagtttgtggctaacggcacaaaacacaattccataagccaattatcttttgcttaaaccaatggcttcccccaaagacaaagagaagcaaatcatagcagctaattgctgttacactcaagaagatttcgttataaaatgcaaccttgctgttacaggcattggaatgcgtcacaacattcaagtaatagatcctaaagaactggtagggaaggaaacaaacaaggatgacccctataaaaaataggtttttcagctgagcccagaactcctggtgggatagtaaagagtggcgtagcttctgcaccatcaacataatgatgaagacctggaagaccaacagaatcacagcaacggctatgacaaaaatgactatcatatagttgatgattttcacatatgtgtaagcaagctctttgtgaaatttaaaacagtgctcctcattgtattcctcatggattccataccgggagacaaccaggggtaccacaatgacaatcaccagcgtccacatgccagcactggcagccacagcatgcagttttctgtagaattccactttgtctttgcacttgaagaagatgaggtatctggtgaccaggatcaccacatagaataggaacgtgaggtacatgtggatgtgcagcatggcactcacaaatttgcagaagggcagcccaaacatccaagtcttcttgatgaggtaggtcaagcgaaatggcactgtcagcagaaaaacgctgtggaccaccaccaagttaatgaccgccatggtggtcactgaccgggtgttcattttcaccaggaggaaaagaatggaaatgacacccaccagcccgccaataagcactatgaagtagaggctgattaagtggggtgtcactataggatcgcaagaggaattcctggaggtattgtggccaggcatacttgggaagtcacctggaggagaaaaagcaccagagtaactgacaagctttcagagctttgttcctatctcttttacagcactgacaatgtgactttgccatttatgtgcttatatgatataaactttacatgctttaagaatgaagattatttcctatgaatgtttgcataccctagacctaaaacacagtaagccattgattcttactctttaataggaataaaaatcgaatctgaatcttcaagttgccccccagagagatgtatgtagataagacaatttacataaaacttcaggaggattgcagaccatctggagctagtacttggatactagtactacagtaaccctttaaaaagttgtgagatggatagaaagatcgatggattcatgaagtatacaatttttttttcttacgggcatgattataattctctaattctttcttacttattagcaaatgacccaagaatattcatacttaattcatttagaatactgattaatttgaccaaaaataccatctaagtcaagagagcagcaagcaataggaaggtttacctgaatttctcattacagttattttatcttctagcagtgagtgaggccttgctaagccttcccatgggccccactgaaatatagcatgtcttccaactctctcatctcctactctcaaaggccttgcaaattcgtgacagagccactggcatttatcccctggactcctgaaagatccgctccacaattactctcagtcctttctaattcattctccatattcttattcattgcttgctgtaaaagatttagtaatcttttaatttcactaagaaagtcatgtcagtttcctatctaaatcccttcaacggcttcccatctctcctacgataaagattgatagccttacatgtctggaatgttctgggttacagtggcaaaatctgatcccttgagacaagattcaagcaataatcaagagatgaaattggcaggctttaatggatttgacatggggaaatgaggaaaaaagaagtgtcttgatactctcagatttctgacttgaacaattgtgttattagaggtatgtctactgacaccagggagactaagatttgagaaagaactcactccctgacctttgcaacacatatgcaattattcttattcatttattgaatgtctctttgtataatggaatattacccagcaataaaatgaaccaacttctgatacacacaatactgatgaatctcaaacacattacactaaatcatgtattctcaatggggtgatagcaccttgtgaggggcaaaacattttgaggtgtgaaaaaaatcttactctgtataaagcacaggtgtatacacagtacatagacatatagatatatctgtggtatcaaaatttcattaagtggggagagacaattagggaaaaatactcattagagggaccataacaaacacaaaaagttgagaaacattactaaataaaaggtaccagccaccaagattatatattgtatgatatctttttctagaagaagcaaaactaatgtgacaaaaagcaaatcagatagctcaagatctgggttgtgggggaaaggattagtttctgttttatatcatgttggttaccattgtagttattcatcaaagctcattgaattgtacacttaaaattggttatttttattgcatataacttatacctcaatgaaacttaaaaaaaaaaagataataataacccaacctcacaaagccttttgcatttgtgggcatggaaaaaaattttaaggaattgtgactcacttaactgaacatgatttttttgttggctctgcaacagctgtctcatgttacactgtgtatttcatccgtaggctgaaatctctctacttgccttttatttttccttgtagaaaagtagttttatcaaggagacatgaaattatattgtgttcacatgtgagtcaagaatgaatgtgccactat

SEQ ID NO: 586509 - DNA, 4001 bp, Homo sapiens
actacggacccgccccactatggaccctcctcactgcagacctgttcgctcaagtggaacaggccggtccgggccccatctgaggctgcgagggccgcggagatacggatgctggtcccaggtgccttcggagctggcctaaggttccaccctggccctcccaccagaccccgtgtgacacagcctccagccctctgtcccctgggggcccttcagctctggtattcagtcagaaatcctaacacacctttcttttgtttatttatattctttagttttgtgcacactttgaggaattgatttaggacaggttcatactgaaaaaaacctcagctgatgttatctgtgggggctggggagggtgtcagggacatttggtggctgaggagagcgcgtcactgctattgaatagctccatttaacaccagccatgtctccgcgtctcaggcacttctgtgaaatgttctcagaaccctgtggtgactgcggcacacccggcaggccttgctagcacacgccgcccactggcagggcccggccaccctggctgttgccattctttcgtagggttttgttcattttactatttgtcatttttctaggaaacatctgtttttgtaaaacaaacaagggggaatcaagtattttaaccacaaagtataaatactggctctaagctttcatcacttcattgacaaactgaatgctgaggaggctgaaggcgaggaggcttttgcggatgtggaccttgagctgcgtgtttgggagacgcacaggcctcggggagactcaagccagatgccagccacggggaccacagccttggcccaagagtggcatttgtgggaaaaaggaaacttcaagaaaaacacccctcctgcttctcttccagcagctcgtctccttctggaaggatgtggggagcgtccagggtaactaagtgctctgcgtccaccagagtcacgtctccccaggagggctgggccgcctacgccagcacctgctgcacccccatgtggtccggggagcagtgccggtccccgcagggcagctttttcatcagccgttggagcttgctggggaagctctggttcatgtagcggtagagaagtggtgtcacaaagctgctggagaaggccaggagtttggagaaatccttcacaaagtgcagtagccccaggtagtgtgcgtccacgggcttccctcgcgagatgatgaccgtgtgccccagcaggatcagatagtgtggcgtccagagcccaaactgcgtgcacacggtggccaccagcagcctgtgtgccgagggctccagccggcccgtgtcccggtccaggggcgtgtcctccctgcggacgcgggagagtagcaccagcgcgtagagggtggccagtgctggcaccacgtagccgatgaacaccagcgtggcgtcggcagcttctgcgttctgcatcttggcgcactctagcgcgcgggtggacacatggctgcagatgtagaagagcagcgaggagaagctggtcagcagcgcgccaccccacacgaagccgcacacgtgccgcgtgttgtacacgctggccatgtaggtccgcggcagtgcacgctcgatgtagtggtcgaggctcagcagggcggtggagtacatggccaccagtgaggacacattgaaggggatctgcagtgccacgtggacttcgccgcccacactccacagcgcccaccgggagctcggggggccgagcaggtgcacaggggccagggcgctgagcaccaggcctgccactgccatgttgacaaagtacacgtccggcatggtcatgctggccttgctgtgtaggttggccagcaccagcagggcgttgtagcacaggcccactggcacgcccaccaccaggcccagcagcgacaacagtgacagccccagctgcaggtcctggcaggcaggcagctcctccaccagccctgtgccgttgaaccagctgcagctccacatggcggccggcgaggctccgcgaccctgcggaaagaaggaacaggtggtcagctcgcgtcccgtcccaaagccctggcccagaagtgctgcaggtacaggggtgccttctcctggtgcagtaatcgctgcagaccacagagcgaggctgcctttggtgcatttctgtgaaagtgaagttgagcgttgaaaaatggccgtctcgggtcgtgaccgggggctgctgtggctgcacttatttcagcggctggggttggggaccagagagggagcctggtgtgccccacattctcagagcccactcttcacgggctgctgcgaggcctgggtggtcgtcctgagttggttggacgggccccgcacagtgattcccgaagtttactagatgtctgtggtgttcgcatcttgccagcgccgggagggacaggcaatgtggacggtcagccctgagcctccctccctccctcccggcagctcaggacccggtgccttggagtccttgcagagcctgggctccagggagggtgacctgtgggtcgcagcccacaggaggctctggggacatggggacatagccagtcttgacgtcactgaatgagaacctggcggctggagccatcctagagtaagaatttcgccacccccacccccccaccccgccaaagcacaggcattcctcagggacctacagctatctcgggaagcctgatgtccaccatgtcatttggccccggctgacctcctactctcggagtggagtagaaagcgtctcaggcagacgagcagacggcatcgttcccatgcccggaggcaagagcagtgaggaggccggctgcgggagtgggtcctcacccgccactggagtcctgccactgcaagacccacaccacacacagggccacagcagggcgggaagaggaggctcgggaggtggagagcacggaggggccagggcccgaggtccccagtgccaatagcagtgtgcgccccacagcaggagacacggccctgtggctaggcatgcaggcagctggcagatgggcgggtgggtagatgtgggaattcccatccagaggctggtgggcaggacgggaggtgtgggtcattgtgcaatcctggtgaatgccgcccagcagccgcagtgagggtcaggtggtgacaggcatgcagagctaggccgctgctgggtgtgcccagccacagtgccgccacagcgctgccacagcacccccaggtcctgggtccaggctccctggcccctgcttctcacgtgctcatcttgtctagctcctcactaacacatcttgaccagcacctcctcggccaggcaggcagcaatctgggggatgttggtagtgggggatgggctctgggctccactcgccgggccagcacaagctccagacaggatgcacctgctccaagcacagtggcgggggccggtgaggggggcgtccgggcctctgcgggcttctcccctcctgctgcgccagggtccagaggacggggttcttcaggatcgtggtcctccacaccccagcttctgcctgcgaggctgcgtggctttggctgtcacagagtggcagcccagtttggggacgtcaccccccagactccacttgagtccccaggaaacacaggccactgtgactgggtgtcagtcagcagcctggcctggcctcacggggcgcccagggcccccggatctgtccagggtctgtgattagaagatcggagcgggagggctgtctcactgtgtgccttgtgtgctgcctccagtcactgacaggagggcacacccggccggccaccttcaccccacagagcttgccaagggccgggacccctcagtgtgctctgtctcggcaccccttcattccctacttagagatgtccaccggtggcactgtacagaaccccctgcgtcctctctcccacctgtgctgcacagagtcccccacgtcccctctcctgcctgtactgcacagagccccccacgtcccctctcccacct

SEQ ID NO: 586510 - DNA, 4001 bp, Homo sapiens
gtgaaaacaaaaaaggaaacataacgtttgtagcttctaaaatatatttagacatccttttgttaccattgtaaatctgtttttaatagcagtgctcactattttgaaatgatttcttgatcacataacttgctttatattataaatccaggccatgtccttttgataaaaaccatctgctgtttaattttgtttgttttcattagaagaggatacataattggtcataaaagtcagatagaaaaatccattagtcataccaattgatatgaatatctgaatatttagtgcagaaaacacttcctaaatcttccttttgtgtgctgataaagtattttcttttctttttggaaattcatgtttcattatgtcttccagaatcagtaacttccacaattctggtatatgaaagtataaacttccccttttaaaaattcttttcaggcttttacagttatattgtttttctttttgtggttattttatgtagcatcttcttaggatacagttgattttttatattccatcagtaatgtagacctattccctggttttaactccttaatgtcttaaagtcgtgttacaagaacatcttgcagttcgtagttcagacagctagggagatgctcagtcaattgcattcttcatattgtcagttgtaaatactgaattagctgctattggcccttgtgaaaagaagaaaattggttaagaaatagggtttttaataatttgtaattaattgcaagttactttagttttgtttaaaaactatccagtatttgttatcaaaataaccaaactgttattattagagccacagctatatgcataaaattgtttctttaaataagtcttttttcctaataaagattgtatatattatgttatttaacaatagagttcacatttcaaatacaattgtgagagaaaagctatattttttaaaactaatttctgctctcattttagaagctaacctgtattttcagagatgatgaacaattagcatacactaaacatactgttatttcttctttgtaataaatttaacaacattttttgctctaaaaatattgtaacttgcctaattattagcacatggtttgaattttaactcattaaaacagatttcataagatactataaatttccattgatgaattgttcatgtggttgaaatacaaaaggtaataaaaattgtaactgcaaattaattttcagtgaacatgccaaataataaacttaacataaaattaagtaataagtaacagcaaaatagtaaacctagttcttttaagaaacagaagcatttttgaaacactggagaaaaactgtactgattacattaagaatatttagtatatctgaagtgactcaaaagctgtcttcataatgaatttacaaagaatatttgtatttaacaatgcatcctaaaaaattacatttaaaatgtagcatgtcttaaaagaaatagatcttaaaatacatgtctagcaataagtagaattaaacaaactcttaaaatttaggctgaaatttttcaaagtaatttttaccccactatgccggttcaaaagcagctgtatactataataggaacaaatcttacctctgctaaagatttgataaattcttgatgtagttgaagcatttccagtttggattgattcattttgttcacttgttagtagaggactgggggaagagggtcataaacatctcttcgaaaatgaccttaatgaaaatatgtgtctgtagtgtgccattgtttcagcagtactgctaatgtatggaacatgtagtgctgcttagaggctgctgcagtctctcactcttcctactgtggaatcaataagcatctgaaaatacataatgaaagtaatttaacatactgaaggcttcttgtctccagagacaacatttagattcagtctttctaaaaaggaacggcactgcttttcagaggaaagcctgttcgggcagcttttgcagaatgacagcctaccttgtcgcttctctccactgcagagagatgcagtgtattcactaattttgattggtcagttgtattgggcttaaactgtgcttcatatgtatagcagggatttcccccgctccccactgttttatataaaggacacttttaaaaaggctaaatttatgagtggttgtatgttgttcttaaatagaatatgtgtaaattagtattttaaaaatgtgtattctattctggtttgttggtcacttatgccaaacattaaaaaaaaatgcagggaggtgggggaacaggaaagaattacatagtaaaaagtatatatgctttctaaagccttgataattgcatttgagaatattttagtcatatataggtttttgattgagattctttgttctacaaatagaaacccactgcatctttactgtgagccacagtgaattttaaatagtttgtttgtattcaagtcatcttctctgggtattccaaattgttgtgagcatctcaaggtgttaaacattgtcatgacttcagtattcattcatttgggtattcattcatttcattcattcattcattcaaaataataatcagattgacctaaggtgataataccctaaaatattttttaaacatttcattatagtagcttagtctcgggtataaaacttcaatcagtaatcattgtattacttttggagattactacttggtcttcacctttcataacccttttatttggtagatgtatactgatcatttgctataatattttatttcaattggcttattctatttttgacctgggcacatttcttagtagattgctgtttcttaaatatgatatgtagctacacgctaatattgttagtaaaatattattttaaaggataaagtaagttacatgtctttataagttataaagccaaatcattataagatagatacattttcaaaatgaaaataatggtacaagtactgaatatttaaaattaaatatttaaatatttaaattaaaaattttaaattaaattaaatttaaattaaatttaatattaaaaataaaattaaaatatttaaaattaaatttctgttaattttagttacctataaataagttcctgtttttaatgatgaggataaatttcttttagacttaagtagataaaacagctggactctgttgacaaaatagaggacattacatgtggctaaactgttagaatgttaattatcacctgtttccattattttaggaatatttagtgaccttcatttttcaaaatgtatactggtttttatttgcaattggaactattctcttattatttgaaaagccgtatgcatttttataatcttccactggtagtgttgaatctttataggggaatagctgaccaatatgagttgtgagttgcatttctatagaagttgagagtaatatggtggaaaattttgttgtgaatttctaaaatcttctgcacagctttgggtggcaaggctttggtaattctaaaaatgaaaatgttgtgctgctattcatgcgttttgaaagttggggaaaaggatcttgctagaatgccagccatttataaagaaaacttacacacaccgaaacacacacacacacacacacaccacagcacacacattcatttaagcttaaaactaagaccagagaaagcatagcatcagtggaaatatgtgatggggatgaggagattattaacacagcagagtgcttttctgccagagttcaagtatttgcttatgtttatcatcagaatatccccatgaagtagaagaaacaaaggtacagagaaatttactgacttgaaagggtcaaggtaagttagcagcagagtcaatgttaaaactgcaaaccacgctgtactaggcggttggccttctctctttggaaaattatgaaggtcttgggacttagaattggataatctagatttagttgctatttattacctatataacttttggcaagtca

SEQ ID NO: 586511 - DNA, 4001 bp, Homo sapiens
cagcggaaggcagaagaagatgatgagaaagtcccagaaggccaggttggccaagagggagttggagatgctccgcatgtagtagttgtggcacacgatgcacatcaccgccaggttgccaatgatgccggtcccgaagatcaccacggacagacacatgaccgcgtaggctccataggactcctgggtcagcgggtagaaggggttcttcagtctcacacgccggttcgtgctgtttccccggcggggacccccaggctcatggattccttcacccaaggatccattctgggccagcgcccggcccgggagtgcaattgtccacccttcgtgccccgccagtccattggccgtcttggacaggggcttgtggtgggaaccctggagtttcccggctctccttggccagtaaaaaagatcgctggctccggggactgtcttcacactctgctcctggctacgcccggaaatgccagcgcctctgggacccttctcttcctcctctgagatctgaaggaagagctggagggccgtggggttccctctccccaaagtttcagaaggctcctgaccccgagcacctttccacctccaggggccaggtggcctggttggaggtcccgggggtccggctgccgacgcctccgcccctctgcctgcagccgggtcacggcccggggccgccggcaggtcccaggagggtcccgcaagaaacgctgccccctgctcctccctgggtgctcgggctcgcagaacgtctcttgcagaatttcccggtccccaggcgtccctgccgcggcgctggatcactgtaggtgcacagctctcccccagacaagtttcgtttctggacgcaggggcgaccccgagggcagaagaggcagacaccttgagcagtagcagaagcagtagccgcgacatgcgggcgagaagcgcgcccggggctcgcatggcttggtgagggcacacccggcagccgcagctcctgcttagttaggatcgacacctgctgccgaagttgctgctgagagttaggcacatgtcacatactcacccccgcccgggtagcggggaaccggagattagggtgatagcggaagatcggtcttgggggtcacacacacgccccctataatccttcctcctttggcatcttgtgcatttctcagccaagttgagtcccagcaaggtatgccctccaaggttcctagagggaataggctactcccggtggctgaccttgaaaagttgcaatcaacacctgactgttgattactgttgagactcgggggagcccagacgaagccccacactcctcactgcctttgggtgggggtggtggccttcttggtaacagttgctctgcctatttacatcctttcgacagcgtttgatccagttgcaagccgaggtctctagaggaaaagaaaaacaagtccccctcccccagacgactcgcagtcacaaccccgctcccagctcgctggaaacacgttgcaaacagtccgaagcagcgctgatgcgccggcgaaactcttgccccacctaaccccagcgacttgcgagcctactgctgccgaggagaagcgggattccaaccccgcggccactgccaaagttgcttctcctccagctcaaagttgacgacggggcgaagcaggctgctggacggcgtgccgccgcagagaaggaaatcgtggggagaagggggagaagagggcgccgctcgtcggtggacagtgccgctagccgcgggagctagtcactgccacagcgggctcagcccggacgggaagggtggtgcctggaaccgccgcgggccaggcagtgcgcggccgggaaggggaggtggcccggcctcgcccccgcgctccagccgctgcgcgcgcccgcgaagctcgactctcggctcgttgcctcctcccactccttcgcctcctcctcggagagatactggtttgtggggagacgggatcccctggtggttcaccactcactaaacccacacacgtttcattcaagccatttgtagcggcttccactcggaggagctgggagggaacaagggcggaggcgcggagcctgcgcggctcgaggctagggatgggcgggacaggttaattccccagctgtcgaaaccagcctgacaggtccccgagcccgggctaggggcgggtgcggggcgggagtggggggtgggggtgggaacgggaatatgagagcggtcgggggagggaagagaggagggtagcaggggagtgagcagcagggtcccctccaatctgttgcggctgatgcgcatgcccaggtctcagctctggggggcgaggggcggggcgggggaggggcggacgggggttgggccgcggggagtaagaaggtgaaacctcacctcctcaggtattccctagagataggagagaatgggagctcagaggtgtcagtcatagagaattaccagttccaggattgagatgcagagcgagaaagctcaggatgcaccattacctttaacactgagttgggaagcatcctaccatgggttacttcgtaccacccagagcatagtgaggtagttgtatttgatgaagtagtgggaaatgactggaggcagaaaattactcgaacagcactcccagcacggctgtccatgcctttccaacctttctactatatcccacaaccctgtcaaaactgtcagggcatagctaataaaatagacaaattaatgaagagaaaatgatagaggaagaaataaacacattctgaattttttttttaaacagagtcttgctgtgtcgcccaggctggagtgcagtggtgcgatctcgactcactgcaacctccgcctccccgggttcaagcgattctcctgcctcagcctcccaagtagctgagactacaggcacccgccaccatgcccggctaattttttttgtatttttagcagagacggggtttcactatgttggccaggctggtcttgagctcctgacctcgtgatccgcccgcctcggcctcccaaagcgctggcattacaggcgtgagccatcacacccggcctgaatttttttaaagcaacacatctagagaggcaggagaaaacacaatggaacatatgataccaattgtggtaaatagaataatgcccccccaaaaaaatgtccgaatcctaattcctaatacctgtgagtatgttaccttacagagcaaaagggattttgccaatgcaattcagctaagactcttgagatggggagagtatcgtgattatccaggtgggtacactataatcacaagagcccttacaaatgagaggcaggagggtcagagtaaaaacaaacacaagccaagtgatgtgggcaatctctggaagctagaatgggcataaaaaaggatctactagcccatttgagacttctgacctccataactgtaagataatgaatgtgtgttgttttaagccacaaaatttatggttatttgttgcagtagcaatagtaaactaatacaccattaaatctaaaaatggagacaacaggaataattgtatagaaaaacataaactaccaaaaatagttcaagaagaaaattttcagaaactgtaatcgaactataacattaaagaaatcaaatcattcatcaagatctacccagaggaaagtgctagaccttagcatatcctgcggaataaatatacatttatacaaaatgttttaaagctactcagttcattttgtgaaggcagaataaccttaatgtcaaaatcagacaaagccagaaataggaaaaaatataagctaatagcacacattcatttgtacattaattcattcatttatatacactaactcattctctcaaattcactacttcattaaagaaatattctgctcaagttacttaggtcagagcagtgaataaaataaagttctgctctcactgaatttatattttcttgtatactcataaaaaggacaaactaggcttatgtgtatcac

SEQ ID NO: 586512 - DNA, 4001 bp, Homo sapiens
gtgtttcttttgccacttctcactggcccggaatatgctggtggaagcccaggcaaaactgcgttcgatgattttaatttccccaccggtacatcctcgggtaaataccgatcgcatcatgcaacattacgaaacctgaaatccgccacccctggatttataatggggggagggtggaggagggggagagggagagagacatgcattacatacgcgaagatggggagagagattgcttctgtgctgcaaaggaaccgttcccggtgattcgcagtctgatattcctcagtcttgtaaggctttccagaaatggagctctcagtaagccctactgaagatgcattgtctgaatgtacttccattatgcagtttattgtcacaaaacacatacacacacacacacacacacacacacagagacacacacacacacacacacacacacaacctgagggagggctctttctcggtgaacctgcagtttcatcaacactgtgcattcccccacatcccccaaacttaaccaagagtatatcctcctacctgttggtgttggatatcccgacagactatagcttctttctataaattgctgatttttttctttttttctttttcttttttttttttttttttttgttttttgttttttttttttttttttttgccttagtgccttgactgagcatccaggcagggctcggcggcgcctgcgcgctggagcctccttgagctccagccgcgtcctcccctgtcgcagcggcaccgtctcccccagtaacgcaggggccgcggcggcggcggctgcggtggcgagggcggcggcggggctgcttcagcctctgtggaaccagcaggaacccctacctgactccagagctggctgggtttattgactgccctgtccaatccaactggcagcattaagcttttgtcccttcgtggctgcttctgaacttttccctccccgcatttgtagtggggggctggaaaggccctttcaggacctcaggcccatcctcttcccaaaggcagcgcacgaggaagtcacagtgcccgtgacgcccgccccctccctcagcttcccggaaccctaaccttccccagacactttcttcccttttcttttagggtggtccaaaccaccggaggcttcttttatatatttatttttaagtgatgtctccagctaacctttaaatttgcaggttagctggaaaaagacaagaaaagaatgggaaaaaagaaaaaaagttatttatttatttatttatctttttcccacagttaaaaatcttttcaatggggaagaagggaaggcacgttagggcagctctctctttgttagtcatcttctattctccaatgcacgcaaatatgcgtaaaagtagggagaaagctaagttcagaggacaactacaatatgatttacattcagtctaccttaaaggatgtcactaaagaatcaggcttataaaatgtttaaatggctattcctggcattccaccccaccaagcaacagtattccttttcccttcttacaagttccgctgaccaatgatgggtgatgtcaaagcagttatgtgtacgagtttccttttttcccctttgttattacagatgaaaaatactagaaatataacaaatacgtaaaacttacaccagtccaaacggtcggatgataccacagacaccacaaagcctgacacgtgggtgcttaggaatgcctctagaatcatgcattttcttattttaccatttccgaagagttttgtttgtggaggtgatataaaattttaagcaacaacttcccagttctcctacccaaaactagcagacacgctttcattaattcccaatgtaaaacgtctgcttctttttctgcatgctttttgctttataataatctgttaatgaaacaaaaaataaaaatcttctctacagtaataatctgatcttgagacagcagtaaaatacctcattgctgggtggtgagattgtgacattcaggggaactcaggccaatcagcatacagataatatgggttaatttacatactgtatttctattggatgagccgaggtaaagccttatcttgatgtcacagtcgttacacaaagccctatgttggtaatactgaaatgatgttaaatttccctgatttgttcttgaatttcctacgtccatttaaatacatggataatagtttgtttttttcgaaaagaatatacacaaggcactaaactttggcattcccttaacctagaaaaatcaatcctacagccatgctggaagtaacttgagggcatttccattcaaataaaacattccactttttgcaaagcaaatgaattcaaaactcaaaaccatgtggtggtttgcaacttctaagtaaaatgtcaaattcgtttttatgaaactacaaatcacttcaacttgtgcttttttgcttcccaataaatgcttcaatgtactttgcaaagagttatttcctgaatttttacagttttaaaaaatgtatggaataagaggcttaagtttgctgaagattcatgattggtcagatgttaggttgtacagattagggaaaagctattttaaagtaaattaaaagagtcactgcactgccaggccatgaagcagtaatatactctgccaaaagttatagggccaagatccaagggttttaactagtcttattctttaagcagatattgattccttaaaaataagggagagggtatatgtgtatgcaatattctttcatatccacatctcagggtatagtaaagctatttttttcctttgcagttgagcacagttacatccactaattcttcagcttttccagctgttggataagaatgtcattttcttgcctcacaaggggactcaagaaattaatgagatattttctatctagctcattaactctactggagaaaacattggaagctacatctttcatcagcagggctttaaaaaatatgtttaatagctgacaaaagtttcatatcatctacaagttctcaaatgtaaagttattgcttcaaattgtttagatcataggcttagttggtcttaactaatttcttttttttttatcccctacatcaccaaacccagaaaatttgattttcaggttaagagtaaaagaacaaagcaaatacaacaaaactatatgctctaatccttgggtttgaagggttctgaagatttacaaactgttggaatattacatgtactatattgatcagtgtattaggaaaactgatataatttgcttaatttggttcttataaaaagtacataccattttattttaaaaaccaatgaccttgctttcaaaattaatctatttcagatttttgccaactgatgcatagtatcatgatcagcaaaaacagtgtttttttctgtgcattgtttacatgaaagtgtgtgtcaggaaataacacttggtaattgcagagaataatagactagaataaacattctaaataaaagatttttagtaattcatttcaaatgacatgtcttctgcttaaagcataaaacgtgtgtctttggtgctctcaactgttaccaaaatttaaagttgtatatgaaaaagagcctttttaaagttttctttaaaactttaactatctttttgatggggttgtttgtttttttcttgtaaatttgtttgagctcattgtagattctggatattagccctttgtcagatgagtaggttgcgaaaattttctcccattttgtaggttgcctgttcactctgatggtagtgtcttttgctgtgcagaagctctttagtttaactagatcccatttgtcaattttggcttttgttgccattgcttttggtgttttagacatgaagtccttgcccatgcctatgtcctgaatggtattgcctaggttttcttctagggtttttatggttttcggtctaacgtttaagtctttaatccatcttgaattaatttttgtataagg

SEQ ID NO: 586513 - DNA, 4001 bp, Homo sapiens
aagcggtgatgggcgatagctaaatatctggtgacactgatgcagaagagcatgaaagcagtgtggaaacaggacaaaacccccagaaaggcaatcactttgcaagtcagagtcccataagtccaggtagaaccatttttgacagagttgaacacaaatgggaaacaaattgcagatctgaggatatctgaacagcaaagatccaacaggaagtagtaaggtgctctatgcaaggtcttatctttcactagcaaaatggagatcaggaggttgcccaccacgctgactcctattatgaaacccaaggaagtcagtttcagaaaggctgttagaggcgagagattttgcaaaatgttgtcagctgcatggctatagttcgccatagatggatggaggataaggatacagcctcagtcaagtctcatgatctagatataagaacaaggaaaagatagatccatacattttactgaaaatataatccacaaagagaactgatctgatctgcagtcatgcttcctcttttcttccacttgttttgccatcagaatatctgaaaaaaaaaaaaaaaaaaacctatcagttcttaagttaacaagcaatgatgtcagacagtgctaacaaagctgttcacttatggggaagcaaataaagttttaattttgaatactaatatttgctttactaaatatttttgctcgagatttcagagaattggcttgtttagtttttcaagctaagtgaattttaaaatgtccctattttggacaatatacatttgatagggtaactttaggagagaaggaataaaatgtcccattcttgtaaaatatgccagtccaggaattaaccactagaattgcaatggaatctacaagattgctattaggaggcagagacactacctacatttatttgagatctattagtatctgtcagtgtttcacaggcagcttctctgtttgatgtgggtccaaagaacccgtgcaaaatatatcttaagtgccactattcatgctgcataagagtatttgttgattcatcttaaagcaaaatttcaaaattaacttcaaaattaataggaacttacttgtcccaagatttgatgtgatttaatcatttgtctttccctctccaccctaccccccatttctggcaaatcttttaagcccacatgattattaaaatggttaatgtaaatattggacagggaaacacacccagaggaataatgcacttccatttgtaaaccttggctgcctggattcaaatgaatataacatgaacctgtatttcttgggcaattaagcctttcccatttacactgataacctttgttgcaaatcacaagtggctgctttttaaaacaaaatgcacattgtctcgcaggtgcctggaccacaccagggaaatcggcttcctctgttattcccaccaagcgtgtttcttttgccacttctcactggcccggaatatgctggtggaagcccaggcaaaactgcgttcgatgattttaatttccccaccggtacatcctcgggtaaataccgatcgcatcatgcaacattacgaaacctgaaatccgccacccctggatttataatggggggagggtggaggagggggagagggagagagacatgcattacatacgcgaagatggggagagagattgcttctgtgctgcaaaggaaccgttcccggtgattcgcagtctgatattcctcagtcttgtaaggctttccagaaatggagctctcagtaagccctactgaagatgcattgtctgaatgtacttccattatgcagtttattgtcacaaaacacatacacacacacacacacacacacacacagagacacacacacacacacacacacacacaacctgagggagggctctttctcggtgaacctgcagtttcatcaacactgtgcattcccccacatcccccaaacttaaccaagagtatatcctcctacctgttggtgttggatatcccgacagactatagcttctttctataaattgctgatttttttctttttttctttttcttttttttttttttttttttgttttttgttttttttttttttttttttgccttagtgccttgactgagcatccaggcagggctcggcggcgcctgcgcgctggagcctccttgagctccagccgcgtcctcccctgtcgcagcggcaccgtctcccccagtaacgcaggggccgcggcggcggcggctgcggtggcgagggcggcggcggggctgcttcagcctctgtggaaccagcaggaacccctacctgactccagagctggctgggtttattgactgccctgtccaatccaactggcagcattaagcttttgtcccttcgtggctgcttctgaacttttccctccccgcatttgtagtggggggctggaaaggccctttcaggacctcaggcccatcctcttcccaaaggcagcgcacgaggaagtcacagtgcccgtgacgcccgccccctccctcagcttcccggaaccctaaccttccccagacactttcttcccttttcttttagggtggtccaaaccaccggaggcttcttttatatatttatttttaagtgatgtctccagctaacctttaaatttgcaggttagctggaaaaagacaagaaaagaatgggaaaaaagaaaaaaagttatttatttatttatttatctttttcccacagttaaaaatcttttcaatggggaagaagggaaggcacgttagggcagctctctctttgttagtcatcttctattctccaatgcacgcaaatatgcgtaaaagtagggagaaagctaagttcagaggacaactacaatatgatttacattcagtctaccttaaaggatgtcactaaagaatcaggcttataaaatgtttaaatggctattcctggcattccaccccaccaagcaacagtattccttttcccttcttacaagttccgctgaccaatgatgggtgatgtcaaagcagttatgtgtacgagtttccttttttcccctttgttattacagatgaaaaatactagaaatataacaaatacgtaaaacttacaccagtccaaacggtcggatgataccacagacaccacaaagcctgacacgtgggtgcttaggaatgcctctagaatcatgcattttcttattttaccatttccgaagagttttgtttgtggaggtgatataaaattttaagcaacaacttcccagttctcctacccaaaactagcagacacgctttcattaattcccaatgtaaaacgtctgcttctttttctgcatgctttttgctttataataatctgttaatgaaacaaaaaataaaaatcttctctacagtaataatctgatcttgagacagcagtaaaatacctcattgctgggtggtgagattgtgacattcaggggaactcaggccaatcagcatacagataatatgggttaatttacatactgtatttctattggatgagccgaggtaaagccttatcttgatgtcacagtcgttacacaaagccctatgttggtaatactgaaatgatgttaaatttccctgatttgttcttgaatttcctacgtccatttaaatacatggataatagtttgtttttttcgaaaagaatatacacaaggcactaaactttggcattcccttaacctagaaaaatcaatcctacagccatgctggaagtaacttgagggcatttccattcaaataaaacattccactttttgcaaagcaaatgaattcaaaactcaaaaccatgtggtggtttgcaacttctaagtaaaatgtcaaattcgtttttatgaaactacaaatcacttcaacttgtgcttttttgcttcccaataaatgcttcaatgtactttgcaaagagttatttcctgaatttttacagttttaaaaaatgtatggaataagaggcttaagtttgctgaagattcatgattg

SEQ ID NO: 586514 - DNA, 4001 bp, Homo sapiens
gaacacaaatgggaaacaaattgcagatctgaggatatctgaacagcaaagatccaacaggaagtagtaaggtgctctatgcaaggtcttatctttcactagcaaaatggagatcaggaggttgcccaccacgctgactcctattatgaaacccaaggaagtcagtttcagaaaggctgttagaggcgagagattttgcaaaatgttgtcagctgcatggctatagttcgccatagatggatggaggataaggatacagcctcagtcaagtctcatgatctagatataagaacaaggaaaagatagatccatacattttactgaaaatataatccacaaagagaactgatctgatctgcagtcatgcttcctcttttcttccacttgttttgccatcagaatatctgaaaaaaaaaaaaaaaaaaacctatcagttcttaagttaacaagcaatgatgtcagacagtgctaacaaagctgttcacttatggggaagcaaataaagttttaattttgaatactaatatttgctttactaaatatttttgctcgagatttcagagaattggcttgtttagtttttcaagctaagtgaattttaaaatgtccctattttggacaatatacatttgatagggtaactttaggagagaaggaataaaatgtcccattcttgtaaaatatgccagtccaggaattaaccactagaattgcaatggaatctacaagattgctattaggaggcagagacactacctacatttatttgagatctattagtatctgtcagtgtttcacaggcagcttctctgtttgatgtgggtccaaagaacccgtgcaaaatatatcttaagtgccactattcatgctgcataagagtatttgttgattcatcttaaagcaaaatttcaaaattaacttcaaaattaataggaacttacttgtcccaagatttgatgtgatttaatcatttgtctttccctctccaccctaccccccatttctggcaaatcttttaagcccacatgattattaaaatggttaatgtaaatattggacagggaaacacacccagaggaataatgcacttccatttgtaaaccttggctgcctggattcaaatgaatataacatgaacctgtatttcttgggcaattaagcctttcccatttacactgataacctttgttgcaaatcacaagtggctgctttttaaaacaaaatgcacattgtctcgcaggtgcctggaccacaccagggaaatcggcttcctctgttattcccaccaagcgtgtttcttttgccacttctcactggcccggaatatgctggtggaagcccaggcaaaactgcgttcgatgattttaatttccccaccggtacatcctcgggtaaataccgatcgcatcatgcaacattacgaaacctgaaatccgccacccctggatttataatggggggagggtggaggagggggagagggagagagacatgcattacatacgcgaagatggggagagagattgcttctgtgctgcaaaggaaccgttcccggtgattcgcagtctgatattcctcagtcttgtaaggctttccagaaatggagctctcagtaagccctactgaagatgcattgtctgaatgtacttccattatgcagtttattgtcacaaaacacatacacacacacacacacacacacacacagagacacacacacacacacacacacacacaacctgagggagggctctttctcggtgaacctgcagtttcatcaacactgtgcattcccccacatcccccaaacttaaccaagagtatatcctcctacctgttggtgttggatatcccgacagactatagcttctttctataaattgctgatttttttctttttttctttttcttttttttttttttttttttgttttttgttttttttttttttttttttgccttagtgccttgactgagcatccaggcagggctcggcggcgcctgcgcgctggagcctccttgagctccagccgcgtcctcccctgtcgcagcggcaccgtctcccccagtaacgcaggggccgcggcggcggcggctgcggtggcgagggcggcggcggggctgcttcagcctctgtggaaccagcaggaacccctacctgactccagagctggctgggtttattgactgccctgtccaatccaactggcagcattaagcttttgtcccttcgtggctgcttctgaacttttccctccccgcatttgtagtggggggctggaaaggccctttcaggacctcaggcccatcctcttcccaaaggcagcgcacgaggaagtcacagtgcccgtgacgcccgccccctccctcagcttcccggaaccctaaccttccccagacactttcttcccttttcttttagggtggtccaaaccaccggaggcttcttttatatatttatttttaagtgatgtctccagctaacctttaaatttgcaggttagctggaaaaagacaagaaaagaatgggaaaaaagaaaaaaagttatttatttatttatttatctttttcccacagttaaaaatcttttcaatggggaagaagggaaggcacgttagggcagctctctctttgttagtcatcttctattctccaatgcacgcaaatatgcgtaaaagtagggagaaagctaagttcagaggacaactacaatatgatttacattcagtctaccttaaaggatgtcactaaagaatcaggcttataaaatgtttaaatggctattcctggcattccaccccaccaagcaacagtattccttttcccttcttacaagttccgctgaccaatgatgggtgatgtcaaagcagttatgtgtacgagtttccttttttcccctttgttattacagatgaaaaatactagaaatataacaaatacgtaaaacttacaccagtccaaacggtcggatgataccacagacaccacaaagcctgacacgtgggtgcttaggaatgcctctagaatcatgcattttcttattttaccatttccgaagagttttgtttgtggaggtgatataaaattttaagcaacaacttcccagttctcctacccaaaactagcagacacgctttcattaattcccaatgtaaaacgtctgcttctttttctgcatgctttttgctttataataatctgttaatgaaacaaaaaataaaaatcttctctacagtaataatctgatcttgagacagcagtaaaatacctcattgctgggtggtgagattgtgacattcaggggaactcaggccaatcagcatacagataatatgggttaatttacatactgtatttctattggatgagccgaggtaaagccttatcttgatgtcacagtcgttacacaaagccctatgttggtaatactgaaatgatgttaaatttccctgatttgttcttgaatttcctacgtccatttaaatacatggataatagtttgtttttttcgaaaagaatatacacaaggcactaaactttggcattcccttaacctagaaaaatcaatcctacagccatgctggaagtaacttgagggcatttccattcaaataaaacattccactttttgcaaagcaaatgaattcaaaactcaaaaccatgtggtggtttgcaacttctaagtaaaatgtcaaattcgtttttatgaaactacaaatcacttcaacttgtgcttttttgcttcccaataaatgcttcaatgtactttgcaaagagttatttcctgaatttttacagttttaaaaaatgtatggaataagaggcttaagtttgctgaagattcatgattggtcagatgttaggttgtacagattagggaaaagctattttaaagtaaattaaaagagtcactgcactgccaggccatgaagcagtaatatactctgccaaaagttatagggccaagatccaagggttttaactagtcttattctttaag

SEQ ID NO: 586515 - DNA, 4001 bp, Homo sapiens
atttgtatgttgaaggttttaagaataaatttttctctataaaactctggagatttatctaattattataatataattacgactgctcaagactggaacccattgtaaatcatcccatattctgagaaattctggaactgtcatcttattttccaggaacaagggacatatgccgccaagtcttgctgtcaaattttttaaagagtaagacagtgctttcaaatggccctgagaagcaatgagtatttcctcaaagcatgacagcacatagcagggaaagcccacccttccttcctgacttcctggctccaggaaagcagcctggggcatcggtgactacaaacacctaacaaggccatcaagggaggaactgacacagcttgtaagtctgccacttctgtaggtaccagcaggaaactggaaatgccaggaagggaagggaagctgacagaacctctgtggccattatctggccctaaaagcctattctatacccagccgaggacagcactacgaaaatgacctcaagagagactttcccttggggatgttctttgagctcactgactgcactctcttgggactgagtaggaagtggcaggcaggggtgaagggtgcagtcgggcccggacaactagctaacactaactggccacacgagaactggacttgtgacctgtgggtgcagcacagagctttaatcaatggggggaggcaaccacagcctctttaagaacaagaagacaattatgcagagggagaggcagatgcctgttccagagctcacaaactacacagactcaggggtcaccaccaaactttgcagttcgctaaggttttaatcctcttttctggcttgtaaccaattttggctttgtgtcacattcgacgattagaatgaacggtattcctaatcttcagcctttcttcgaaggcttgcttcacttagataccaaaaaaaaaaaaaaaatgttcaaaggcatctttttgcagccataatgctgtaggcaatttctcatcacagtagctaaaaagagacttcacagactaagagagaaaataagttcaaagaagtgcaaaaagctgaccacagcctgaacatataaaaggacttccaaacctaggactgctccagccgaaaagtcacaggcctgggagagatggtgtaagtacttccaatgacaaatcacgagtaaggatgaaccaggattcgcgaatcaaatctaaagaaccaaagaccatcccctaacaatgaatctgtctacaccaagtgaaagttcaaataaaatctgtttcagaagatgaagggaacttgcagatgaaactgttctagcagcccatgaagaagagctagagaaagtgaaggaacagaaatgaacttgttctcccacaaaattccacctagggctctcaggaaaggaaagagccaatctgtggagaggactccctctagaacatctgttaagacaccaagccctttctccttcccactccctcacgcgtgagcacatgtgtccaggtgaatgtcccgacaaccaccatcactgcagaacccgtcatcaggagtgtctggcccgacccagaaggtgaaaaacacagtgagtgcttgcttcattccaaacacggaagcccggctctcagggggcaactctgtactacaaccaaactcttttagaaaagtacgcacagtcaaacgggaatatgaccacgctatcttacaaggcaaagcaagacacagaagaccgaggcagaaagggcagtgggcctctgcaccatgggacttgtcaccagcccctgctccagcgtgtcctagtgacctgagagctacagaaacgatccatggctgctggcgacatgtgtgccctggccctcgaccagcaccatcgggccaggatcagatatatgtgctcgcccatacctggtagtacggatggtgcaaaaaggaatctgggcagccggctaaagccatgggttccttctgccttcttcaaattacatttactgcgctgcagcacctggaataaagacagactgtgagaagccaagccagaaaaaaaaaaaaaaatccactacttatggctggttcaagtgtgacatgtctgaatgggcagctcttggtcttagcttgtaggttcagtaaggacacttgctcggggcaccagctttttgctgacatgcagagatggtccccaactatggtgccctgagaggtcatctgtgaggtcaaaagtctgtggggtagaagggtgcccagagtggtgagggtgacatcagaccctctaaatttaactcacacattcccagcactctcctgcactgcctcacccttcttccctataccatctattaacaccctgcaaacttcatcaagctttcgcaaatagggattcagacaaattccaaagaagcccagaaggggttgtgtgtgtgtgtttggggacaggaccacagaacatcatttgagtgaacactagctccacaagccatagaacaaatcggaattctcagtggacatccaacctgacaaactcattacatactctcccctgtgggccacggcacctagtaccgaataaaatgagggatattaattctaacaatcagaataacaacaacaaaaatcaagacaagaccctgttatgggatgaactgtatcctcccaaagttcctaagctgcagccctaactcctagtacctcagaatgtgactgtatttggaaggagggtctttaaacacgtcactaagttaaaatgagatgatgagggtgggccctaatccaatacaagcggtgtttttgtaagaagagaatattagaacacagacttgtacagagagaagaccatgtcaggacaccttgagaaaatgaacatctgcaagccaaggagagaggcctcaggagaaaccaaatcggccgatacctttgatcatggacttccaatatccagactgcgggaaatggatttctgctatttaagtcccctcgccccctccccagtctgtggcactttgttatgacagccttactaaactaacacagacccaaaatataaaatcactagggaattctcatcacagctaaaaggaacagaagcatcccagatctgtaaaatttactaccaaccatgttttctgcaagagtttctctagaatccctcaaatcaccaaagaacgccccagaacactttgctggggctgaaaggaagcagtcaatagcagtggaagtactggcacaatgaagggagcaggtccatgacctggctcagacgtccccaacctactcagtgagaactgtgcccgcatccacccttcacctctgccatgatcagcagccccaaggcctcagccttctccggctcacagtcagcctgtcctcggggtagctggtgttacacgtcaacagtccaggctctaattcccagtcacttagtcaaacaccagtctggctattgccatgaaggtattctgtaggtgtggttaatgtctacagttacttggcttaaaggaaatgacccttaacagaggcattacccaatccacagaaggccttgagagcaaacactgagatttcctagagaaacaagaatttagcttaagactgtagcaaactcctgcttgagtttccagcctgcctgctctgcagatttcaaacttgcaagttccttaaaataaatctttatatattgaatacatatgaatataaatatttatatatttaaacatatatttatttattttcatacacatatcggtttgggttcactggacaggccgtcacccctagccgttgaggtggatcagtgccccaaatcatttgctgccagatcgcaggaccatgcctggatgtctcctgcgggcagccaggcggcctctgccttccacaccagcaaacacactcttgtgcgactcctcactctctacctcaccccaccacctcccatgtcctagccccatctctaaacactctttctgccttctcccctaactgcaaggacctgtttctc

SEQ ID NO: 586516 - DNA, 4001 bp, Homo sapiens
tcatcctacggcaaagcttccatttattcaatctaatttcctaagtagtctaattttctaaaggtagttccctttcattcctttcccacaatgacctcatcagaaattaaatattaatagaaggaacagaatcacagaaaggtagagaaagaccaagagtacatgcacccaaaaccgtcttaattggaaacataaaaatgccaaaatcaagaggattcaccttggagtacccttcaataggtgacatcaagttgcctttcggctgaaacctagataactcgtatgaaactgatcgtgaagttttgctcactgaagtttgctaattgaaaggaaatacatgaagatatcagaaccaaggatctttctctatttgggaattcactgtccttaatgagaaaagaagaaccaatgttagaattgtaatctattagtgtcaagagcaacattttagaatatcagatctgggcactgctgcaaagctagaactgggagtgttcttgtgttttgctcattccttaccctggtgattcgcaagtcggtcagactgtgcggggagtcctggtcctgccgggtcttgttgactgcgaggtgtctgctccaccttgtcctaaaaaaacaggaccgcagcagaaaggctgtgagttcacaagaagcatcccactcttttcaacacccagcttccccagcatttcctttcttcctcaattccttacttcctttccacttacttactttttccattttcaatgatagttgttgaaaacagactgcataagggaagctaatcatgaaaaggtgcaagctgtttggcaaaggagttaaaagttactcctgtgtttgggcttaaatagctttccctgaatagcaattcaaagagaattattgccaactgctccaatttaggcagtgaatagaaataattaacattccatggaacacatgcattttctgtaacaactacaggtaatcaagtgctgggcgttctattacctgggacagaaacatctagagagtgttttataaatggttccctctacaaaatgttaaggagctcagtggcatttttttagacattagtgtgagaacaacactttcaggcaaaatgtaaaacagcaatattatgatcctaagcccataattctagaaacacacctgcatgggaccagaagccaatgaaagatacattcaaatgtggggaaagaaatattatcagtgactaacttggggtagagagatgtctgttttctcttatagatttataaaaatctttgacatctttatgatgcatatgtaccactactgtaattagaaaggtttgaactgtgccaaaagtataagatgtgccccagaactactaatattaatacattgtcacaaatatcatagttgacttcagcaaattccctcctattcatgcaaaagagaccttccagattgcaaactgaagcacgtgaaacatccaacatgcgaggtgctggcgacagccaacatgcacacacagctccctctgccaagcggggctctcgccacagaggcggccactgaggcatgggaaggtgagttaccctcacaaccctcatcacccagtgggtcccggctgttctgggtctcgaactacagagtccacactccttcccaccactctgcagtgcccaaactgcccaagaaactcaaaaggcacattgatttcaacaaggtgcccaagcagcaggccttgggaatgtgactcttaatttctgcctgaatgcttcccagcaagcagtttctctgcccagagccctccttgctcacgcatgaaatgggatggatgctcacttctctgctgcgtgcacactgacctgggagcaaacaggtttaggtctggtcaacgctgtgcttcacggaccactcacaatggggggaagcagagggtagcccaggggacagactccagcagggtcagctcacccacatctaccacttagaaggaggatgtttgttccctgggaggcaaagttgcgttcacaccttcctccagaatatctggagaaaacaaaataaaacgaacaaagccctaaggaagggagacattttcaccagcttctctctttttcccctttcaaaagaaatagctttcttttcattttttaatcgcagatgtaaaacttgctaagtataaaaatttatatttttgtatgctaaaaaatgaacaaaaaattaaaacggaacctctctttttatcagaataacaaaaacaaaaactaccatgtgcatctgtgcaatgtttgaattatttgtagagaacatgcatactctatttgagtcacatggggattacaaatgatcctgataaacactgaatcataattatcttccacatattgtgttttaatatcgtttttgaaatttttcaggccaacaatcatctccatcagcactctagtgtaccccaccaagtagaagtgtagtgtaattcatttcaccaatatcctactaatgaaaatacaggttgttggaaatgtaagctttccactaagaaagaggggaaagacagtttggagcacacagtgtctgggaggaaagggcaaggtccccaagaacctccgcaacaggcgctgaggagggagctgtgctcccctggctatctgagagggtggtacctcccagccccagcccctcaagttcagccatcccccatctagtttctgcaattccatggccaacatttcccacccagtctgctctttggcatctgaaatatttttcctcttttctgaattttacaacaatccatgcaaagaaaatttttatataaatatctaacctagagtagatagaaaattagcctaaatcatacaacagtgggataatagcattcccgtggtctttgcacctttgttgtacacaactagacactgttgaagtgagattgtgtaaataattgtgttttcctgtccctgtcttcaactattttaaaacttcagtaaatactatttttttcatattctagactactctagtagacactctgtagttgttttcaactttcagacagcataaataatgatcaaataaacaccttcgagcacaaaactttgtccacatttctgattatttgcttaggatccctagaagtagaaggactaggccagaggccacgtgcacttttttaagattctagatacacacagtcaaactcttcttcacacactcacccttctacccggagtggaggcaaccgcctgtttcataacacccaagccagccagtgactgtttatttttctggaatttttttctggctaattccagaggtaagcagtggccccaccctgtggttttaatatgcaggtctataatgctgaggttgaacatttttcataagcgaattagacctttatatttcttcttttgggctatcctttaacaggtcagctagactagatcctgagggcacaaggggttcccagtaaaaaatgtccatgaatgaatcacaaccctgatactcatcagctaagggtttggggccagttacctggattctctgagtcaatctgctcatctgtttatgatggaaaacaagccaggctgagccctgggtgagcacccatccctggtggcccgctggcctcccaaccctctgttactgaacaccgacttgcttccacttctcccatgacgagctttttacgcagtaggcaagtaagttcattcacatttgtagcaaatgtttttcccactttgcatgtctttaaatttaattatacttttgattcttaaaagtataatccaatgtagtcaagtttattgaccttatctttttggctcatcatttaaccgtgaaaatgatttgcagcttctatcaagaaaactgaaaaaccttcatttgtgttttactctgattcctcttctgacttgatgtattactctttcctcttcctgacatttattttggaggatagtaaaaggagagaaaatacaatgactccttccccccaaaagtagttgatcagttctaccagg

SEQ ID NO: 586517 - DNA, 4001 bp, Homo sapiens
agcttaggttctagtgacagctttgtcacttgctgacagtatgacctcgggcatgccaattaacctcctgagccttggttttcagacctgtaaaatggggatcaggaggttgtagaggggattaaaagcaacaaggcttttgaaagtgccttgtaaactgtgaaatgctacagaagtatcagtcgctacacttctcagttacaggagcaatgcctgctgggcgtgtaactctgtcctcaaattccctccctgtaatctggggattggcctgtgttgcccttctctttcaagtgctcccagtaaaactcaaatattacatgcagtgatcctagagttttgatttttaagagaaaaacctagacatctagaatcattcctggaaacatagttggttttcagtgcttttacttaaaatactctcctaaaagacacttcaccgctgtcacagccagaagtcccactgctgtagaaactcttgattctaactctttcctcctggaaagagaggaactcggggtcagctcgttaaaatattgccagcattgtgttgtaaaccctagtcaactccggttgctgcgctaacaacatgtgttcttggtaaaactgcttgaaactttaaatagaccaccatttctgaaactcgggggctccaaacggctgaatcagcattttcagaaacaaagtgttctaggcctggccttttaaacagcagcaacgagcaagttgtgcaataacgcatatttactcacgagctctccttgttttggtctttcccccctcccccccatctcttgaatgaaactgggcaccaagtttgcaagaaaatattctttcaaacgcattgtaaagatccaggaccctgtaaaaatcacctgtggctctcttacattacccaacgtttcggtgaaagcaaaccataaaaagttcgcgtttcttccaatcccaagaaaagacgcacacaataaaaagtaaaggataccctaatttccataacgcacatgctccaaggcagtcgtcaggcaggcgtttggagaggcaatcagcaaaggcgaagagttgcatcagaaatttccttctgcaaacggtaccgctcttatcacatttccacggctggcgggcggctaatccgcgagccctcaacttggtgttaggccccagcggcggctaacgggtcaccaacagaaccaaaaaaaaggtcctccgtacgaggctgggccggctcgggatttgggagtgtctggcaccactgtcccggacgcccggacgcccgggcgcgcgcgccgcggccccgccgcgcagtcggagcacccggggctgcagggacgcctgggcgcccaccctcccaggcggcggcccccaggagcgcggccttgaccgcagcccccgccacagcccgcgagccgccggcgtctgacaagatggttcaagaatgcaccgcttggactccacacctccccccaggggtcgggaacgcagcgcggagagccccgcggggcgcccggctgcctccgcctccgccgcgcgcccgcagccccagtcccgcctccgagcaccgcccgctgcgggcccggggcgccggagcccccggcccggaggcgacgcccttccgcccgccgcgcctccgcggggcccggcgtccccggccgcggccgcccagcgctcagacaatgacggcgcggggacccgcctggccgtcccgggccccgcggggacgccaaccacaaagtaacttgccgccgcgctccccgcccaactccgtacctgccgcgcgcggctccccgccgcctccgcgtggctgcgggcgacactcggcgtggccggcggcgggcgcgggtccccgcggggcgaggccggcgctcaagactgtcccgggcgccccgcgccgccggcgctgccgccacccaggggctgcgcggaaactttgggctccaccgggtctccgagcgccgagcccgcccggccgcagctcgcttccctctctgcctcctcccgacctccccaccccctcgatgggctttaaactcgcccggccccgcccgccctccccgcctctgccgccgccgccgcctccgcctccgcctcctcccccggctacttttcctgctcctcctcccgccgccgccgcccggaccgctcggcggccgccagcgcgggaggagccggggcctgggcgcagggcgtggcgcgggggcgcgggccgcgggccggacggccggggggccagaagctcccggaggttcctgccccgggctgctgagcgggttcccccctcctgctgtcctcgggactcgggcgcgggaccacgaccgccgcggctcaggaggcttcgccagtgaaaggacaaattggacctgtcccgaaagacaatttataagcgaactgtttgaaacgcacaaagtattaactgcgcagtccagatcctttatcctgggcgcagcaggacgggacggaagagctggggctgccccgtactctgtcgtgggctgaaggcacccggcctgggaaaaggaaacctgggtttgctcacagccagccaggtctggggcctcacctctttgagcctcagtttgccccatctgcgtatgagtatcgaagtgcgggtggagtgagaggcccttcattttttcttaatgctgccaagcctggtgtccttatctttacaatgggctaataacgcccgcctgagggttggtgtcctggggattaaatgaggtcatactgggaacataaagtgactgcgaaaaagactcccctaccccccaattgacggaagccattgtcgttagtgtgattcttaatatctctaccgagtcaaaactctaatacacatagcataacgataagtatgtcttttcctgggtcttggcgttctaaacgcagctgcgacaatatcttgccttcatagagcgtgcactttgtgcaaaaccttcatgaatccttgcatgtaacccccactgtggccctctaggtgttactgttagagtcccactgtgtacggactgggaaactgaatcttggagaggttaagtgacttgctgaaagtcaagtagctggtaagtgcagagcaaggattggaagccatgtacggtattgtaccaaagcccctcgtaggcacctgcttctagcaggagttattccaccttagacagatgttactcatggaaaggtcatccttccctgtaactgaaacagacctccctaaatttttgcctattggtccaagctcagaaacacgtaagatgaaaatcaagagaggatgatatcaaaggattttagattcctagaagaaaggaacacagaggactcctgttgcagacaaaggactcaaaagaaaattaaagaacagaaaactcagtttgagccaacttctcacaaatgcatcagctttgaaccttctagcttctgctgaaggtccaaacagcaatccatgcctacaccagtcagatagcctgataggcaaggaggctttgatagaggtttcaaaagttccttgatacatagacatatgttcttttggaatcacttgtgggtaaattccatacactatggcccctttacccctaaatacattgatgtgtctttcctaagagtagagatattatgtgcataaccacaatagtcaccaaattcgtaaatttatattgataaaatacttgtatccaatctaggtccatattccggtatagtcagttgatctgactatgtcttccatagtatttctttccctctgttacaagatccactattgaggtctagagtcaggtattgcatttagttgtctcaaaatgtatgggttttcagacattactattcacagagaagtgatcaagataaatgtccttaagtgttttcctgctagcataggtctctagaattcctaggacaggccctcattccctacatttcctggctctctgtagacatcagtgggcagaacccattcagagacactttctgatgcaagttcatgaacttgtcactcttgtggctgcagaagctgc

SEQ ID NO: 586518 - DNA, 4001 bp, Homo sapiens
acctgcagtctatcacagcctggtttgtgccaaagtcaagaggaaatgcctttggcagattggtgaagccaaactagggcctcctgcagccaacaagccagccaggccgctgtgcaagggcaggtctaatcctggttttgtgggggcttagaacaggcggaattcttttacatttttttggaggtggggaatggcggggaggggaatggagtctcactctgtcactcaggctgcagtgcagtagcatgatctcagctcactgcaacctccgtctcccaagctcaagtaatcctcccacctcaacacccttgagtatctggcaccacaggcgcgcgccaccacacctggctggttttttttttttttatatttttgatagtgatgggatttcaccacattgcccaggctggtctcaaactcctgagttcaagtcatcagccctcctcagcctcccaaagtgctgggattacaggcgtgagccacctcaccccactggctcttttacacttgatcttagatgaagggccaagaagcgatatctgtggctctttttattttatctttttattttagagatgcggtctcactccgttacccaggctggaatgcagtggtgcagtcatggctcactgcagcctcaaactcccaggctgaagcgatcttcctgcctcagtctcctgagtatctgggactataaggcatgcaccaccatgccaagctagtttttgattttttttgtagagatggtgtctcattacgttgcccaggctggccttgaactcagggtctcaagtgatcctcccaccttggtctcctaaaatgctaggattacatctagcacctggcctgcagttaagttctaatggggaggatagacagagaaaggggcacgtgggaacattctggtgtcaattattctatagtctacattatatttttatctatatcctattattttatatattgatcaagagggtggttattcaagggtgcatgtatatggaaaatttattgagctgcacacttaatgcactttacacctatagtaccttaataaaaaagaaacacaagtgaataaaaattgcaaaattaggccgggcgcagtggctcatgcctgtaatcccagcactttgggaggcagaggtgggcagatcacttgaggtcaggagtttgagaccagactgaccaacatggtgaaaccccgtctctactaaaaataccaaaaaaaaaaaaaaaaaaaaaattagctgggtgtggtggcaaacgcctgtaatctcaattactggaagactgaggcaggagaatcacttgaacttgggaggcagaggttgtactgagccaagacctggccactgcactccagcttgggtgacagagcgagactctgtctcaaaaaaaaaaaatgcaaaattgtttgcaaggttttgaagttgagcattcccatatttctgttaaatctgaccccagaagtttccttacctctggccctgggagagcggcgcccggcccactccctgcccacattatgagccccctccttcccgcccccacctcccacccccgcgccttaccttgcggctgaactcttgggccttgcgcctgcgctctcggtgcaccgcgtccgggcgcttgcggccggccaggcgaagcagctcacggcccagagctaggccgcggccgcaccgcggggcccgcaagactgtggtcggggccgcggggccggatcctgggccggggccaccgtcgggagccgggagcacgcccagactgggcggcacacgtgggcagcgccgtgccaggcgcacgaggcgctcgcggctcagaccgcccaccgccagcccctccacctccaggatctggtctcctggccgcagtcctccggcatgcgcgctgctccccttggccacctccaggacgaagcaggggccagagccacctagccggaagccaaagtcctctggccagccctggttcgtggccggcgtggcagtggtggccatgcacctagaactggagacagaacagggatttccttgctgctctgtccatggctccaaagccactcaaaggcccagggccactgaaggcctctacttatctctgcctcctccctctgactccgtctttgtctcaattcccttccatctatgtttttttgttttgttttgtttttgtttttttaagacagagtttcgctcttgttgcccaggctggagtgcaatggcgtgatctcagctcaccgcaacctccgcttactgggttcaaatgattctcctgcctcagcctcctgagaagctgggattacaggcatgtgccaccaagcctggctaattttgtatttttagtagagacggggtttctccatgttggtcaggctggtctcgaactcctgaccttaggtgatctgcctgccttggcctcccaaaatgctgggattacaggcgtgagccaccgtgcctggcttgcctaattgttgtatttttagtagagacagggtttcactatgttacccaggctggtcttgaactcctggcctcaggtgatctgcctgcttggcctctcaaagtgctaggattacaggcatgaaccatcatgcctggcttgtttttttgttttttgtttgtttgtttgtttgtttttactaaaaacaaaattggggagggggtgtaaaagaaaaatggcccttccttaaagtcttcttttgagtgccttggatttttaaccaatgcggccacatccttttccatgggcccctcctgcttccacaggtctgttttactgtcttacatgtacacttggcttccatgggccctcctcactccctacactttaatccctcttcttacccctctccatctaccaaaattccctttcgggatctggcatgaatcacaaacttacggaagtccagaatgttggagcagaatggtccctcagagaccattcatatctttgggcatttattttattttattttatttttgagacagagtcttgttctgtcacccaggctggagtgcagtggtgtgatctcggctcactgcaacctctgactcctgggttcaagcgattctcctgcctcagcctcccgaatagctgggattacaggtgtccaccaccatgcgcggctactttttgtatttttagtagagacagggtttcaccatattggccaggctggtctccaactcctgacctcaggtgatccacctgccttggcctcccaaagtgctgtgattacaggcgtgagccaccgtgcccagcctcttgggctttattttttagaggcaaagtctcactctgtcacccagtctggaatgcaggaacaccatcatatctcactgcagccttgaccttccaagctgaagtcatcctcctgcctcagcctcctgagtagctgggatcacaggcgcatactaccatgcccagctaattaaaaaaaaatttttatagaaatggggtctcactatgttgcccagacaggtctcaaacttctgggctcaagcgatcctccttcttcagcctcccaaagtgctgggattacacatgtgagccactgcacccagcctgggggagactttagaaacctcctcagaggccgggtgcggtggctcacgcctgtaatcccagcactttgcgaggcagaggcgggcggctcacgaggtcaggagatcgagaccattctggttaacatggtgaaaccccgtctctactaaaactacaaaaaaaattagccaggatggtggcgggtgcttgtagtcccagctactcgggaggctgaggcaggagaatggcatgaacccgggaggcggagcttacagtgagccgagattgcactactgcactccactccatccagcctgggcgacagagcgagactccatctcaaaaaaaaaaaaaagaaagaaagaaacctcctcagacccagcatgtggcgtgtctgcactttgagacaggagagggccctaacccaaggtcacccagctggggaatggcagtgc

SEQ ID NO: 586519 - DNA, 4001 bp, Homo sapiens
gtcctgggtggggactggcccaggccatgcctgcccctgcctttcagtcccctgggccccgctgggaccttctggcccatggcaggtgccctccccacacaggatgccatccgacacccctccccggtccaggtccatcccggccgtatgcgagaccgtatacggcgaggccgtatgcaggccgccgtatgcgagagcttcagcatcctggggacaaagtgagggggttgggtcgtctctggagtgtcggtctcagggtcccccagccccccagcttccagggctgcgtagcaccggccccacctgagcctccccctgccaccccctagcagccaaacgcctgcagccttctcagagtttattgaaggtggagctgcgaggagcacacaggaccacagaccccctcacccagctgccccagggtgggactccaggtaccctggacatgggacaagccgaggctggctcctggggtgcaggtgtcactcagtagccccggtccctgcaaacatccaaggcacgtccctagctcctgccctgcccatgcacagaccagggtgggaggtggaccatggccctgctcccgtggccggatatgcagggctggcagggagaggagcagggtgggacgccaggcagacaacccctccccaggcggaggagggtccccggatcagggtgagaagcaaaatccctgctggggtgggcagtgtggggcaggaatgggcagggacctgggtagaggcagggactttacccccagctcaggcccctcttggccagctccacctgggccaggcagtggtcactcagcacgcgcaccctggtggtggcgcccagcggcctctgacggcatgggaactgtagcaccttgtgctccggggcgtagacgtggaagtgctccgcgtcccagctgacctctatctgggcaggctggggccagtgacctcagtgccagcccccagggcctggggtctggtcccgcttttaacggtgatgtgcctgccggccgtctccaggaaggacagcctggcaggccccgggggtcccttggcttggagcccccagcccaaagtcccctcctttctcccaagatggggtggctggtagccagggtggtgggtacctactgcacacgtagggaaactgaggccagggaggccacccagaccttgccctggcccactgacctgtaagcgtccaccgtgaacccgctgcccactggccccctgttcccccacgggccttccctgcctagcccaggccccacccaggcccctgtcacctcaaagggctcccccggggccagcgggaagatgctagacacctgctccgggccccagcggccgtactggaaggcattgcccaccacagtggcgctggagaaccggggcttgatgtggaaggcaatgtcccccgtctccaacaagaagttagtctcgaacctggggcggacatggtgcgggtcaagagctgcaaagagctgggccggccacccagcccaaggcccagcgaggggagggcggtgccgctgacctgtcctctccagagtcagcatgtccctggaccagcagcttccagccgggggccaggccgcccgcacagaaggctttagactgagtggaagagacagggggaccagcctcatggggctgcagcctcctccctcccacccccacccccaccctatcccatctgtccaggaaggtccctgcccacccagcctgcccccaacccagtgccagacataggctaaggctctgttcatctggtgtctttgtgacagggtgaccagggctggggtgggagggacacacctgcccagcaggccagctctggggggaccttcaccctgacgccctctcagccctgagatctgatgagaggccagagcccataccccatctctgtgcagagagagcacgggtggctcagggagcccccagccctgcaccgttctccttctccaggtccagggtctcacccacctgcactgccatctgctcccagccactgtgggagggcgcggggagcctggggtatagatggggggctaggggtgggaagtgccggggggctgggggtggggagcgccgggggagggctgggggtggggagcgccggggtggggctgggggtggggagcgcccggagtgggggggctgggggtggggaacgccgggccccacccccgggtgacttggcaaggtctctgggcccttcccagcccatatctccctacccctcgggcctctcccttccagctggttctctgtgcaggcgcaagggagatgggtcacctgcccctgctcccccaagccctctcctgcctgactctcacccacttcactccttcaggatccaggaaagcagccactcctttctcactgggacggcaaggtctaggcagggaccctggcccggctcttcctccgggatcacgggcccctccagggactcgaaccctcccatccggccaagggcaggcttaggaggggaggcttggctgccgacccctgccctggcttcccaggtcccgtctgaccacgtggtgctgcagggcctgtcccccagcccaccctggcccccgccgcctgcccccactggctcagccaccccatggggcatacagcaaggattaggccggcgctggtcagcgcattccaggctctggcaggcgaggggagggcttttcccacacccaggatgctccccacctcaggctgagcatgggggggaccagctgggccctcaaggaggaagggaggtgagcagagagagtctcaggctgtcgggcagctttggggcctccgaggacgggaaccggcccgaagtggacctggagggggcacagagccctagggctgctgcaggtgggtgtgtgtgcagccatgtgcagccatgtgcagtgcgtgtgcagtgatctcgtgggtgggtatcctggctgcaggccggacgattgtgtgagcccatgagtgtgcgaggcatggggtgtgagttccagagactctgggtgacagggaggtttgctgtgtccctgcctgtgtgtctgaagaggcctggcccccaggatgcccccgccaggattctccattctcacgtctcctgccgccctgtccccgtgttcgagtgggccctccagtcccccatccgcaggggtcccttccagccattctctccaagccctggcagggctgacctgggtcccgcctgacctctccatgggtgctgccgctggggcctgtgcccggacgtcctggtaggagggtgggactgctgaggccgggaggggcctcaaggtggtcgtgactgtccgccagccccctgggtggtgcagagcagtgcggagcctgcggctgtggagcccgtctctcctgcctggctcgtagcagggctggccgtggccctgcagggggcagccctgggcagcagaggatgagcgtgcctgccctccccggccacatccgcgtccccatcctgcctggccgtcctggggcccagcaagccgcaggtccctcctacgtgcctcccccagaagagcacagagagggaagccctcaccacagcaggaaggggagccagtgcttcctccccctccctgtcctgcccccagccccagggacagccctggtttcagctgcggagtgaggacacagagcaggactctgggtacaggactcagggccagggctgtgcagaacatagaggcagggggctggaacaggcttcccaccagctgacaacctggcgctcgtggcctctgagcctcagtctcccccaccgtccgctgggcacagcagtccagcaatgccatctgctgtccatgcctgggtcctggcagggtagggtggcccaggcaaccacaaccctggacacaggagcccggccgtcatcccctcgctttggggtctgtgggggcagcggtagagggcctgggtctcaggagctgcctagagccccagacatcaggggccctgtgggtggggcttgagccccagact

SEQ ID NO: 586520 - DNA, 4001 bp, Homo sapiens
gaactattgttggtacttaactcacacctacctcaactcacattaacctcaactttgaatattccaatatgtacctacatatagaccccaaacatatctattactattcaaatagtagaaatatttttataagcaaattagttgagtccttaaccaaagatctttagaggtgtatagttttgtttttcaaaatttacaatatctaaaatacttaaagtgggagaatccttccttaatatatttacctaaaagtgttgtaccttagagaattgtccacctttgataacccaaggaataactagaaagaaatttaaatgaaatccttaagaaacaagcttattggatatatcacctagtctatttttggatcgcaaatctcccgccctctctgagttatctcactgtcagataagaaaatggaacagggtcgatgaaaagatatgctccctgtctggcttttcgatttttcactcaagccaaaaggagcaaagggcagtgagttaaggctcctttccaaccctgcttgcgggagggcaaacctctggccgcctccggcttcggagcttatctgggctgcatggaccaggtctcgctgaccgttgcccacctctgcctgcaacctccacacccacatgaaaccgcccgtatccacggattcctgtgcacaaagccttagggagcccccaaatagaaacaaattctgagcccagagctgagatggaggtggttggctgatgagactggtctctctggggtctgcgagtgctagttcgtcccttcacctctcgcaccctggccgcagatctatgccctgaaatctccctcctcccagacacagacgtgggcgcacacacacaaactctcactcatgcacacccacatcgcctctgccctccacccttcccactccagtcaggactgtagggactggtccatgctctacctcaactttcccggctgcgcctgccccacgcggcacccgagcttccgcgccctggctgggcgccctccagagggacacgtcctcctctgggacccttacctcgcaccgacaactcctggcaggaactggagctgaccgcggtggcagcggcggcggtgagcctgcacccgggctctggctcatggttggtcctcctcatccgacacaaaagaggtagcttactggctttgtcctttccaaatccaagggagaacttattttgccctcgaaatggccaacttgtgcgcgcagcttcctgtcacagtgccccctgcccctgccccctcccggctgcacgctggaccactgcccggtggcagaacatccaggcatccgagtcagtggggagtgggaaaacggaggggtggagtagaagagagggaggaggttggggaaagaggggacccagtggtcttccgcggaggggaggggagctcttcccagccgagtcccctcctccttctcttatcaggcaaacccacttcctaggcgcggaagcaactttccttcaccttgaccaggctgaagccgtcgcatctaattgggactcttggcagaagcacggacctcctggcatcctctccttttcattctttcctccctctctcgttcttttccctcccccaccctccctcttataagggtatatctgcagagtcttcagtgagccagggtacctagacgagaggatttttatacgaaaagccagggtagatttgccgactgctttgcctcactctgaaatccttaggcagtgcatgcaaaggtcggtgaatttcggagtggggtgaaggggcatggggcggtagggagggtggcggctccaactttaaagctctgctagagcgcttggctttcaggtaagcagggactaacagtccttacaagaactctcctgtggtccctgggcagggggctgaccgcatgccagaggagattaggagagcgggagcagagagggagtgtgagagccagggaggccggtacgcagctcagccgtactcgcgactcaactgcacactgcgagcccctggagagggtttgtgcagaacaatctctgggtcaggcgggaggcagacgctcctgtttcctagcaacccttatcaatcttctccctctgaaggaattcaattggacagcccctggagaaaagccacgcccatccgggaatgctgggctgctgctttttcgcattctcccaaatttcttgggtggaataagattataggggactgctgaattatctttcttcttatccttttctgctaccacctcgcctcttaaagctacccccagcaccccctcattggtccttctctagtcctgctatggttgtcggatacagtcaatgtttcctacagaacctcttctttcttcttaaaaataaataaataaataggaaccttaaatcggtgacgtaggcacaaaagagaaaaaggcacgcggaaacagctttaataggctgccagctacagataaaatcctaaaggtaaaattccaggcatctttctatgtctagaaacacatactgtttaatttccaaattgaaacttcattaatttttgtactctaatatactaactttgtattaaccaaggactgaattatatgaagccagacacaattaaacttaatgctttaaatgctacatttagtctttaatatttaatgttaagttgtttaacaattgctgtcttttgtaacctagccagaacttttaaactacagaaataattttacctactgattcttttagagggacagcaatatttaaaagacacatgtgcatatatatatatatatatatatatatatatatatttcattgtgaactccactagatccagaaatttgaatatattaaaaaataaagtgttattatatagtgaaatgctaaaattttagaagtccccctttcaacgtattctttctggaatgcaatagcattgaccacgtacaagcaaaattcctcttcctttgtgtttcattagtattttccagcatgaattgttcaccaaaaaaagatctttataggaatttaattttaattttaagaatttatttacttttaacaatgtctgcccaatagacaactgtatatcaaggggcaatgacatgaacatgagaaagataaagatttatacactgcaaggcttcagatcctcatgaagctgtgtgggtagattttggtctctttcagaacgttccagaagacatcattttgcgcttccaagaccttatcagaattagctgggattgagagaagtagaagagagctgatgtttttgtctcacacacacaaaagtagctgatgtttgcacaacggaaagtgctgataaactgcactccatagtctgtatctagctgttaactaaggcttgtggtgagtagaggctgaaatgctgaggcaaattatcagtctgttatcagatattgcctgatgagacacttctttcctctcccacgttacgccatacacacaaaggaattcctcaatgtgaatcctgaattttcatcacttcctagctgcgtgaacttgggcaagtttcttaacctgcctatatgtcagtttcatcatctgtaaaatgggaataacaattgctcatacctcagaattattttgaggattagtaaatccatgtaagaagcatataaatattagttactattaaaaatccctggtttatataatagttaactgatggtattttaattgttgagcatatttaattgaaagcaattagtcttcactgtttaaattcgtcattgatcgggaatatagattggcttttaatgtttatttgttggtgtgtgtgtgtgtgtgtgtgtgtgtgtgtgtgtgtgtgtgtgttttcgagttacttttaaaagcctcaagggataggtctaaataaaaacctctgactaagtaacatgtcaattaagagattacattatccctctcttcacaccctccccaagtattctagctgggctccatttctaaacaatcctagttccttttcttaattacatctga

SEQ ID NO: 586521 - DNA, 4001 bp, Homo sapiens
ctccacctcccaggttcaagcgattctcctccctcagcctcccaagtagctgggactacaagcgtgtgccactatgccgggctaattttttgtatctttttagtagagacggggtttcaccgtgttagccaggatggtctcaatctcctgacctcatgatccgcccgccttggcctcccaaagtgctgggattacaggcgtgagccactgcacccagccaggaaccatttttcacaatataaaacaaaggctcattaattcagattaagttgaaaaattcatgtccccctgagtaagaaaccagagtgaaagtattttcaattaaacaaattatgtctattacaaaagactacatattggttattaataaataaaatgagaaagttaatgaaaatggtgagttaacaataactttatttttactgcactttatacttttcaaagtatttttacatatattattccatatttccaattttattcaatatgtaaatgcaacatatgggtaatagatcaccaaacctaaatcaaaaagtctaatttatcctgctaaatttgaacttttaatgcaataagaattatatataattattccaagtctgtatcagagcagtctgaattaataaggttctgctctattgtagttataataagcctgacaattttatgaccatctcatctcccagagtgtcactcccatctacacattagtaataaatactgtttcttcatgaacaaacttttgtcataacagagcatcccaccttaaagaagtttcactcagtaaattaaatagctcaaataccatagaaatgttttccatgataaatgcgctgagttcattattctcttcaaaaatgcttgtttaatttaaaatgagcctaacaaagaggttatcccaagatgacaaggacccaatatatcacagaacttttcacctttctctttgttcaggaaaaaaaaaaaagagtcaaaattaatccagttaattgtaagtaatggaactaaaccaatacatgtagaatgccccatatagaatgtcccatttgaggaacctggtaacaccaaaagggtctatgagcaccttcaccatcttcactttcttcttaaacctgcagtaggagtcatagcatttcattgttctttcacaatggtcagaaagacaatgcctttacctaccttaaaaagtcttaaaatgttagcaaccatgatggacacggagcttgctgcagcacctatgacgccagaaatcttgtcgggcttggtgaaaatgggtggatctccattagcacacttcacatccgaagcatctttctctattaatgcctgcacgaatgttagagactgctccaaagcataggtgtccctagagcacgtgtcgaggatgcggacacccagagtgatgttggaaaggagatcagggtccttgttaatctggtcaattgcataaagcatggcctccagtctgtgaatccccttttccttcttcagctccccacaaggcacccctctctctccctttgcgtggacagggaagagaccccccaaaataatgtccccatccacccgtatggaatgggcatactcctggctgtgagttctttgcatcattgtgaggatccagtagaacttggcggtcaagaggaagaaacaagggcaagaggctgatcgctttccctcgcataccattttctccacaggtggtattgcaatccaagacccaaagtttattcttgccacagaagaaagggcaccacctgaggctgcaccttctggaggctaccatcagggcccatggggaaaaggctctgtgggcattagcaagttttcttgatttgaatgtcacagtgaatttccatcagacccctaaggttcaattttatttccttataagatcaacttgcctggaatggtgcaaaaattagaacatctgaggttctgatgttgggatgaggtcaacaattcatgtccttgaaatcagccttgtagcagaattattcctgggaagaggggaaaaaagggggttcagttcagtgggtctacatgtttcacattttgcagccctgtttacgccagcctcttaaaaaaaaaatcccctattcagtaagaaactaattctttttgtccccctgtgattctgaacacctggctgcactgcatctaaacagggagattgatcatatttttggagcaagagaaacagaacagtatcaggaagtaggttgattctcccaaaccagaaagcacttttatttatcatcttatttcaataaaccttatttccatgaaggtaaaaatcctgcaactgatggcaccatttcttttcaaatctgttttttttttttgcagctatctgaatttagcattctaattttgtcaacaaaatcataataaatattattttctgtgatgtattcaacaagccagtcatctgttaatgactttttttttagtgcctcaaattacccagtaggaaaaagtgattattcaattacaaagtgaaagagagaaagaaatccacccaaagagctaaaaaatgtgtaagttttgtagcttgtgaaaaaaaattaacatagaaagtcagctatttcatataaattgtcttattctctggtaagaaaacaaagacttgaaaatgaaacacacaggtaaggtgacatgtgaagatattcctattaccattgtcagggtttccaattaatttgtcggtgtgggagcaatgggtatattaacagttctgagggaaacatgccttgatcccagaatcactaggagcaaatcagagttgtcaatcaattgaagagctgcctaattttgcctgactcagtggggaaaagttcatcaagactagaaataacttgaagtgaaaaaggctacacgcaaatctacagacaaagcctttttcctacggccttcacccttaattccgtaagatttttttcaaacgacttttgaagagatgtgactgaaaatgagaactgacttaacacagggaatctgagatttgtaatgcacagctaattaagagaataaacagcaccaatttactttggcaggatggttaatctaatgctcatttctaacctatttatatatgggtttgaaacctgaaatttggacagttctcctgtaccctagccaaccaacatctgcttgtattttccattcacttgttcaagttccagttcataaaattttctttttatccttcttgccccgaaaggaaagatggtgcttccctgggggataactgaaaatatgcccaaacaccttcaaagaaagctgcattttttgcacttgcagattagaaaagagggctcatagcagcccactgccccatatttctgagcaaacacctggcagcctagccagccaatggcccactcggctgagatagttctgtgcagcctaagacaagtattccctgcctccgggcacacattaagccttagatttcctctgtgctgcccccaaaatactttctgatttttctcaccacttcactgtttagtccctcacactggattctcctagcagctgcttttccctcagaaaatctgtgattcaataacagcctgacctcaggcattccacaaaaggaaacactcagaaagtcaacctgattttctggatgaaaccatttaagtgataggccataaattacaccggccacccattaagagaagtaagattgtgtttaacagtttcacaaggaaaaccagtcacatgatagtaaaacctcattaactctgatcactagttgagaatttgagaccaattccacgtggctgagccgacccttgttctgacagagtacagactaaatgaataaataaggtgaaggagaaatgtctagggggagtggatgggtcttgggaccacctttcctctttacaccaagccatcccccaagtacttaaaacacttaagagaataaatggctttcaattatagacgaacatacaaacagcccatctgttcatcacaatgcatccttacct

SEQ ID NO: 586522 - DNA, 4001 bp, Homo sapiens
aactagctagcacaatccaaacagaacaaattgagcctaaggaacagtatacagctgtgttctcagtatcttcttctttattccgggtcaattgtctcctacaaagcctcccgtcatctatttctccccacatcccttattcaaaagcaagaattctctatcttagacatggtacaacctgtagttgactctaaaatggaaaaattgcattttaaaaaaccttggttcattttccctgacggaggaagcttttcttttcaaaattatcaagccacacgttttcaagaaccagagaatgaattgcacacagctgattctgcctcctacagagatctttcacggtattattcacaagcaagtgaccaaggtaaactaaagtggtttctgtagccatttgcaattattgacaaacaatttcataacggaaagtggaaattacaggcaagtgcaataagctgtttatccacgatctacctgctggtggctctttttctctatttttctttcaagcaaaatacaagctaccataggaatgcttttctcccgttcatgatttttcttgtatctccaccaccaaccctgttttccagttctgtcagttggcaggatttgtattcaatcgcggtagtagcccagactctagtgtattcttgggtgttccagagactcccgcaccttcaggtttgtgggaaaggatcccccaaatggcaaataaggcactccctcccggggtgggacttgcttaggggacttaagggtttctgcaaccggcgagggggtctgttttcacccccgctatcttgggtgcgcagacactctctgacaccaggcttcacagtttgggccacgggggaagtaattccccagggaaccgcgggggtgcggttttgcgcaactgggtgactcgcgtgtccctccgcatttcatttgcaccaagggagcgcgtgtcagacgaagggaatttttttttcttttttggtgattctgttattttttcaccaactgtacgaagctcaagggatatccgagctttctggctgggcggatgggcttcgcgcttggcatggctgagcggtccatctctacctctccgtttctatctctaccataacagcgaccactcagcccgccaggagcccctgtttcccagcgcaggttcctttttcttctcagttccttgggctgttgaagccgggttctgggtagatagagactggggccgtggggagagcgccaggctgcttttgcctttcccgcgccccggggcattccggcgcgctggggatgcagcctccgcccccgccgcacctggccgcccgagcgcccgcgcccacgccccgcgcggggccgcccgaaactggggccgcgccagccgcgggagctaccgaggagctgttggggtgcgtttgcctttgctttttaaacaagatccccgagaccttttctccatccccccaacccccagcaggacacggaactccggcgtttctcgaaagccacaaaagaggggcacggaaatcccaagctcgccgtgctaactcggagaacgcaaactcgaggcagagcgtgcgccgtgcggggatgtgggtgtcgaggaccccgaagcgcccggcttcccccgcgacccccatcctccctagatcctggttagacatccatccagcccacgctcagagggcgggggttaccccgactcatcccggaagccgctaacttcagaaatccctcctgttaggttcgcgaaacgaaggtacctcgtcatctcggcggggcaagtccggattccaccagggcaggtccgggaggtcacccagggcagacgatccgaggcagagcgctttaaaatcctgccgccgcacgcccagtcagagcgccgagcgcgcctgcccccttcccgtcacccttcagtctcccattcgccgactaaacttttgggggatcacatctccaagccttgggagttccgggtaaagtctccctcttttctgaacctctttactgtaatgtaatcatgggcagacaagaggggtggctgccttgttctttgcaacgtaaaatcaacagacacccaatcaagctccaatgcccggccagcccctcgccccctggtgcccactctccttctccccccattcccgtcacctccgcccgctatttctctcacagactacggacatgcagggccatctacttgtgctcaggaaaaacaaatcactagagtgatatgagaaggaatggtgcacctggctgtccgctgaaaggttttagagaagaaaacggaaaggggaataaaacggggggattctccttttccaacaagcagggcgttttggggaagtttgggggccaggggctttttgtcccgtggttcggcacttgctttcctcggagccgctttctgctgccgggcggcgagtcttaccctgctccccgcagagggcgcggtgaggaagcccgccgggggcccgcagctccatgtcagcgccgccgccgccgccgccgccgccgcgtgaggcgagcacagcggccgcacttgtggctgatctctgggctgagggggctgagctggcctagcaggcgccaagtctcttccatgtgaataacaaatactcccaccggcggccgcgattggtctgcgcccggcgcctcccgatcctccgcccgcggccattcacccggcgcggcgcggggagccgcggccaggatcgcgcccgggatcgccaatcgcttcgcgccaaccagtcacctcgggaagcgggaggaggaacccccgaggggcgggagcctctggatttcggtgtcacccagcggccctggcgcgggcagggagggggaccctcggcccgcggatccccctccgctcttcagcctgaagcgacgaggagaccagaaatgtcaatagttctgatttttaaaaatcatccccccttccccgcccccaagaaaaaggggaggacccaactacagagtgagagggtgggaagaagcgggagcggtagaagaaggaatatggttgtggaggagcccagcggctccggctgcctggcgagcccgggaccggcgcggggaggcgcgacgcccgcccgagcacagcgggcagcacccgcgagcccgggtccccggtgaacacagctccagaaagcgtcaccgagaataacacatggtagatgacaagtgtcccgccacatgctttcttttcgggaatgcttaaagtagagccggcaagccgcgcggttcccttgcaaagtttgcctggcgccgcgcggcggttccgccatttgtcccgccccgcggctctggcgattgtctccccactccccgcccccgagggtctgagggacgcgtgcaacagagtccccagggctcgaggtaccacacagcgcggtccgctgcgggcactgcgcaggaaggggcatgggtggctaccgggacggtcattttattgagatgattcaaggagccgcagacgcggggcaggaaactccgggggagccgtgctcgggttctgcagggaaacctcgggattcccttcgcatgccgcatgcggaaacctgccgggctcgacgtgcacagtccagcgctcctccccactagttactgcccaggccccccgatcctgcacccgccggaatgagagaaagtagcccctcgccgcccagctcccgggtagctgctccggccgggccttgcgttggtgagaaagttccatctagaggcggccgcgcgcaactgcaggcggcgccctaggcccgggcgagccagggagagcggggcgcggggggagagggggcagcccaggagataaggaggatggagaaggacgggagagaccccgaaaaggcaagctctagacccccgttcggcatctctacaatgaattttatcttcctaagcatcatgaacttataagcattatgtcaggaatctttcattaattcctgtatatatcgcctgttctgttcgggttattttaattttcacatcaactctgtgagatggtc

SEQ ID NO: 586523 - DNA, 4001 bp, Homo sapiens
ccccactcccaatgtaggccaatggtggggattcagagatgaaaaaaggcaggaactcagaggctcttggaactgctagggagagagacacagaaacacatcatgtgatgcagtgcttttgtcttcacagcccggggttactttggggccaggtataccccagggcactaccccttatctgtcccattcccactgccccctccactctccagtgatgaggaccttgtcctcctttccctgggcaccagtccaggtccctccctgaagcagcccttagtgccagcactggacaaggttacatcttcggatacacaacttcagatccgcacggatataggccagactgaaaggtcatagatatttgaatataagaggggattggtagatccttttgtacagaagcagagatggagagctggagagagggaatgactggtggaggattccacagcccatcagtgctggcacagggaccagaatactgcatcactgccaggacagtctcaccagccaccaatggccggcagttcaattcagtgattcccaaatctggaattctgtggatccagagaatgctttcttataggcatgtgcatgtgtgagaaagagagagagaatgggggaatatacgactgccaactttttattttgccaagagcattaaaaacaaagcaacttatctactgtcactggtttggtttttattcaaatttttgttgttgttcttttttgagacagggtcttgtgtcacccaggctggagtgcagtggtgcattcatgcctcctgggcacaagcgatcctcctgcctcagcctcccgagtagctgggactacaggtgtatgccattacacctggctaattttttttttgagatggggtcttgctatgttgcccaggcaacccctgggctcaagtgatcctcccacctttacctcccaaagtgctgaaattacaggcatgaggccccacgtctggccaaattattattttttaaaggacccatgggccgggtgcggtggctcacgcctgtaatcccagcactttgggaggccgaggcaggtggatcacgagatcaggagatcgagaccatcctagctaacacggtgaaaccccgtctctactaaaaatacaaaaaaaaaaaaaaaaaaaaaaattagccaggcgtggtgggggcgcctgtagtcccagctactcaggaggctgaggcaggagaatggcgtgaacccgggaggcggagcttgcagtgaggcgagatcgtgccactgcactccagcctgggcgacacagccacagcgagactccgtctcaaaaaacagaaaggacccataacaccaggaggtaagaaaagctgtgtaccccgtggtggtgcctggaccagcgtctgaggaccactggcttggcaggaggttcctggaccctaggcccccttcagcgcctgagctgcagccccgcacctcccaggccctggcacttaacaggaaagtcggcagctgctctggggatgaaggaagtgggcgacctgaagggcatcctggtttggaatgggaaagagaccttcccttcccactgtttcctccggtcatttgtggcaacttggactgcacattgacccagggtagggtcagaggttccttcccgttgacaaccgtcctcggccctttcccctgaatgccaggactccgcccttctgtggccccaaagccatagggatattttcaagaccccaagctgggccctaaccaggccatccgcccccagcccctgccccgggcgtcccacagccagttaggcgatgttcggccttgggtgggtagggggacttccccacatcctctcccaacctgtggggccaccttgctctcccccatactggtctcccctctacccttccctccacctgcggcaccgtcgtaggcggtttcgcgtcccagagctgggctgccctccaggcgggtcacggtgggaccctcgccctccactccaggctccaccgcgctcctggagcttccgttggccccagaggccccggcggggggttgccccgacccgggggaggagcccactgagcctgggcctctgagcggagctccagctccagctctgcggaggagacgcgggctcacctccctacctgccgccccggccaccgcaaacctggcgggtggagggtggggaaaccaggccctggcgtctgcccacagtaccggcttcgctcacgggtgtgtgggggcggaggaacagagagcgggagggatctgaattcaaatcctagctctgccattaccagcgtggggactttgaataaatttcctgtgtctccttcctgggtcctgggcttctaatctgtaaaatgggaataataatagtattaataatatggtgttaatagtattaacactattatattaatgatatactattaacactattatattagtaatatagtgttgagtgttaacacttatattaataatatagcgttaatagcattaacactattgtattaataatatagggttactattaacactgctatattaataatacatgattaacactattaatcatataatagtgttaacactataatattaacaatataatatagtgttaacactattatagtgttaacacatattatattaataacactattatattaataataattgttaataatatagtgttaacagtattataattatattaataattaataacactcgtatattaatattataattaataataataaagtgttaatagtattaacactattatattaatgataatagtgttaacactattaataatgtaatagtatctacactataataataatatagtgtttcataatatagtgttaggccgggcgcggtggctcacgcctgtaatcccagtcctttgggaggccaaggcaggcggatcacgaggtcagaagatcgagaccatcctgtctaacacggtgaaaccccgtctctactaaaaaatacaaaaaattagccgggcgtggtgggggcgcctgtagtcccagttactcgggagactgaggcaggagaatggtgtgaacctgggaggcggagcttgcagtgagcagagatggcaccactgcactccagcctgggcgacagagcaagactctgtctcaaataataataataatatagtgttaacactattatattaataatatagtgctaacaccattatattaataatatagtgttaatagtattaacattattatattaataatatagtgttaacacatattagtaatgtagtgttaacactatcatattaaaaatatagtgttagtagtattaactctcatattaataacagtgttaacactattatattactaatatagtgtcaatagtattaacattattatattaatagtagcacactgtgatattactaatatctgtaatgttaatgatattcagtgttagcacactgtggtattactaacatctatgatattcatagtattcagtgttagcacactgtgatattactaatatttgtgacattaataatatccagcgttagcacactgttaacacactgtgatattactaatatctatattatctatcatattagtgatatccagtgttagcacactgtattaacacactgtgatattactaatatctgtgatattaataatatccagtgttagcacactgtgctattaccaatatttgtgacattaataatttccaatgttggcacactgcaatgttaataatatctatgatactaaaaatatccagtgttagcaccctgtgttgtgttaataatgtctatgatattaataatatcaagtgttagcaccctgtgatgtgttaataataatatgatattaataaaatctagtattagcaccctgtgacttgctaataataatatccagtgtttgcaccctgtgttgtgttaatatcaatgatattaataatatccagtgttagcacaccgtgataataatatc

SEQ ID NO: 586524 - DNA, 4001 bp, Homo sapiens
taccacccactggtgattatcagaggtgataattctcttagtataacagggctaatatcttaccaagatatttgctctgaaagagcaaaatactaccagtatcagaaaagctagtatttccagaaagtaccttctgaggacctagagctatctgttgtttagtggaaggtcaatacacaagtttatatttcttcagagatgagcgaaagatacaaggaagccaggtcccagtgggtcacacacagcttttcaagcacgacacacattacggaaacataagactgtggcatttcacactcatctaacttctcatttgcagacacctgccatttagcaaaataaagtgggagtccagaaaaaggagtacttggtagtagaagacagagctgcctgttgtatttcaaaaagttaagccttcaaaaacttttcagacatgtgggcgactttttttttttttttttttttttttttttttgagacggagacttactctgttgcccaggctggagtgcagtggcgagatctcggctcactgcaacctctgcctcccaggttcaagcgattctcctgcctcagcctcccgagtagctgggattacaggagcgtgtcaccacgcccagctaatttttgtataaaattcttccttgaccaccctctccacctcgaaaaaaagtaaagccttactaagcatgacactaatgcaaactcaatgcatacgctacacaaacatataactccttatttggagctaataatattccaagccaaggaaacctacaaataatttcgctatagtcataggagagtgtgaagatacaagatagcaacttgatatataactcacatcaagaaaactttcaccagcgtttaagggaaaggagttgtagatgtgggtcatttaatacccacttccaaattcactgaagtggacagcgccctacacacaaggtgagacctacaggcatcattgctttgaagctgcatttaagctctgaagctccaatatttatagaagacttttaaaactttgtaagaaatcacaaagttccccttctttaaaacagatcagtgctgggaaggctcaaaagtcactttcactcccttaccaaatcatcaaaaagcccggagtggcagggccgggagccgagcatctcgcgcgcagccccagcctgcacaggtgcggagctcgggggcggctgggggctctcgccccgccgcgcgcagcctggaggcggcccctgccctcttgcgcctcaccgccgaggcccatgtcccctgagccacggacacggttcaacagacacataaacacgtctcgcaaatgtggggacaaactgttccaccgttaggtatagggtggtttgcttggtggtcacggattctttctcaaaacgtgaagcttccaggagcactcctgtcttggcaaagcccctgcgctgccgatgaaccccccgggaggtgggatgcggccgctgagctgagcacgaccctctgccctcgccgtgaggtgatgctgagggaaccgccagcggcccggcccctctgccaagggcgaatttccgcgggccggcagcgagccaggcgcctcaggccccacggcgacctggcccgggctctgcccccagaccttccgccgtggctgggtgtgggtggcaaagccaaaacagccctctgaggaggggagcgacgccctcgcaccagccttctcagggcggcgacgccccgggttgctccccaccgggtcggagtccggggggtatgagggactcccactccccgcccccacccctctccgcagcgcgcctcccgcacctgcgccgccgcttccggccccgctggcctccgacactgcccgctgcgcccgcaaccacgggagcacgtccttcccgaggtcgaagtcggcgaccaggcgaagagccatcgcccggacacgaccaccgggcggctctggggccccgcaccgcgggcattcccggccccgcgtggccgcctcgccctcgcgtccccgctcccgccccctctttcctctcccccgccccctgctgctttcggttctgcagcgccctggcctgagaagctccggcaccagctcctcccggccggcggcccgcacctgagccggagccggagccgggcacggcgggtagcggtggggcggggtggaccaggcgccaggaccaggcccgccggggcgggaggcctccgcgcgcaccttcggggctgaggatagagggcgcaaagacgtgggcgcttcagggccttggcgaggccgctagcccagtggcttccaaacctggagggtcggcctattttctttattctacaagtgcctccactgtgcagcaaagtgtggaaaccacttggcttgagagagctgggtcctctggagcagttcagggtcaccacagaagtaggccgtctcttgggcctattcgccccagcttcgaggtggtggtgctttattagtgttattaaggtaatgagtagcaactgggagcgtatgacgaaggtgatcccattgtaagagaaacgctaaaaggggttaatgcgcttgatacaaacagcgtcctttttgccttttaactctagtacatctcatttgatgccttgagacatgaaaactgaatcttaagtctccacgcaaaccctctgcctcccaccagggtctaacagagcactctggaaggtgctcgacaattactgaagaatgagtgaatacagtaataaagaatgctttttcacatgcttccgaaattaaggtctgaaaactacttgtattgacgtcatctggggcactattttacaatgcagactcctgatctctacacctggacaagaccagaaacgtgcattttacccagagcctcgggtgattcttaggcttactaagtttgaaaactactccaaccaaatgtaaaagaaagtcttgaatttttttccctcctagagacatgtttctccaactgaggtaatggatgatttcaggtagaactccattactcaccaccatatacagaggaaagtcctcccacccgggaagtgcatgcaaatttaagataaatgcctaatgaagctgctaatattatcagtgaataaaaggaaggccactggagcccccaaggagctaatgcaactatttcatatcaaataagcttgttgcctttgtcatacagaaacactgttggccaattttttaaagtcagtacatttccattgtttttatttttgcagttaacttctatttttgccaggcaggactgattttatagtcaagcagtgatgatataaaaaattctcttcaaattaagtgaaaaagccaatgtaaagaaggtgagaaacaataagataatgatagaaagatgtggccaaaatcatgagggtgctatatgaaggcatgtgtatcagttaggattagattctccagaagttaataagaactcagattaacagtaaattaaacacacaagttttattctgtcacctagctggacgtaggcagaataaagctcttagggcaggttcctgaatttatcagggacccaggctccttccagttctttgctccacctgatcctgagtgtacccttgtcctcatgatcaaagagggctgcagaagcttcagccttcacgtctgcattccagaaatcagaatggaagaagaggaataaaaagaggatgctacctctcttttaaggatacttcccggaagttctacacaacatttctacgtatgtttcactcaccagaatttagtcacatggccaaatgtagctttcaagggaggcaaggaaatatacctggccattgctgtgcccagataaaaatcaggacggtattactgaagaaggtggggaaagtagatattcagaagcaattagagatctctgtcagagtatgatacccgattccggccactgagttgtaaggaaacctctgctatgacagatttctctattcttaaaacaagagacatgggaaaagatggtccctttcagtcttta

SEQ ID NO: 586525 - DNA, 4001 bp, Homo sapiens
acagacatcctttcttccccagtaattataaccttttccatgcaataagagacctattgtcttctttacccccaaacgccaactgttctcagattctctatgagtgcagttggggtggagccaggacactcaccgccaggatgctctgcggctcggtgatgtcttcattctgggaagaagagaagacagcaggaaggcggtgcggggagaggggtgtgactgggaggacagtagatcccccgggcgggggcaggatcatgaccctgaaaacgtgcctggggaaggtcagaaagtcatccaaggtcctcccagaggattcccagagccccacactcacccttgaccagacgcgcatccacagctcccgggacgctttctccagcatctctggatgctccaagttcacggcggtgaggaaacgcatggcagacaaacttcctgtggggcagaggcacccagaggcagggctcctcttgctgctttcctggtggaggactagctcttccttgcttctgacatcccccagagctcctccgccctcagcctctcacccaaggttcccatgacctatttgcctgctcttcttccctttcatgcccggcaaccttcagctcgctcaaggctgatcctgaggtttcccaaggcaggcttcacttgctttagtctcccgcagcccctccatcctatcaatccctcaatctccgacttctgtgtttttcactggataccctgtctacatcccactctcttcacctttttcaagcatcacagacaagaaatccttggggaagtggatgggaatctggagatggtgtctcaggagctttaagtcatttgccatgtatagtcctttgcggggaagcagacctggaggcttgtttcctgccaggagaaggttgggcacgctaagtgagaaaagacctaagggtcccaggtttggggacctcgacgtgggttttgggcagagggcagcttccttttttttctcttgttgtttcgctcttgttgcccaggctggagtgcaatggtgcgatctcagctcaccgcaacctccgcctcctgggttcaagcgattctcccgcctcagcctcccgagtagctgtggtatacaggcatgcactaccacgcccggctaattttgtatttttagtagagacggggcagagggcagctttctggctgccagtgccaatataaggacccgctggggtcggctctcttgggccactgagatcacccctgccccgaccctcccttcctaccactgtctttcatgatccctgttatgaggctgggccgcaactgcaggttgatgttccagatattctgataccggcacaggatctgcgggcagaggtcaagaacgattgccagtgtgcaagatggaaaagtgaaagagccgagggaaagggaagggaggcgctaagtgcagagcaggggttatgcggacaccctacattgtttggtttgaaattggcaaaactctcctcactactagaaatctattccaggatcttcgctcctgtggccagttttccccaaaactgccatcgttgggctaagaggtggccgtgttctgcatttctccctgaatgtttggagccgcccctctttccaccaccgtgggaaactgcagtcgggatataaaggctcgggttggagccagcgactctattccgtttaaaagcacaaagtgaccttcagccccggagctctccctgcttgccttaaccccttgggcggcgccaggagttacacgagacctctgtcccggagccctgcgctcactcttccctccgccctcactccccagacactgccgaggcgacccctcccagcgtcacctcgaagcccagccaggagtagggggacagcacgtcatagaagagctccacggtgcgcggcaggggccccatgctgcaggctccggaagagcagtggcagcaggagctccttttcccggaacccggcagaggctgcccagcttctgggcctgcctgggaccgcccaccgccttagcgcgcagcctcagagagaaactgccctggtagaggtccacctccggcgcagcggggcagggccagcctacggcccccagccaggggcggggtgggtagggaccccttggggagcgcgcaggtgtggacaaggggcgctgcaatcgcctttgcaaaaattttaacagtgagaaaattacgaaggtgaaacagatctgaactcaccaactccatcgtgcctttaacctccaaactgcccttggtcattcctgagcatgggacgagctaatatagggagaaatttagtttatagtttaaatgataatagcccttccccaaactaaaccagttttataaaactaataaaagtccacaagtttaggattatgagaggggcctgaattctgctaagatgtaggcattaacaattaccagacattgttccagaggtcacaagctctgcaacttccccaattattcctgtaaataaccacttttgtagaacctaagactggcctttgaagataccttctcagacttttccatttctaatgacaggatgactccacctggaccagtgactcctctgtggcccgcatccaaatgcaactcggtgcactgaggacggttttccacacccctgtgattgcatccccaaccaattagcagcacccattctctagccccttgcccatcaaactatcattaaaaaactctagccggcgggcatggtggctcacgcctgtaatcccagcactttgggaggctgaggtgggtggatcacttgaggtcaggagttcaagaccactctggcccacatggtgaaaccctgtctctactaaaaatgcaaaaattagccgggcatggtggcatgtgcctgtaatcccagttactcggggggctgagtcaggagaattgcttgaatccgggaggcagaggttgcagtgagccgagatcatgccactgcactccagcctgggtgacatagcaagactccctctcaaaagaaaaacaaaaacaaaaacaaaaaaacccacaaagtcccctagcctctgcctccgaattttgggaggctaatttgagtaataataaaactctggtctcctgtttagctggctctatgtgtattaaactctttctctattgcaattcccttgtcttgataaattagccccatctgggtaatgggcaagatgaacccattgggctggtgtcagggtgactgtcctgctctgcagtggagtcttgtgggaagggggtagtttgagatgcctgcagtgcctttcacttagctgtgccccttgggtgagccacttgacctctctgaacctatttcctcatcctgcatacacatggggaatatctaatgataacacctgccttatgacgagttgtgaggaatgaggtactccaataactgctagctcttattattgttgcttggcagttgcatgaatctcctaaactggggcagaataagaagttctcagagtacacattttcttgtgttacctttgtcagagatttgcacaatgtctgggacacatttgaccatcgatacatatattttgagtgagtgaaaaaaaagagggactggtagaagatggagaggcctcactatagataattttggtgataatggaaacgattggccctattcgttttcacaaatatgtgagtcatattgtcttatattgggattacatttactgcaaagaaacagaattttaaaataattccatttaactttgttaaaattatttttaacattactaatttaataaattggaaaacatataaagattccacttttcatttgtatcaataaggaaaacaactccaggctatcagaatacagagatacgaggtaaacccctacatggagaagagcatgcaaaatggaatgaaaaatgatgttatcattacctacttgcagagtaaactaattgttcaacaaccactgaaactaaactttttttttttttgagatggagtcttgttctg

SEQ ID NO: 586526 - DNA, 4001 bp, Homo sapiens
agcactttggtggcaggccgaggcgggccgattgctttcagcttgattcaagagttggagaccagcctggccaacatggtgaaacgccatctctactaaaaatacaaaaattagccgggcgtggtgggcacgcctgtaatcccagctactcaggaggctgaggcaggagaacggcttgaacccgggaggcagaggttgcagtgagccgagatcacaccagtgcacttcagcctgggccacagagtgagactccatctcaaaaaaaaaaaaattagcagggcatgatggcatgcgcctgtagtcccagccactgaggaggctgaggcaggaggatcgctggagcccaggtgttggaggctgcaatgtgctatgattgtgccactctgcgcttcagccagggcaacacagagagaccctgtttctaaaaaaaaaaaagaaaattaagccgaaagcgatggctcacacctgtaatcccagcactatggggggccaaggtgggaggatcgcttgagcctaggagttcaagaccagcctgggcaacaaagtgagaacgcatctccacaaataattttttttaaaaaaaggaggtcagtagtcagcaagagctgcgcatcgccaagagtggacactactccaacagcaccccacctgtgaacatccccagccgcaaatcagcgcaaatccataacctagggaggacaaaattcgctacacgaaaaagcaaaagctggattaagaaaaagtggagaagtcggggagcgggaaggagacagctttttccatttcattttccttcttcctctgcactcccgtcgtctgggtgctggctgaacccagacggcttaattttcatggcctaaagctgaagttttccttccggtcattgtgtttatttcccccaaagaacaggccccgcggggcaggcgcgccgggccggcccgggacaaagcccactgcggactccacctgggagcggggcggggcgggggacagcgctcccgctcccccgcccgccgcagttaccaggcaacgcgcggccccgcccccgcgccggttggccaatcccgcgcgtctgctgccccggcgcaggagccccagatacaccaggcgagcgcgaccccacgacggctcgggcctggcaccgcgcgcgcccccgcaccgcctagccggccaatcagcgcggcggggcatgcgcagcccgcagggccgctcgctcgctcgcgcgcgggatcgcacgcgcgaggcgcccccccaccgcacgccggtcggcgcgcgcgcccctcccccacgcgcactgaggcgcgcgcgtgccactgtcgtcccccgcgaccgcgtccgtgccgccccacccccatcgcctcgtttcggccactgccaaggccggcggggctcgagacccggcgaggcggtgggggtgggggtagggggaggcggcacgggcgccccccaaggccccacaccgcgcgcggcgggccgcggctcccaggcccctgtccctgcaggccccggcggggcaaagtctctaataaaggcccccgctcgcaatggcccccgaggcgggggcggggggcgcggggatgaggcgagagggactcacccgagtgcggccgcctccaggcagctccggggccgggggtgccgaggggaggcgagtgtgggccgcgcgcgggctgcggccgccgcggagcagcctcggctgaggggagctggcgagcggacgggaggcgagagggggcgaggggcccgtgcgtgtcggtcgcgctcctgtcaccgccgcatggccgccccgcaggcagggcctcgctcagcgccttgatccgatcactgggggacagaggcagaggccggggtgaccgcggcaggcgggcggccgcggctggagagcgcgtgcggggaagcgggggggcgaccggtggccccttttctctgctctcccagcttctctctcaccctcctcctcctcctccttttttttttcttttttttctttttttttttttttttttttttttttgttcctcgaaggcgcgttgcgcctgcgcatccgcagcgccgcccagcgggagttgtagtttcggatgcgttccccgtcaacgcggcggcggcggtcgtggactacaactcccaggaagcaccgcgccggctagccccgaacccgaggacgaggcaagcgcggcgcccggccctctccagcaagggctgtcaatggaggcgagggtggtgggagcgagaacatggctgcacctggggcctgcgcggccgcccgggtgggggaggggagccggggtgcagaaacggaaatctggacgggtggtggctccggcgtcgtccccaccgagcgccagccgccgtccaagtccgccacttgctcttgcaccccacattccttgcaaattgcgaggcagggaagctgcaaaagccggggagccccgggctgggccgtcgccctccttgctctgcaaaaggggagtccttccgccttgcaccaccctccaggacacaaagaactcctctctagtgttttccaagctggcctccaaagagaccgttgcccccaagttcggacaggcgagaggggaggagaccttgtgttttaattcctcccccagaccctccgcctctatctctccctcaggatttggaaggaaacttgcaagggagtgggagcagaaatcctgactcgtagctcctgttttgttctgtcaaccgcgatgcgatttaactcaaactcctccccctaccactattttttgcttctcaacttgaattagccggtgggttttgaaaatggagagacattactgttcacctaagttaaactccaaaactttacaaccccgaggccgacgatttttagatgtttatgtaaagcacgagattgagtggttttttgattcccgcccgcccccccacccagtaccacccactggggattcgggccacgacggccatcctccccccacccgccgcttctcggtaggtggcgaccacgacgctttttccagcctccaagcctttgtcgctagcgagaaaactttccgagcagccagtcttttgatgtgggttccaaaaacctttcctttcaatctgggttctccgattggcattccccatcgtctctcttgcacagaccgcacccaataaagcctcctctagaattttcatgttggattttttttgaaaaatacatggagagcgtaaagctcaccggagaagcaatctgattacagaagcctgaatttttgcgatttcccggacaatgtctaggatcccttcggtccttgcctaataagattgtgactctcctttgtcgattgtctcgaaagtcattcattaagtttgcacaagagcaactttctttttgcacttgtatttcattgacatttagtaatatttaattaaattctctattcccaataccacgtgccactggcatatatttaggaacaaatttaactcttgagaagcctataactcactctagtaagagcagccagcctacgagatgcagatttcagctgctgtggacttcagtgagtatcttttgttgagagagtggtttctccacctggaggggtcagggaaaggatttcctgggtatagtggagtcgtggagtagaatttggggggatgttacaaagtgagttagcaaggcagaagtttatttagccaagatgactcttatcatcgtgaaaacgtttggaaggtagttcctttcttctatgaatttgtttagtggttcacagtggaattttttttttgagaccgagcctcgctccgtcacccacgctggagtgcagtggcgcgatctcggctcacggcaacgtctacctcccgggttcaagtgattctcctgcctcagcttcctgagtagctaggattataggcgtgcactaccacgcccagctaatttttgtatttttagtagagacgggtttctactaaacatgttgcccagactgttctcgaactcctgacctcaagtgatctgccttcctcag

SEQ ID NO: 586527 - DNA, 4001 bp, Homo sapiens
acaggctgtggaagaacgaggtgtggacttgagcctcccacaccccagaggcaggatgggggttccgataccctgtcaccttggggccaagcctgtcccttggtccgcagatgcctgctcagaagaggtcagagtctatctcacaccctcctgggccccaaatagggcggttcatgacggccacctaactaccttatacctagcccctccctgccagcagccaccagcctccagccacctcctcctgcttagaataaataatcgatgctggtgcccttcccctctggaatgacactgctgaaataaatgagctgcttggggcaccttccaagtcccaaggccccgggccagtgccaaggagtcaacagtcctggccacggggcagccagacacacagaggccgaccatggcagcggcgcgccagggtggcttctagacacccctctcctcttctaagagaaaccccagcaaatgcccacttctccaaaaactgcgggggcctgccctccactcccacccgccaggcccagggccatcccggggtaccccttggcacattctccatccaagagtcagtgctcccctcacaggccctgcagcgagacccctatgtcccagcaccctcgcttcagctgggatggggacacaggagactcccaccgcaggaccttggtcctgggaggtagggtcactaggccagacgccagagctccagccccctccagcactgccaggagggtggaacgaactctcagcggcacagcggcccccttccctgggcccacgccaggcgaggcagggtctcactccctggctgctggccaggggtgaggagcccaggagaggtgtcaagcccatcatgcccagggtacttaggatggggcgggtgggtgttcagcaccctgtggcccctcctctgtcctctccacccatctgcaggaactcagagaccacccacagaccgagtatccccaacttactcctctgaaccctttgtggtccccccactgccaccttctgagtcccctccacccgggattcagcggccaccaccacacaggccagccccctccccggggccggggcggggggtccactacaggaaccaccctgctggggcaatcctggctggactggactccgcctgggagttgggggcgcgggccaggggctggcccagaccgggagaaggtggaggggggaaaggcggggaccgcggccttcccagccccctctgctcccaccccggcgcccgccaccgcgggcagcgcgactgacctcattcgccaactgcagcagcctgcgggcgccggcccgggacgccccccacctccagaagagccggtggcaaggagggagggggtgacagctcccagctcccggcccctcccgggcaggtggggggcggccgtccctcccctccccccgggcccgaattataatcccagtcacgtgcctccccgggcacccaaaagccggccccagctcctgtaacaccttgagagggggaggggcggggacccccccccccggaggcggaggggatcgggggcgggggtgggggagaaggggagaagggcctcggtgcccgccccccgcaaaagtttctcctaccttggaggatccccaagcgctcctgccagcggcgccccggccccggcccgcggccaggactcagcctcctgccgctgcctccttaattaatccgggagaatgggggaaggagaggcagagggaggcgaggacggcggcgcggcgagggcggggagggaggcgcggggagggggcgcggggggggaatcggccggccggggggctggcgctcggcggcccccacccccggcgcgggctgcggcggagggcggggcggcgcggggagaggagcggagagcgggagcgcggggaggctctttgttctgtaatcccagtaagattgccagccattcgccccggccctaatcccagccccgcgcaacaccaccctccattggctgccatttacatacgggattagcccgccccgcgccccgcgcccctgcgcaccccccttgctacccagcgcccctgcgtcccggggacctgggcaccgcggtggggagagcgcgccgcacccctcggccccggacctgcggggaggggcggtggcgccctcggttctcccccaccagcgccggattagaaaagcctgggcgcgcccccgtctacccccaccgctccccaccaccactgggagagcagccgggcgcagggggctgaagttggagggtcaaggtcacccagctggaacgcgcggaggccctgagtgtcccggctggtcactcccgcctggcccgggttctagtcctaaggcttgggccaggtacctcttactcttacagcctttgtccccctcccacccctgagatgtgcaggaaggcagtgacaggccgaaagtcgcagcagagccaactggactcttggtcccatcttgtctgatgggacctccctctgataggcttttacccctgtccccccaaccagcccccccgccccccgcccgccccgctcccaccaaccacacacacaccacagcagcgctcctactgaatcagtgcgcacgcctcccatccggccccaaagccataaatcctaattcagcacaaggaacacagtccttcccccacgtggtgccctgatccctgaactagaccttggctagactgggcatggcagggagggagggactcaccccaggcaggccccaaccccagggagcttctggcttagaaggacagccaaacatagatcgagaatctcccaggtcctggcaaaacccacaaggtctccccacagcctcctggccaaactgcctttgcaaagattaggacagtgacagaagtttagcgtggctgactccatcttgcttccagcctcacgcgctggctgtcttcactcattccggggcataggccaagctaaccgggggaggaatttagtttatagttcaactttgaaacaaggatgataatagttactccttaaacctaacctgctttttatacaagagaccaaaaccacctttgtaaaactaacgaaaggccgtgagattaggattatgggaggggcctggacgctgctaaaacctacgcatcgtttttataatctgactgctcaggagtcatgtggcgagagatcacaagatttgtgagttccccacttcctcctatagatagcatctctattgtggaaactgagattggtctttggagatgtttttcagactttcgcattcgggcaaccgactgactcacctggacctgtgtgactcatgactcagcccatcctgtggcccccactcagagaccgactcagtgcataaggaccgtttgccacacccctgtgatttcatctccaaccaatcagcagtacccattccctgggcccttgcccaccaaattatccataaaaaccctagcctctgagttcttggggagatttatttgagtaataactccagtcctactgcttggctagctctgcattaataagacgcttttggctgggctcagtggctcatgcctgtaatcccagcactttgggaggcgaaggtgggtggattgcttgaggtcaggagttcaagaccagcatggccaacacagcgaaacctggtcactaaaaatacaaaaattagccgggtgtggtggtgcatgcctgtaatcccagctactcagaaggctgacgcatgagaatcactggaacccaggaggtggaggctgcagtgagccaagattcagccactgcactccagcctgggtgacagagtgagactgtgtttcaaaaattaggccaggcacggtggctcatgcctgtaatcctaacactttgggaggccgaggcaggtggatcacttgaggtcaggcattcaagatcagcctggccaacatggtgaaaccctgtctctactaaaaacacaaaaattagccgggcgtggtggcaggcacctgtgatcccagctgcttagg

SEQ ID NO: 586528 - DNA, 4001 bp, Homo sapiens
tgtgctttggggccattatgacggaaaataagggtgacttgaacacatacactgggacactgtgacggtcgatctgataaccgagccagctactaagtgactatgggtgtggagcgtccacagcgtggggacgctgaacaaaggggacgattcactgcccaggctgcacagcgcgagatttcatcacagcgtgcaatttaaaacttacgaattgtttatttccggaattttccatgtagtattttcagaccacggttgacctcaggtaactgaaacagcgggtaaggggggacaactgtacttccaggttctgcagcctgagaatgagagaagggactgtgcaggctgaaggcgtgggggaagagccagggccctggggagcagacgtcagggactaaactggaaggcaagcaggaagaaccgtgacccactccaaaccgccactgaagattgatcccaactgcaagccggtgccaagccccgcgtccacggaagtcacacagcctatgacgccttcctctccaaatggaagcaaagaggagaagaggctgctggagtcttcaattgcagccgtgagcaatctccaactggccagtttccaagcttatatctagacatctgcttacttcaaattaccagcacgaaactaaaacatgatttttttttccttaaaacacaaagcttggcccatcaattccagtccttggtatacacctatgagaattgaaaacaaatgtccgcacaaaaacgtgtacaccaatgttcatagcagtattattcataacagccaaaaggtggaaattacccaaatagccatcaatggatggaaaatcaaaatgctgtgtattcatatcatggatttttattcagccataaagaaggaaagaagccagacacacaaaaaacttcttgggatgattctatccacacaaaatgtccagaataggcaaatccacggagacaaaagtgattgccaggggctggggatagggacggggtggggaccggggaatgacggcctaatggggttggagtttcttctcctcgggtgctgaaagcgttctgcaattagtggcaaaggttgcacagctctgtgcactgaattattcactcttaaaacgtgaattttacaatggatctcaacgaagctgttattaagaaacaagaaagcttgggcttgagggatggagaatacagccttgcgagcctttttccccctagaactcgaaaccagaattgcaacgggaaattcccgggcctcggcctttttccttgggagtctggattggttttccgccaacaaacagatccccggaggccgtcgcgaggaccatacccacggacaaaacccacaacctgggcctctaggcaacgcgtgacgtcagggggcggatccggggcgcagttgcctggtaacagcggcggcccccgcccccttatctaaccaatcaagcgcgtctgcacgcagcgcgagcgccccacgtacgacgggcggagcgtggcatcacgcacatccccgctcggccaatcaggaaggagagggatgtgcgctccgtgcgtacgaccattgcccccgcggcaaggcttccccgcccccaccctcacacctctggtcctgccagcagggatcggggttcgggggtgcctcgcctcggggcgccggggtgtcccggggggccacctcccgctgcggccgggcggcctcccttccccaggccctcaggaggaggacgttccgaaaggcaacccgcccttaatggcggcgtcggcggcgggggcggggtacgcacctgagggcgctgggccgcgccgggccggccgcggagtccgaggcctgggccaccggggagcagccgatggccgagggcggcggccgagagccccgcgcgggggacgagcacgcttcggggcgtgtgggtggcggccgaagcccctgctcgccactcgccctcctttttctctttctttctttcccccccttttcccccctttttttgtttgcttcctggaaggcagcctcgactcgtgtgtccgcagcgccccaagtgggagtcgccgtttccggtgctgtcgaatccaatttagccgcgctgtgcatttgcttgggggcgtgcagccccgtcccgcgaggtccagaccccctcagccatcgctgattgtgggatggattgctggcggggcctttctcaccccggacaccgcccccagacgtgcatgcagttgcttgctgttatttaattttttttttttgagacggagtttggctcttgttgtcgaggctggagtgcaatggcgcgatcttggctcactgcaacctcagcctcccaggttcaagcgattctcctgcctcagcctccggagtagctgggactacaggcgcccgccaccatgcctggctaattttttgttttttttttttagtagagatggggtttcaccgtgttggccaggatggtctcgatctcctgacctcgtgatccgcccgcctcggcctcccaaagtgctgggattacaggtgtgagccaccgcggccggccaggttacattttcatatggttatgactcccaaatattcatctccagcccagaccattcccctaaactccacatctatatagccaactgcctgctttgaaatctccacttgtacagcgacttaagaaaaaaaatttttatcttggagaatgaataggcatcccaagaagaacatgtctcacgctccccacacttctcctgcagtcttctccagctcaatgaatgaaactccattcctccacttactcaagccagaagccttggaagcatcttattcctcccacgctccacaccattccttcagattcctccggcagctctaactttgcccagattctaccactttcactctctctctctttttttttttttttttttttttttttttgctatgtgtgttgaggggagatggacttgctctgtcacccaggttggagtgcagtggtacagtcatagctcactgcagcctcaacctcctgcactcaagcaagcctcccacgtcagcctcccgagtaggtgggatcacaggcgcacatcacctcacccggcaaattttaaaaattatttggccaggcgcagtggctcacgcttgtaatcccagcactttgagaggccaaggtgggcagatcacaaggtcaggagttcaagaccagcttggccaacatgatgaaaccccatctctactaaaaatacaaaaattagctgggcgtggtggcggactcctgtaatcccagctacttgggagcctgagacaggagaatctctggaacctgggaggcgaaggttgcagtgagccgagatcacgccactgcactccagcctgggcgatagagcgagactccatctcaaaaaaaaaaaaaaaaattatttgtagaggctgggtgcggtggctcacgcctatattcctagaactttgggaggccaaggcggtcggattgcctgagctaaggagttcgagaccagcctgggcaacacggtgaaaccccgtctctactaaaatacaaaagaaattagtggtggcacgcgcctgtattcccaggtacttgggaggctaaggcaggagaattgcttgaacccaggaggcggaggttgcagtgagccgatatcgcaccactgtactccagcctgcgcgacagagcaagactctctccaaaaaaaaaaaaaaaaaaaaattatttgtagagacaaggtctccctgtgttgcccaggctggtctcaaattgctgttctcaagggatcctcctgcctccttcctcagcctcccaaactgttgggatacaggcacgagccgagcctggcctctaccaatttctaatggcccccactactaccaagccaacactgtctcttgctgtagactcctaatttgtctccctaattctgcccttaaccctcttccattcttaacacagcaacaaaaagaatcttgtaaagtgtaactcatttcactcttctcaaaaatgtcc

SEQ ID NO: 586529 - DNA, 4001 bp, Homo sapiens
ggggccattatgacggaaaataagggtgacttgaacacatacactgggacactgtgacggtcgatctgataaccgagccagctactaagtgactatgggtgtggagcgtccacagcgtggggacgctgaacaaaggggacgattcactgcccaggctgcacagcgcgagatttcatcacagcgtgcaatttaaaacttacgaattgtttatttccggaattttccatgtagtattttcagaccacggttgacctcaggtaactgaaacagcgggtaaggggggacaactgtacttccaggttctgcagcctgagaatgagagaagggactgtgcaggctgaaggcgtgggggaagagccagggccctggggagcagacgtcagggactaaactggaaggcaagcaggaagaaccgtgacccactccaaaccgccactgaagattgatcccaactgcaagccggtgccaagccccgcgtccacggaagtcacacagcctatgacgccttcctctccaaatggaagcaaagaggagaagaggctgctggagtcttcaattgcagccgtgagcaatctccaactggccagtttccaagcttatatctagacatctgcttacttcaaattaccagcacgaaactaaaacatgatttttttttccttaaaacacaaagcttggcccatcaattccagtccttggtatacacctatgagaattgaaaacaaatgtccgcacaaaaacgtgtacaccaatgttcatagcagtattattcataacagccaaaaggtggaaattacccaaatagccatcaatggatggaaaatcaaaatgctgtgtattcatatcatggatttttattcagccataaagaaggaaagaagccagacacacaaaaaacttcttgggatgattctatccacacgaaatgtccagaataggcaaatccacggagacaaaagtgattgccaggggctggggatagggacggggtggggaccggggaatgacggcctaatggggttggggtttcttctcctcgggtgctgaaagcgttctgcaattagtggcaaaggttgcacagctctgtgcactgaattattcactcttaaaacgtgaattttacaatggatctcaacgaagctgttattaagaaacaagaaagcttgggcttgagggatggagaatacagccttgcgagcctttttccccctagaactcgaaaccagaattgcaacgggaaattcccgggcctcggcctttttccttgggagtctggattggttttccgccaacaaacagatccccggaggccgtcgcgaggaccatacccacggacaaaacccacaacctgggcctctaggcaacgcgtgacgtcagggggcggatccggggcgcagttgcctggtaacagcggcggcccccgcccccttatctaaccaatcaagcgcgtctgcacgcagcgcgagcgccccacgtacgacgggcggagcgtggcatcacgcacacccccgctcggccaatcaggaaggagagggatgtgcgctccgtgcgtacgaccattgcccccgcggcaaggcttccccgcccccaccctcacacctctggtcctgccagcagggatcggggttcgggggtgcctcgcctcggggcgccggggtgtcccggggggccacctcccgctgcggccgggcggcctcccttccccaggccctcaggaggaggacgttccgaaaggcaacccgcccttaatggcggcgtcggcggcgtcggcggcgggggcggggtacgcacctgagggcgctgggccgcgccgggccggccgcggagtccgaggcctgggccaccggggagcagccgatggccgagggcggcggccgggagccccgcgcgggggacgagcacgcttcggggcgtgtgggtggcggccgaggcccctgctcgccactcgccctcctttttctctttctttctttcccccccttttcccccctttttttgtttgcttcctggaaggcagcctcgactcgtgtgtccgcagcgccccaagtgggagtcgccgtttccggtgctgtcgaatccaatttagccgcgctgtgcatttgcttgggggcgtgcagccccgtcccgcgaggtccagaccccctcagccatcgctgattgtgggatggattgctggcggggcctttctcaccccggacaccgcccccagacgtgcatgcagttgcttgctgttatttaatttttttttttgagacggagtttggctcttgttgtcgaggctggagtgcaatggcgcgatcttggctcactgcaacctcagcctcccaggttcaagcgattctcctgcctcagcctccggagtagctgggactacaggcgcccgccaccatgcctggctaattttttgtatttttttttttagtagagatggggtttcaccgtgttggccaggatggtctcgatctcctgacctcgtgatccgcccgcctcggcctcccaaagtgctgggattacaggtgtgagccaccgcggccggccaggttacattttcatatggttatgactcccaaatattcatctccagcccagaccattcccctaaactccacatctatatagccaactgcctgctttgaaatctccacttgtacagcgacttaagaaaaaaaatttttatcttggagaatgaataggcatcccaagaagaacatgtctcatgctccccacacttctcctgcagtcttctccagctcaatgaatgaaactccattcctccacttactcaagccagaagccttggaagcatcttattcctcccacgctccacaccattccttcagattcctccggcagctctaactttgcccagattctaccactttctctctctcttttttttttttttttttttttttgctatgtgtgttgaggggagatggacttgctctgtcacccaggttggagtgcagtggtacagtcatagctcactgcagcctcaacctcctgcactcaagcaagcctcccacgtcagcctcccgagtaggtgggatcacaggcgcacatcacctcacccggcaaattttaaaaattatttggccaggcgcagtggctcacgcttgtaatcccagcactttgagaggccaaggtgggcagatcacaaggtcaggagttcaagaccagcttggccaacatgatgaaaccccatctctactaaaaatacaaaaattagctgggcgtggtggcggactcctgtaatcccagctacttgggagcctgagacaggagaatctctggaacctgggaggcgaaggttgcagtgagccgagatcacgccactgcactccagcctgggcgatagagcgagactccatctcaaaaaaaaaaaaaaaaattatttgtagaggctgggtgcggtggctcacgcctatattcctagaactttgggaggccaaggcggtcggattgcctgagctaaggagttcgagaccagcctgggcaacacggtgaaaccccgtctctactaaaatacaaaagaaattagtggtggcacgcgcctgtattcccaggtacttgggaggctaaggcgggagaattgcttgaacccaggaggcggaggttgcagtgagccgatatcgcaccactgtactccagcctgcacgacagagcaagactctctctctccaaaaaaaaaaaaaaaaaaaaaattatttgtagagacaaggtctccctgtgttgcccaggctggtctcaaattgctgttctcaagggatcctcctgcctccttcctcagcctcccaaactgttgggatacaggcacgagccgagcctggcctctaccaatttctaatggcccccactactaccaagccaacactgtctcttgctgtagactcctaatttgtctccctaattctgcccttaaccctcttccattcttaacacagcaacaaaaagaatcttgtaaagtgtaactcatttcactcttctcaaaaatgtccatt

SEQ ID NO: 586530 - DNA, 4001 bp, Homo sapiens
tcttgcctccccttccacctcctccacccccaccccttctgcctctgccacccaagagagcaagaccaactcctcctcttcctcctcagtctattcaacatgaagactataaggatgaagacctttacaattcacttccatttaatgaacagtaaatatattttcccttctttctgactttcttagtaactgtttcttttctctagcttaatttaagaatacagtatatactatatatatattttatatgtgtcaactgacggcttatgttatcagtgaggcttccagccaacagattattagtagttgttttgtggggggagttgaaagttacatgaagattttcagctgtggcgggggcatctctaacccccatgttcttgaagggtcaactgtatatccaaagctactaaaatacccttctggtatcttttattttcttttttttgaaacagggtctggttctggtgcctgggctcgagtgccgtggcactatcatagcactatcattgctgcagcctcaaactcctgggctcaagcaattctcccacttcagcctcccaaatggctgggactacaggcaccacaccaccccgactgttttaaagatggggtcttgctatgttgcccagactggtcttgaactcctggccttaagggatcctcccacctcagcctcccaagtagcaagaacaataggctcacctaccatgcctagttccttcctgtatccttttcacttgctcaacccttcctctcttcctctttgctctgtactacatgaaataccgccatttctacatgccattctgctcatgcttttcctctacttagaatgtcatttgtttttcctatcataaatccacctaaacgtcatattttctaacgtctttccaaattcctctaatcaattctctgactttgctggctctcccagcaatttgattatatctctattattacacctttataaatctcacgctgcatttagtgtttacctgtttccttcactaaatcaagaacttcttgtaggtaaaggacttacgtattaacctcttaggctattaaaatcaaaataacttaaggagtaatttcttaaattcataatccacatctctagtcatttaggatagctattataaaaaacaaatgggatttttttttcaagaaagttgaaatattgaccattctgatatactcgaggagagtttctacagttccattaaatatgtaacacttttttcctgctctagattaatcagattcaggggtttaggagccttacttaaaaggagtattttactctggtcgttagaaataaagtaatggccaaatatgacgcaggcaacgtttcaaaaagcattactgataggataagatttaaaaaataaaaattcaaagcagttgtaaatttttacggaaacgattcttaagaccgacaccacacaaaaatcgacctaaatgttctgcaggaaggcacatcaattacacgctttcgtgtcttcataaaaatccattagaaaaaccttaaacagcgcactcaaggagaaatatataaaaacaggctgtggacattaaaggaaaaaaaaccaccacaacatttgggccacagcaggcaggtatcccagttcctcataccacgtgcacactatgtctctaaagaacttcaaaccctgcccctgcccccaaacaaccgtccaaaccacgccaggtacacacaccactgtcaccgcttactgacaaagcgccactacaggaggggcggagaagtctatgggaaaaccaagcaaggaaaaggccgccacgaagacagtagtggagagacaggggagcaaagaagaaccagagctgtcagcgctaaggggaccaggctgaggggacccgcacggacctttctgaacaacacgcaactgcaatgcaccatggctgcaacaggccaggaaaccttcttgcggaagcggcacaagccgcagtacagcgcggcctttttacgtcatcccctgccgccgacgcgatttctcctccgcccacacctgcggactggcgcatgcgttgtgtgatgctctcgggcgccaccagccccatgcgctgtgctttgcaccccacgggtggggagagaaggcgttttatctattaaaacacagagataatctcgagaagccgtgggacaaaggacagtagggcgtaggttgcgtgtctcaggaattaacattttgaatggaatggaactgaagactcagcagccttggagcagcttttatgctaattgaggaaactaagaatcttcaccctcagcgtgaaaaaacctccaacggaccataaaaccaaacgtgtaaaagacacagaaactcaactgggaaaaaagaacccccaaaagccgttagttcagtgacgagctgagtagtctccagccaaagcttccaggagaccatgaatttaaaactagcggccgcacaaagttttattgaaaataatgtcaggatctgagatctgtaagaggactctcctgtgcagtaagagaaagaagcttgtttacaactgtcagaaagtagcttcttggagtcgggaagacgggtttttatccgtcatttgaagcgtgcctttgtgagaattaagacacgatgtgaaaaatccctctctctcttgattacttttcaggaccagaagagagtagctctccccaacccctcatgcagcgaaaaaatgtatgcagctgaagtaaacggccctgcacagcgttgccagccgtataactcttaacaacccaaactaataaatcctagaaacctttcatactttgatacgatatggctctgtgtcgccacccaaatctcatcttcatttgtaatccccattgtggaagtagggaagtgattggatcatgcagggctgtttctctcctgccgctctcctgatagggagttcccacaagagctgacggttttataagtgtttggaagttcctccttctttcttctctctcctgcttgccatgtgaagaaggtgcttgtttccgcttccccttttgccatgattataagttttctaaggcctccccagccatgtagaactgtgaatcaattaagcctctttcctttataaattacccagtctgcgcagttctttatggcactgtgaaaactgactaatacctcaatgtgacagtgtcttctactcctcacttaggacagtgattatttggaaagacatgatgtgaaaaccccgtcttgattactttgctgctactggaccttctgcttacaaccaccaatcagaaaagctgtagttgtcatttaacctgcagtagttgtattttccctctgtggattactttaatgttgaatattaacaccagcaacagatgttgattactatcagtgttcctacctctcattaatatgaacattaggttgttgctgtgtagatgtttttaatttaatgacatttgctgccattaagattactatcttactaggttttcctattgtgtcagaatagtgttgagcccaatgtacttattttccaatgcctatttcttgttagtgaacacaatctcaaatacttttctttcacataacatatacatggggaaatgatcacagcaactaaaaaaaaaaaaatgggagattgatatagaaatatctcaaaatgatgaggatcattgtgtactgtaaacaaaaaagaaagcataatatttacctctgacaaaatgtggtcagggcctgaagtatttattataactctcattaccagatagtaaaagaaacattgtgtaactggaaactgtcccctttaaaatgtgcagctaaaatgaacatgaggcaaaatgtttaggacactattcagacctaaggcagaagtcattgttggaaaatactactacttctgccatgaagaggaaagaatgcctccttagggttgctcagtttgatgtatgggcaaaccattaaagtcagtggcactaaagagtcttgaataaagtcccaaataagccatcgaca

SEQ ID NO: 586531 - DNA, 4001 bp, Homo sapiens
tcgtaccacacccagccgacaaaatgccgcagacgccagtcctggctgatgtcattgaagctggagggaactggcatgtccacggtggggcctgactgtggagagaagagccgggctcagctcctaggcccccaaaagggtccaggaccagtgtgctgcacggctgtgcccccaggcctagcacaagccctgacacatagcggggattcttggcagaaaggacagataacttgctgatgacaggtcaactgccagggcgatctgtgcacctgggccagtggggccaggagttcctcctcagagtggatggggcacaatatctcctgagacaggagcaagcccagggccacatcccagccagaggcaagaaggttcagacctgtgactaagaggcagatggccactgcctgtcacagggaggaaggctggttggaggaatggggggagctttgcttaggacactgtgagtggggtgcacactggcacccagccccctcctctttccctcctgtactgaatgctgcaaagtcagaataagaggatgtagaccaggcaaaagccgcccagacctcacccagttccacttctctgcagatcacatccaagtcaggaggggaacaggggtggcgtcctgggcctgatgtcatgtcctgtcctctatgtgaaccttgaaaaccaagggacttcctgcctcggcagagctgacctcaggacatctaaactgtcaccttctcccgatccccgggcccagctctgtgcagtgcatgccgctgtggccagagtgtgtgggtggctcatgccagtaatcagcgctttgggaggtcaacgtgggaggatggcttgaggccaggagttcgagaccaccctgggtaaatagtgacaccctgtatcttttttttttttttaagtttttttgccttttttttttttttggagacgtagtctcactatgtcgcccaagttggagtgcagtggcatcctgatctcagctcactgcaacctctactcccgggttcaagcaattctcctgactcagcctcccaagtagctgggattacaggcatgaaccaccacacttggctaatttttatatttttagtagagatgaggtttcaccctgttatgttggccagcctggtctcaaactcctggcctcaggcgattcgcccgcctccacctcccaaagtgctgggattacaggtgtgagccaccgagcccagataattttttttttttcaattagccaggcgtgttggcaccccctaaattgcaaggctggggcgggagaatcgcttgagctcagaagttaggctggcgccactccgccccagcctgggaaacaggtgcaaacccagtctcaaaaaaatttttaaaaattaaaaataaatattgaaaggaaggatactgcacagactcagcctttacctcgggaaagggctcggcaagagccttttctcctcctgcctaatccgccccggccctccagggtgctcctgttcccccgtcccccaagccggcgcccccaagcccgttgacctttaacctcctgcgggccccagctcggagacgcccaggggaagaagtctgcggggggcccgggctcccctactcccaccgccgggctttcgggcgcctcccggccctgccccgagatcgcacctcccacagcggccgccggtaccactgctcctcgaagccccggcgtcggttgtcagagaagtcggcgcggaagctccagaggccgtccagctccttgcactcccgcgacgggctctcctgggggtacagcatcccgccctgcagccccagcgcgcagccccacaacaacggcccgagcgccgcccaggcaaccgccgacccccgggccatgcttcccggtcccccgctcggccaccgtctgcggcgctaagaaaagcgcgggaggtgcccgtagggcgggtcgcgtgacgcgccggtgtcgtgatgcgcctgaagccatccgcgccatcttggttgaggacgagtgccaggcctggaggggcggggccgggcgctgcccggtagggcttgtggctggaaccccaggctaggcctttggggaaacgggaccctcaccctcagccccagccgataagggcgaggtctgctccccaccccgacccaggctggacgatccagggccgcaggccagaacagaacccctgagatcggtgggatccccctgtttcttcaaggagcacctccacttgcttttcccagcaggaattcaaggaggccccagcggcgcctcttccatgcctgtctgatgcagcctcttgcagggatgcacgtccttgggatgcggccatagccttgaccctgggcttctggagccctgaccttaacccaggggccaagagctccctcttggtgttgcaggcacataaagatgcagggagagaggccaggtgcactttgggaacccgaggggggcagatcacttgaggccaggagttcgagaccagcctggccaacgatagtgaaaccccgtccctattttgtaaacatacaaaaaaaaaaaaaagaattagcggggcgtgatggtgcgtgcctgtaatcccagctactcaggaagctgaggtaggagaatcgcttgaacccgggaggcaaaggctgcagtaagccgagatcgcaccactgcactccagcctgggcaacagagcgagactctgtctcaaaaaaaaaaaaaaaattgcagggaaagggtgccctgcgggaccccagtttactccagtagggaaggcaccgtgtgggagaggtagaggaggagatctggagacagcaaaggagacatagatttatggaggggactttcatacagggacggtgcagtggccattgctggacatgagaaccactaccatttgtaaaaagcatgcagcttacataacattttcaactagcatcctcgacctgttactggtggagttccgggtggtgaatccctacacatcagcaacaacctcaattcttgcctcctcagaagaaagaattgcactgaggggcataaggcagaaagccagagggaggtaagctgcagagcagtagtaaaagcttgttaaaaagcaggccagtgctgagcgtagtggctcacacctgtaatcccagcactttgggaggcggaggtggggggatcacgaggtcaggggtttgagaccagcctggccaatatgatgaaaccccatctctactaaaaaattagctgggcatggtggcatgcgcccgtagtcccagctactcgggaggctgaggcaggagaatcgattgaacgcgggaggcagaggttgcagtcagccgagatcgcaccacagcactacagcctggcgagagagcaagactcagtctaaaaaaaaaagcaggccaggcacagaggttcaggcctgtaactccaaactccagcactttgggaggccaaggcgggaggatcacttgatatcaggagtttgagaccaacctggccaacgtggagaaaccccatctctactaaaaatacaaaaattagccaggcgtggtggcaggcacctgtaatccctactatttgggaggctgaggcaggagaaatgctttaacccaggaggcagaggttgcagtgagctgagatcacgccaccgcactccagcctgggctacagagtgagatgccatttcaggaaaaaaaaaaatattaaaaaactttagaacaggaaggaaagaaggaaagtacaacttggaagagggccaagtgggtgatctaagaaaccaagtgccttggccaggtgcggtggctcacgcctgtcatcccagcactttgggaggctgaagcaggcagatcacctgaggttgggagttcgagaccagcctgaccaatatggagaaaccgcatctccatatttagctgggcatggtggcacatgtctgtaatcccagctactcgggaaggctgaggtgagagaatcgcctgaaccagagattgcagtgagccgagatcacgccattgtactccag

SEQ ID NO: 586532 - DNA, 4001 bp, Homo sapiens
tgcaaactggatactaagacactttcatgtcagttttaacagacatctgcttacttcctctcaggtttaaaatctatcaagaacgacaactcaatgtctcctgcatttttagcttatgttaatacttatgtatttttagctactggtaagtggatataaaacatatagcgtatcactagagattgaaaaatatctgaaaaactagaattggccgtgcgcggtggctcacgcctgtaatcccagcactttgtcaggccgaggggggcggatcacaaggtcaagagatcgagaccatcctggccaacatggtgaaacccaatctctactaaaaatacaaaaaattagcagggcgtggtggcgcacgcctgtagctattcgggaggctgaggcaggagcatcgcttgaacccgggaggcggaggttgcagtgagtgaagatcgcccattgcactccagcctggcaacagagtgagactccgtctcaaaaaaaaaaaccacaaaaaaccacaaaaaacaaacaacaaaaaaccaaaaaaaaaaaaaaccacaaaaaactagaatcatgaaaatcatctgtttgagcaaatccttttacagattagatgtaagctgtacctcagtttgataaagtactataaagtactttacaataacaataaactatacgtgagacgttggaagcaattatccctaaagtctattccagctctaagatttgggttttttacaataacaataaactatacgttagacgttggaagcaattatccctaaagtctattccagctctaagatttgggtattttacaataaccaaacattgtcctctcgactggccaatctgtttacagttaggtgttatgtctattcaataccatatctgtcacatcaagcacaagacaaatcatctaatactatctgcagtatgataaatgacagcttggtgctaacttttaagcaggtagctcccgttgaagtaacctttcaacagaatgcttaaagcacgaataccggcaaaaataagattccataacagtcttattatttttacacaatctttgatgcaactcagagcgtatcctttagcaccttctcttttcccctcaactttaaaatggggctgaagttctattcactttcatttttttaaagccacactcttcttatctagatctgaatttcagaatgaaaagatgaatactttaagactgaaaatccatagcaagggcaaaggaaagtactgttgtataatgaaaaccgcaaactgcaaggggctcagaagataacgggcgttcatttctaacctgtgcaatcacctagaacaaatcgtgtggttctggtctataaaaccattctttgtcgctcaaaagaccacaaatacaagcaccctttcgcagaaaccctcaaactgactgccagggagattacgtaaccaaacatcgccaaagacttatctaacttgtacagcggcagcctgtttgacctcattcatacagagaagcgatcacattaagatccagcacttgtttctacatttccaagccggattctgccgtcctcctccttctaagacgggcggtgcagcgtcacaagcgtcgggacagatctatccggctcggaacagacttcgcgctctacccggccaggcccagctctcacccggggacccgtgtcgggctccgcagctgggacatggcgccccccggcgggcggcgaggggctcggccggacgaagcccagacacccgcaaactcccgactccacaggtagcggcgccgacgccagggcctccgcgctctgctctcccaggccccgtgcccccggcccacccggccgcccttaccatgttctcggcgccgactccgcctccgctcggccgcgcgccctcccgctgccgacccgcgccgccgccgccgctctcgcagcaccgaccgccgccgccggagccggacaataccccgtgcccgcctcgcgctgctgtggccaatgcccgcttgtcttgctggttcgaaccccagcggctgttcaatcgcgcgcctccttctagccagaccccgcccccccggcaccgccttcctaacggctgtttgtttttgcacacggcacgcggaggcggggcctccagccccaatagtgacgcgctctctgcctttcaccaggcgcccaagcctgacgaacagaaaggcaaaccaatgagattggacgcctcgcagacgaaagccaataaaaatatcgcccgcgagcaagggaggcgggccactgggaaggacagcaaaattagctaataaggtgaagcgattgcaggcgctgtggctttcccgcccattcgcggcgttggttttcccgcttctgagacttgtttggggaggtaaagagtgttggacgtgcttctcctggtgggttttcacagactgtgaggatttattcgtcttagaacgtgtggatcaggagggcgctgggtttcaaggttaggcaggcctcatgctcagccgtattctggcggactgactaccctgacgtcctctcagcgcggaccctgacaaggtccgcggcaggctgaggcgggagaatcgcttgaaccccggaggcggaggttgcagtgagccgagatcgcgccactgcactccagctgggcgacgcatcgtctcaaaacaaacaaacaaaaacaaaagctatcaattggctacatattgttatttgtatgacaaattctttttccttttttagagatggagtcctgggactacaggcgcgcgccccaatgcccagctaacttttgtatttttaatagagacggggtttctccgtgttggtcaggctggtctcgaactcctgacctcaggtgatctgcccccctttgcctcccaaagtactgggattacaggcgtgagccaccgcgcccggcatgtattacaaattctaagaacacgaagataatggggccggcttggtggcgcgaacctgtagcctcacctactgtcaagactgagacaggaggatctcttgagcccaggaggtcgaggctgcagtgagtcatgatcgcaccactgcactccagcttgggagacagaatataccctgtctaaaaaataataataaaaaaaaaggtaatggatgaggccgatagtcaggaatgaaatgactttaaacaattgggtatgcatgggattgggtatgtgtgtatgtgggggcagagggtgggcataaccgaagtcccatactcatgtccctctaggcctaatacattttgcagacctcacagagctcagactgttgtgagccgtttttcttttctcaacctcttcagtgtgtttattttgcttacatcattaggttaaaatttggaggataactcccagctagaaaggaagaaaagctctaaagtggaatcgccttcccccggaagctgttgtaaaaattaaaggatgtatgtgagtgcacaggctctccagcgatcgtttttcttccacagtgttaacacaatttatttatttatttactttttgagatgaagtctcactctgttgcccaggctggatggagtgcagtggtgtgatctgggctcactgcaacctccgcctcctgagttcaagcgattctcctgcctcagcctcctgggtagctgggactaaaggctcccaccaccattccccgctagtttttgtatttttagtagaaatagggtttcaccatgttggccaggctggtcttgaactcctgacctcaagtgatcctctcgcctcagcctcctaaagtgctgggattacaggcgtgagccaccgcgcctggcctgtttccacaattaaaaaaggcccatcaccctatcatgatcatctctattacagtctggacaatatgagctttctgggagagccagcttcatttcataactgaagaaatgggcttaggtgaacttagtcatttgcctgagaccgcatagcctgtagataaccaagataccagctcacatttgttccaactcattccagctttaaattcttt

SEQ ID NO: 586533 - DNA, 4001 bp, Homo sapiens
tatatatacatgtatatgttatatattttatacatatacatatgtatatagtgaagaaaacaactcttacagtgacagtatcatgtttgacgtctgagaggtatgccctgtgaagcacacaggatagcggagacatgtaggtgggcaatcctgggagaaggtacccttttaactagggtatgtagttaggagtttgagaagttaagaaagaggaagggttttcgagacagaaaagataagtaggtttacaaaactaagatgaaactagaaagtgaaatcaaaacttcattctataatttatcagtagagaaagcacaaacaatattttgctttaaagtggttaaacggctcctcaaaagtataacataacccaaaaactttagggagtggatttaattctcaatataattcaaatttccttgaaattttgtcaactactgtctaccttgcaagaactgagtttaaccaaggcaactgaacagatgaccgactctaccacactcatttgcaagataaaggaaaatagcaaaaaaaaaccaaaagtacaagacatacattgcagatttagatcactgttaaatgaccagaaaagtatttccaatgttaaaattattctaattctcaaaaagtacctttaatttcaaaaccactattaggagtgcttacggctattcagagggaagtattaataaagctaaagcctccatccgagctgttagtaggactccatcgcttcccagtatgtataactccttttctaagcctcctctcgtcctggcatcagtggcaccatgagccaaaaacaaaacaaacagaaaacttgagtattacctcgctgtcagtgctccttctaaaaacgactgtagctgaaaactccctaagaatgaactcgagtgtagagtgcacagcggagagtgaaacaccctagacagcacgcagcatttaaagctacaaaaacctggctgtccacttcgcctggtttgttttgttttgtttcaatcggcctgcggtggcagcataggttgaaaggcggagactggaatcgcctgccaagcctcctctttgggtcacacagagcggtgcctcccggttcacgccaagtccatcccccaccctctttcgccattcatcgcgttcccctcccttccccccatcatgtgaccgcagcccggactccgggcttgtttttcccctcggctcagccccagcgcgcaggcgcctgggagcccattcattcgaactgcgtaacaatgagccccggggcccagcggctccgcgagctcctcagctcagccagaatccccctcagtccagaaggaggcggcgcctcactggggtcccccacctccggccagccccccacccctggccaagctccgaccctccgcccacaaacggggagttgaagtcaaactttcctgggcagccccggcgctgcgtcggccccttcccccgccctggcccgccccatctccacacccggcccggccacccaccgcgcgacctggcccggaacttcgccctccccctgcctcctcccggcccccgcccgagaccccctagcgccgccgccccgaagcccaggtgagctcgcgggagacgctgctccggtgggctcgccgcgggcaccaatcgaacggttaactgcccccaccccaagggcaaccctccgagaagaaggaacgaggacccgagccctccagtctgcccaatcccccgcgctcctgcccctcccttccccacccccacctcttccctaactgaaagacaacaaacctgccgcgaagtgccggcagcccaggcgcgggccgctccggccacgacaacaccaccagcagctctcgtaccccctctccgaccgacgtcggcctcccccgcgcgggttactgctcccgcggcagctcttactcctcaaccgaaactttcctacttaccaaacccgtcgccattaccaagtctttcaagcttcgtcttccccctcccctcaaccccctgggggttgagccccgcccagctctttcgccctcttattggactgcagaactgccattcggttcttcccctttcccattgggtggtaccgtggtccgtctcggggggcgggcatgtattgacttttgtgttgtgtttactggagaagatggcatgtcaatcacaagagtaagtgcttcggattggactattgccgagagtccggggacccaagccaaactttgtccccgaaatggattgtgggttcgtagtctcaagccttggtccttggctgtgggagactgctggccggggaagagctggactacgtatcccagaggcgctcgcacagcgcagtcttgatagtaaacaagagtcatagggacacgtgtatcagctcgtttgttttggtgtctgggacaaaagggagggggcggaggaagggagtgttttaaagcttgggcctcttcttttcctccgggcctctgctaacacttagagcggcccaagcctcttgcagcacccaatccgggccataaacagccagagttgctcgctgctcaagagtttggcaggaggccagggtattgttttagtgcgaggggaaggagatgactgcaccagcggaagtactgcaggctagcgagggacttgatcacccacaaatcacggccccaggcacgaaggggtcgaaagtgatgctgggggctgcactggcagtgggaagaactagaagtcctttctcttgtgccttgcctcaccactcccaggacagcaacttgagattgccttgtcagctctgttcagttcacctaagtttgttgagccgccacctaagtgccaggaagagtgaggctgggggatggactgtgagcaagcgagaagctggagtctagagaatttacaaagcgggggcgggggcgggcgattacgaaattgaggcaagttaaagcggcattttccatactgattagtatgctcgttggttaacgtaatacaaagggtgtaatgtatgacgtaaactgatttaatttgtgaatcattatcagtaagtttctctggtgagttttattaaccctcttttccttctagacgttttctcattgatgaaagaaactgtctttccacttcatttccactaggagttcctcaagttacgaattctctgactcaccagagacgcttccctgctttatagttaacttctctttaaacatggctgtccattcacagtcggctgcatctagtcaataattggtgtctttaccattcacattacaaaggcatgattaagctttttcccccctttgaacctttagtgtttaatcatttaaattgtgctttagattttctaactttagatcactaaatatatgcttagaattaagatgaggaaaacctacattagtaagaaatctgtaaaagcaaacctttggacagagccagaaatcacacagctagttatttctttaaaacctcctgcatttcttggatttttaaatatacctgaaagccgcgtaacaaatcaagaaatccaaaataagcccccacatgttgaaatcgagtttaaaattcttgagaattccccatttgaatccgtgaagtgaaattataaagtagtcctcccgtgtaatcaaatacttactttctatgttcacaaatagtaataaagcattctattttttattaaaataattcagaggagagccaacagaatgcttaattttttccctgaggaaaaaggacaggatttgaatttatcatctttcagaaattattagtgactcaaagaaatgaatgtctctgctactttgtgtatgctttttttttttttttttttttttacaatggagggtcatcgtgtactagaatagaaaatataaactctactccaacatgtaatttcttgacaaaaaagaaaaatctgtgaagttcacctaattatttaaaattgttttgagatatttatgtctaactcctcctagaaaactaaaaaacttttctcttaaaaaaaaaaaaaaaaaagagct

SEQ ID NO: 586534 - DNA, 4001 bp, Homo sapiens
tatacatgtatatgttatatattttatatatatacatgtatgttatatattttatatatatacatgtatatgttatatattttatacatatacatatgtatatagtgaagaaaacaactcttacagtgacagtatcatgtttgacgtctgagaggtatgccctgtgaagcacacaggatagcggagacatgtaggtgggcaatcctgggagaaggtacccttttaactagggtatgtagttaggagtttgagaagttaagaaagaggaagggttttcgagacagaaaagataagtaggtttacaaaactaagatgaaactagaaagtgaaatcaaaacttcattctataatttatcagtagagaaagcacaaacaatattttgctttaaagtggttaaacggctcctcaaaagtataacataacccaaaaactttagggagtggatttaattctcaatataattcaaatttccttgaaattttgtcaactactgtctaccttgcaagaactgagtttaaccaaggcaactgaacagatgaccgactctaccacactcatttgcaagataaaggaaaatagcaaaaaaaaaccaaaagtacaagacatacattgcagatttagatcactgttaaatgaccagaaaagtatttccaatgttaaaattattctaattctcaaaaagtacctttaatttcaaaaccactattaggagtgcttacggctattcagagggaagtattaataaagctaaagcctccatccgagctgttagtaggactccatcgcttcccagtatgtataactccttttctaagcctcctctcgtcctggcatcagtggcaccatgagccaaaaacaaaacaaacagaaaacttgagtattacctcgctgtcagtgctccttctaaaaacgactgtagctgaaaactccctaagaatgaactcgagtgtagagtgcacagcggagagtgaaacaccctagacagcacgcagcatttaaagctacaaaaacctggctgtccacttcgcctggtttgttttgttttgtttcaatcggcctgcggtggcagcataggttgaaaggcggagactggaatcgcctgccaagcctcctctttgggtcacacagagcggtgcctcccggttcacgccaagtccatcccccaccctctttcgccattcatcgcgttcccctcccttccccccatcatgtgaccgcagcccggactccgggcttgtttttcccctcggctcagccccagcgcgcaggcgcctgggagcccattcattcgaactgcgtaacaatgagccccggggcccagcggctccgcgagctcctcagctcagccagaatccccctcagtccagaaggaggcggcgcctcactggggtcccccacctccggccagccccccacccctggccaagctccgaccctccgcccacaaacggggagttgaagtcaaactttcctgggcagccccggcgctgcgtcggccccttcccccgccctggcccgccccatctccacacccggcccggccacccaccgcgcgacctggcccggaacttcgccctccccctgcctcctcccggcccccgcccgagaccccctagcgccgccgccccgaagcccaggtgagctcgcgggagacgctgctccggtgggctcgccgcgggcaccaatcgaacggttaactgcccccaccccaagggcaaccctccgagaagaaggaacgaggacccgagccctccagtctgcccaatcccccgcgctcctgcccctcccttccccacccccacctcttccctaactgaaagacaacaaacctgccgcgaagtgccggcagcccaggcgcgggccgctccggccacgacaacaccaccagcagctctcgtaccccctctccgaccgacgtcggcctcccccgcgcgggttactgctcccgcggcagctcttactcctcaaccgaaactttcctacttaccaaacccgtcgccattaccaagtctttcaagcttcgtcttccccctcccctcaaccccctgggggttgagccccgcccagctctttcgccctcttattggactgcagaactgccattcggttcttcccctttcccattgggtggtaccgtggtccgtctcggggggcgggcatgtattgacttttgtgttgtgtttactggagaagatggcatgtcaatcacaagagtaagtgcttcggattggactattgccgagagtccggggacccaagccaaactttgtccccgaaatggattgtgggttcgtagtctcaagccttggtccttggctgtgggagactgctggccggggaagagctggactacgtatcccagaggcgctcgcacagcgcagtcttgatagtaaacaagagtcatagggacacgtgtatcagctcgtttgttttggtgtctgggacaaaagggagggggcggaggaagggagtgttttaaagcttgggcctcttcttttcctccgggcctctgctaacacttagagcggcccaagcctcttgcagcacccaatccgggccataaacagccagagttgctcgctgctcaagagtttggcaggaggccagggtattgttttagtgcgaggggaaggagatgactgcaccagcggaagtactgcaggctagcgagggacttgatcacccacaaatcacggccccaggcacgaaggggtcgaaagtgatgctgggggctgcactggcagtgggaagaactagaagtcctttctcttgtgccttgcctcaccactcccaggacagcaacttgagattgccttgtcagctctgttcagttcacctaagtttgttgagccgccacctaagtgccaggaagagtgaggctgggggatggactgtgagcaagcgagaagctggagtctagagaatttacaaagcgggggcgggggcgggcgattacgaaattgaggcaagttaaagcggcattttccatactgattagtatgctcgttggttaacgtaatacaaagggtgtaatgtatgacgtaaactgatttaatttgtgaatcattatcagtaagtttctctggtgagttttattaaccctcttttccttctagacgttttctcattgatgaaagaaactgtctttccacttcatttccactaggagttcctcaagttacgaattctctgactcaccagagacgcttccctgctttatagttaacttctctttaaacatggctgtccattcacagtcggctgcatctagtcaataattggtgtctttaccattcacattacaaaggcatgattaagctttttcccccctttgaacctttagtgtttaatcatttaaattgtgctttagattttctaactttagatcactaaatatatgcttagaattaagatgaggaaaacctacattagtaagaaatctgtaaaagcaaacctttggacagagccagaaatcacacagctagttatttctttaaaacctcctgcatttcttggatttttaaatatacctgaaagccgcgtaacaaatcaagaaatccaaaataagcccccacatgttgaaatcgagtttaaaattcttgagaattccccatttgaatccgtgaagtgaaattataaagtagtcctcccgtgtaatcaaatacttactttctatgttcacaaatagtaataaagcattctattttttattaaaataattcagaggagagccaacagaatgcttaattttttccctgaggaaaaaggacaggatttgaatttatcatctttcagaaattattagtgactcaaagaaatgaatgtctctgctactttgtgtatgctttttttttttttttttttttttacaatggagggtcatcgtgtactagaatagaaaatataaactctactccaacatgtaatttcttgacaaaaaagaaaaatctgtgaagttcacctaattatttaaaattgttttgagatatttatgtctaac

SEQ ID NO: 586535 - DNA, 4001 bp, Homo sapiens
aaatgctgctcttcttcaaatgtgccccattcaaacaaaatggatgagaataaattacaagcaagttttacaactgactaaattatgttgttttggaaatataatattcttattagccattttaaacataaatggtttccagaaggaacatcagtaatttgatgtttggggaattaaattggtccaaactggaacagtggtttaaaaggataaggaagactaattatctgtggtaaaaggcaaatatattaaacaacaaattttcagtcacaataatttccataataaaaatcaaaagtacgaaaaagaaggtcaaaagatatcttttaaacatgattgctgatttcttaaatgcaacttattctgtgctgtttttaattacaggattagaaagatttctggggcatcagaaaacatccaggccttttcaaatgtcataaggttttcttttgggagattttcaatgtttttttcctttaatatgggttttctatgtacgtactccctttttccagatttcgacagtgcctgcaagatttgaaaacatgacagtgctctgaatacttgtaattcctaaatcttactccttatgagaaatctcagcacagcaagagtatttagttgtatatgcattgttataccatttggggagaaaaaaattaactcttcgctttcttttctggtagaagttaaactttttaagcctttcttacccctttcccatattttacacacacacatacacaccccacatacatgaaataatgaatatatgtagatatctcatttcttataggatttcaaaatgctacagttacttaaagctgaaagttccttttaggagattacacacacctccctggaagaaaaaacaattgacagatcttcctgaaattggagcacaggagactcactagagaattctccaagtccacatcacaggaactgcatcctcagctctccgttgcaggccacctctcctgacaaccgcgcctcggatctggagagagctcagtcccgctctgtcacatcacagacacacaggcctgacaccagcacctctcattgcggacaaggggataacggcttcaaagccaaacaaacgcagcctgctaggcgctcagggaacgcccccgtcctccgttccctctagtccccactgtgacaccctcgtatggcatctaattaaccagtttaccttaataagcttacgattcatcactctccttccactagtcaaggaactgctttatctcccatcccatcccccagcctcctgaacttttcttaaaacccaggattctgatgtattgacttaaaactgaagtcctccacgaaacatcaaaggtaccccccaataagcgttgctcccctcaagcaacacgttgccagtacaaacttttcattcatagctcggctccaacataaactgggtgtgtttgggggcgggagagaatcacgccaccgaccgctcgcctcagtttgcctagccaaatgtcagggtctgcatgccacaaagatgacctagcacccaacttctgacgaaggttcccttaaacccaccggtctccgggctgcgagatgcaaggcaagtggcatcagagtccggactgagatgctgttaacctgcggaacccgagaagggaataccgcggcgcatcctgaggaccggtggcccccaattcccagggctttcctcaagcaccagccggggactctgccgtggtgccactcacctccgcccgctcctgctgaggctatcgcgccctccttcgctccgcgctggcgacctcttaacttctcccccttctccaaacagccatctttcgaggaggagaagagaatggtgaggcagaagcaaaaagggaatgaaagttgactcgggggccgccgctgctcctccagccgagatttaccggccgcggcgggcgctagaggaggagaccgcggcgaaagcggcgagagcggcgggcgcggcgcggccggctcggtgcgcgctgcgcgatgtgcgggacgcgccgccgccgccgccgccgccgccgccgcgcggggggggctcgggagggcggcagcgggcggctgcgagctgcgagctgagcgggcggcggcgcgcggagaatttgctaaaaatagcacttcttggggagggaagtaggggacggaggtgggaggagaggctcggccgggagccccagcgccgcggaggctgggcggggctgggtggggataggaggaaggacccgcggcgagagcgcgggcccaggcgctggagacccgcagggcgggccgggaggcgcgggccggaggggattacggacgcgggaacacctgggcgcgcggccgacgcgctgggaaggacgcgcgggaggcgggagggcagcgaggacatcccggggtggagcggaaaagggctctgggctgcaccagcgttttttttcccccccaggggaaggaccagggaacctaagacgacttgggatttctgaagcgagacatgcccacgcgaggcgcggggtgatggtcaggcggcggccgtgacagagaacggtgctggggagaagccaggccgctgcctcgccctctcgcgccccccgtggctcggggagccccggccgctcaggtgcgcgccacgcagcgccagcccgccccagctgaacgacttcttttaaagaggaggtagcattgtggggcggtacctggaacgtccccacagatgcgtggagcttgaagaatcattcaagggaattttaagagaaaaaaatgctacatttggggtttgtcaaatgggaaacgtgagggaatatggtgactgctgttggaaacatgacttaggtatgccgcgttttaaggctgaacagagaggaccattcgctctgaaaccaaccctgaaagaaggcaagcagagttagaagggccgagaattaacgaggtgatctccttcagtggttagtattcttaccttggggattttttttctgctataaatgaagtctatactagcatcactagtagctgtagattcctttatgaagtgtacaacaataaaatatttttttaagtgtaatcctaaacatacttggctaaagctaacagttgatcactcaaagaggctaatatttatggtgtatgtaatttgaccatcaaacgaattaaagctggtgtctctgctttcatatttatggttttcctctacgtcagctaaaacacagctaagcttatagattaattatatggatggaaagatcaagaaagacctaacccagtaccctcatttttagaggagagaactcggatccatgggagtagtgtgatttgcccaaggtctcacagtggcagagttaagattaaaatttaggattagggcctaggcccggtagctcaagcctataaccccagtactttgggaagccgaggctggaggattgcttgagcccaggaattcgagaccacgctgggcaacaaagtgaaacccccatttcaaacaaacaaacaaaaacctcaggaataaagccagactaccaatttcataacagcaagataactcgagaaaaggagtggtatggtagctgtacttttaaaatagttcagcattcttaggaggataaaagtgtatgatggctagatttatccctcactttgctctaatcaggaattcacgctgcaggagtggtcagctagctttaaataaaaatttaaaaataaaaaataataaagatactccaaaggctgttggtgctagagcttctgcttaactttctatccacactgaggattctgttcgttagcatgacgaatcgtagtaatgggttctcatttcatggatgaaattgatgatattgactcaagtagagatatttctgatttgtatatatgccagatataactatctagtgacctttcaccctttacctttcaaaatggagttaagaaatggtcaagtgtccagcctttaagtttttggagggttttttttgtttgtttgttttggttttggtttttgt

SEQ ID NO: 586536 - DNA, 4001 bp, Homo sapiens
gttattttcaaagggttcatccatattttaaaaaataaaatgctaagttaaatgaccagtcccattagagacatacctgttaaaccctcccggagcccttgtcagctttgcagctataagaataaactgtactgaaattctggtaggtttgcttttgttaagcaggcactattcattaacataattcctgtcacttaagtgtataaataccaaattatgcaaaattgatattttattctgattccatgaaaagattgggtcaacagaaggatcttaaaattaacataactaaccaaggtttaaagaaaactagctttaaacatagatccccatatgggaaggtgtattaacaccaaaacagacatcatgccaacctgtggaatatttctttcacacctagctctacaaagtaaacactgctttatgtggcattcttatcatggaaatctaggcggtgatctataattacgattaagcccacatgggaagtgggatctaagtgagaactttaagccaattttaggttgaaacattcagaagaggacagaaacaaagagttcccaaagctttaggaaatagccataggaaataaatatgaaaggcaataattacacgttaagtgatactgcctggagagtatgttcatttagtaagtataaattgacaaggctgacaagctcaatctcccaccagctcatctccttgagaaactagaaattagaatctgttcctattatcctttaaaacgctgcacctgcttttaacacatttacatgtgtgttatgccatcacatctgcctgacaatgctagacttcccacatgtttttgaagaaaattaaaataagcatctgctaataacaattttatttcatcctaaacagtttcatttggggctgatgagaaaaagccacataatggaaaaaagaaaactacctttataactctgtggcaaacacattttagaaggtaggtctataaatagatgtgcttctgtaggcacagagtaaatataaaatcgtcaggctagcggggctgcagtttaaactgaagccccaatatgaacttacctgatttttaaagtcctattagaataggcttacaatcagtacacagctcctttttctagttgcatagtaaaggcaaaacacccccaactacattttacttatctcagtctcatctttcatcagaagcaatagtttgcaatttcattcagaagctgctgtccctaagcagactgaatatgcacagaaacagtaatggaagggatctaagttaaaccctacagacgcaccaagaaaatagcaacatcaacacgaaaaagcagcaatttccttaagagaggtgcttttcttagctgcatttcccaagccagccccctttcaaacctaaaacgtctcagttatgaaagaggatcttacctgagctgatcatactgtgcattctttgctgagccaagagctgctctcgtccagccaccccatctgaggaaaaacaggagtcactctcgtaaattgtctgcagcatattccagtcactcttacttcagctacatgaaacattcatcactgctcagtgcaccggccccaggagctaccctcgctggttctccctcctccctgaggagaagcagcagaggatcaacttcgacaatgatttcctttctgctcaaatgggcatccacttttaaaaagacctggacacttttcccatgttaccaacctgtgtgcaaagcagaaaggacagagtggatgctatagctctctggagtttaggttatcccggaaactacaagcaggtgggaaataggaacgtgcttcggggttatttctttgtcagaatacgtagaaaattattaagtctacccacgagaaaaagaaaccaattaaacctggcttagagttcttcaggctgctagggttttgttgcaaaaaccctcagtcctgcaagtggctccagccggtgcccttctcctatctgtgtctgtgcctctcttccccctttctcagtctctctcagctcaagttggctaaagcgagtgataatccatttgcatatgaatcaacaacagcatggcccacaggcacagaaatagaacaatggtcggcctgagccaaaaataggtcaagcatggccgagtgattggagcctgcattaatgcatttaaaaataccccagcaaacccagctgtccagcctctatctttccaaccataattctctatcgcagggccttaaaaccaattaactctttcctctctcgaagcttgctttacacactgtgtttccatactggcgattcgcttccaaagaaaggaaggcaagaaaaaaaattaagaatcataattctaagagggcaaatgcacatacatttcatttcattttatttttgtagtatgtgtttttggaagagagaggagagaagtacagagctctgtattggttctaaaataatactggaagcttttgctcataatgtggtttctgcctcacccacgcacagcaatcctggtgttctatttttgttgcctgtttctcaggctacactgcagttggctgtagcactagaagcttttctgccttctagtttcaggactaacaggagatttagcagaggtacttttggaaaacaagcacaccccagaataaaatttttatgaaggacaggcttgattttttacttgctatttatgcaagacaattgtccatttcacaaatcctattgtatcttagtaccacctatgaattttatcgcatccatccagttagtactatatctataaacaaaacaaaacacaaaacacaaaaccgtggcttatatgtgaaaatttcccctcagcctctcaggctaaattcaatttacttgcaaaaggaaaagaaagtagtctgatttcttatggatacagaatttctgagcatatgcacctgttgatggataaatcatatatatggttagtacccaactatgactgttctgcattcagctatacattggttgcccgaaatatggacctcctaacttttctgtagaaatagcatttatgatagtcaatagattaccagacacattgtggcgttcagctatacagtacagtagatagtatcagagttttatagtctctggtgctacatttatatcctttctatataagagataaattttacattccaaagagggatcctagcatcttgtcacttccaagagcaaacccaaaagtgataatctactagtcatggaagctcttttctcttttctaaactaaatcagcgaggaaaatgtaattctaaggcatcagaagcaacaggggaaagagaggaaaaagcagattatttcaaaattcccagaacaatccgatggaagagggatcttggtcaactccagagtatgaagtcagagggggcaaacaaggggacacagagttttgatgaaagggaagaaataagcacgttaaatcattcatcaaataggccactgctgaattcctcttctttcacagattaatttctactgaatactctacttcttgaaaaattgtatttggatatgtaagttacaatttttaaaaaatatatattccaaactgcgtttgacttaagctacacaacaaaatcttatgttcctgtcagtggaaaaaacaaaaagcaattatctgattccatctgatattacaaataaacttttgattacaaaatttatgtgtaaaattcaaaggatagaaacagtgtggacctaataattttccttaaggatgatgtactgaagtagtaactatcatcacattttagacctgggaggaaatttagagatagtcaattgtagttttcaaactctgtctcatgacataaggtacctgcgagttgcctaagtttcctcaaaaaaggttctccgtggaaccaggggagctccacttttacctgtttccatttggagatttgagatttcttttgaagaactttttttttttttattctacaaaacatttatgtaaagaacatttttt

SEQ ID NO: 586537 - DNA, 4001 bp, Homo sapiens
gataataaatagtgagagactaggggtactacgggtatcagttgattgagggttgttttccttcttacaatataaaagttaggttaagctggtattcagataatttttttctaatatttttatgttcatcttttagcaaacaaatgaacaatgataagaaagcctaattggcagcctttgcaaattcactaaaaggacactggcatacatttgttcaccatgatatactacactgtgttcaacacctatgctgtaaaattcggttttattatctaactcctttctcagcccacacatctattatcaacgaactcaattaattttctaagtcttaatgcccttatcctaatttatgctgttttaaggataaaatagagcaaaaagactaccctgaaagatttatatcttattccctataccattcctttcccacatacacataaagataattttctcattcttctcttagaagagttgtacatagagattgattcacccattccatctatatttccttaatatctcactatgttaactccttattctgacattttactttagataatttttcaaattactgatacccttggcattgagattttgattaaattgttcatcaaaaatcatcattccttgcccccttgtcaaataatatagctaattaaataatgtcagaataaatgtagatgagctagatagcaattgtggggataaattatttccaattgatattattattaacagaaaaatccacctatttttgccccttatctaagaaaattgtctctacataaaaacataggagaagggaaaaatagtattaaatgcaaagtgttatttgaataacataaaagtacacctgtaatcattttcacaactaaatttattcttctcttggattaaaaaaagtatgcatttatattcaggcagtcttaaattagctatttcacatttcacattttgaatgcagacacatatcccaggaaatttctattggcattcattattcattgaaaaatcacatcaaataagaatattcccaaattcccttcgttaagaataactgaagcatttaaagggtcatacacacattgttaaagcattggaggtcattcctgcttacattctataatgaataattttaatttgggggcaaaaagctctaacacctcaaaaatgtctacatttttcaaatctacaaagaaactgaggagtaattttcttcataaaagaagaaatcattttttaaaaataccaaatgtataaaaacacattgtgcaataacactgtactctttaatcattcatttatctaaaaatagtctcagggatcaattatatgctaggtactgtagggaataaaaatagaagtaaaacatgatccttttcctcttggagcttataatataactaattggggggatgaggacacacatacacagtcacagtgtaagacagaaagtggaaatgttctaaagagagtaataaaaggactatgaggatcgagagagaagggagaaagagaaaaaaaatacacgtaattagggaagtattaatattacagaggtgaggggaaatcagtgatggtgtcagacattaggtaacatttgcattgggcttgtaagagaattttccccagtgatgaccagttggaatagagcattaaggtatctcagaagaaggaaatacctggtaattcttagactaagaaatcaacaacaacaaaaacagataaacaagcagcctcatttaaaaaatacagctttcaaggactcaataaatactgattgaatgagataatcactcgggggaaaaaacaagtcaccactaaccatttttctcaagctacactgtgaatccacaaagcacgttggccaggagtttggctcggtctcagtcttcttgaggctagagaaaatcgtagctgacagtcttcccctggttctcccacctacccattgataaaggcttccccaccccttccacaaggcagaagttaagtggagattaaaatagctccagaacacttcctgctctattctaattgtgctttgacttagaccaattggaatgttgagggaaaaccccatgaggcatcaagcatgtgagataatgtgtcagtccctcaaaaatgtttgtccaacctactctgtgtatccaccattgttccctattcacaaagcataatgtgtgaggaaaaatagctcttagctgtttctccctttttaaaaaatagatgtgtcaccttcatgaaatacttccttatacaactatttttttgtaacaacatgtcacgaatctagccagttgctaacccaacgacgactgtgtatgctatgtatgctaaatattttcttgggaagttatgattctccagccgcctaacaaaggtgtgatttgacccatgatctacctgaattaaatacctggcacgttgtaggtacacagtaaatgcctgtgtgatgaatactgtatttcatactcctttaaaaagtgtgcaatattgtgtttatgagaaaatgttctaagacttctaacttcagctggcgaagatactctgctccccttcttttgggtttctgagaaagagaaactgtttgcttcactgaactactagcaatgactcatactgcttgggtaagaaatgttaagcacaattgacagggcaggtgagatgagggacaagggtgaaccttaggaacaaggaaagggaacaagttctaaaagagccttcacttcaagttaataatatgaatacaagagagaggcacttggttcacgatctctatgaaaaacagagaaaatcatagctaacagcctttctccagttcccttacctacctactgctaaatgcttccccatcctttccacaaagcagaggtaacaatattgaaatagatccagaccattcctaatctattttaactgtgcttctgttctacttgacttagaccaaattaaacgttgaaggaaaatctactttttttagaaagataccctttacaggttagcagactcaaaagccttcacttaactaccctagctaccctagttaatactgccctatcagtcactttctaccccattctcttatttcaccttaatactaattcctatctcaagtagctttatctatccatccatcattccattgaacaaccaaccatgtatctccttgctttgtttaatagctgtatcttctgtgtcatatggttggttcttaaaacagttttgggtgaaaaaatgaaccgataaatgactctttcaccccagttcccaaagcttcaaacaatttcatcttccaaagtcttcgacccgctcattaaaagagtggtcaggatgcaacatgttatgttgttccttcagttgcttccatttccactctctgaatttatttccatcttgacttcttttaagatacatttcaattactgtgtgtttcctatttttgtctttcattttggaaattcctaatggtcagcagataaccaaacaaaacacaaaacatatttatcttttaaaaacatgggaggccaaggcaggcggatcacctgaggtcgagagatcgagaccagcctgaccaatgtgaagaaaccccatctttactaaaaatacaaatttagccaggcttggtggcacatgcgtgtaatcccagctactcaggaggctgaggcagaatagcttgaacccgggaggcggaggttacaatgacccaagagggcgccattgcactctagcctgggcaacaagagcaaaacctcatctcaaaaaataataataataatagccgggtgcggtggctcacgcctgtaattccagcactttgggaggccgaggcgggcggatcacgaggtcaggagatctagaccatcctgtctaacatggtgaaaccccgtctctactaaaaatacaaaaaaaaactagccgggcgtggtggcgggcgcctgtagttccagctactcgggaggctgaggtgggagattggtgtgaacccgggaggt

SEQ ID NO: 586538 - DNA, 4001 bp, Homo sapiens
acaataaagactaggtgaattaaatttaagaacatatatgaaatatatggcatggcaggaagggtgtaattgtttttatgcttcacattttaaaaataaatagaacttagtgattatgtatttataccagacaggttttgggagttgatgttaacctacatcacttttcatttaatagctagctgctgcttaaatgttgcttcttgtagaactggccaaagcatggacagcctgaagcacttccctgtctgaaaatcttgttgctttgtacacaaaccattaaatgctaggaaaatgacaatctctactgaaatgggtgtaaagctgtatgtgattatcaaagatgtggagaaaaaagcaaagcttgcaaacacctgtagccagccttagcttcagcagacacttgctacttggaaggcatgtatgtttctaccatatgaaaaaaaatatcaaacttgtaacacagaagtgaggactaaaaggataaagcatagtgctgaaaagatttctaaaatagttattttcaaagggttcatccatattttaaaaaataaaatgctaagttaaatgaccagtcccattagagacatacctgttaaaccctcccggagcccttgtcagctttgcagctataagaataaactgtactgaaattctggtaggtttgcttttgttaagcaggcactattcattaacataattcctgtcacttaagtgtataaataccaaattatgcaaaattgatattttattctgattccatgaaaagattgggtcaacagaaggatcttaaaattaacataactaaccaaggtttaaagaaaactagctttaaacatagatccccatatgggaaggtgtattaacaccaaaacagacatcatgccaacctgtggaatatttctttcacacctagctctacaaagtaaacactgctttatgtggcattcttatcatggaaatctaggcggtgatctataattacgattaagcccacatgggaagtgggatctaagtgagaactttaagccaattttaggttgaaacattcagaagaggacagaaacaaagagttcccaaagctttaggaaatagccataggaaataaatatgaaaggcaataattacacgttaagtgatactgcctggagagtatgttcatttagtaagtataaattgacaaggctgacaagctcaatctcccaccagctcatctccttgagaaactagaaattagaatctgttcctattatcctttaaaacgctgcacctgcttttaacacatttacatgtgtgttatgccatcacatctgcctgacaatgctagacttcccacatgtttttgaagaaaattaaaataagcatctgctaataacaattttatttcatcctaaacagtttcatttggggctgatgagaaaaagccacataatggaaaaaagaaaactacctttataactctgtggcaaacacattttagaaggtaggtctataaatagatgtgcttctgtaggcacagagtaaatataaaatcgtcaggctagcggggctgcagtttaaactgaagccccaatatgaacttacctgatttttaaagtcctattagaataggcttacaatcagtacacagctcctttttctagttgcatagtaaaggcaaaacacccccaactacattttacttatctcagtctcatctttcatcagaagcaatagtttgcaatttcattcagaagctgctgtccctaagcagactgaatatgcacagaaacagtaatggaagggatctaagttaaaccctacagacgcaccaagaaaatagcaacatcaacacgaaaaagcagcaatttccttaagagaggtgcttttcttagctgcatttcccaagccagccccctttcaaacctaaaacgtctcagttatgaaagaggatcttacctgagctgatcatactgtgcattctttgctgagccaagagctgctctcgtccagccaccccatctgaggaaaaacaggagtcactctcgtaaattgtctgcagcatattccagtcactcttacttcagctacatgaaacattcatcactgctcagtgcaccggccccaggagctaccctcgctggttctccctcctccctgaggagaagcagcagaggatcaacttcgacaatgatttcctttctgctcaaatgggcatccacttttaaaaagacctggacacttttcccatgttaccaacctgtgtgcaaagcagaaaggacagagtggatgctatagctctctggagtttaggttatcccggaaactacaagcaggtgggaaataggaacgtgcttcggggttatttctttgtcagaatacgtagaaaattattaagtctacccacgagaaaaagaaaccaattaaacctggcttagagttcttcaggctgctagggttttgttgcaaaaaccctcagtcctgcaagtggctccagccggtgcccttctcctatctgtgtctgtgcctctcttccccctttctcagtctctctcagctcaagttggctaaagcgagtgataatccatttgcatatgaatcaacaacagcatggcccacaggcacagaaatagaacaatggtcggcctgagccaaaaataggtcaagcatggccgagtgattggagcctgcattaatgcatttaaaaataccccagcaaacccagctgtccagcctctatctttccaaccataattctctatcgcagggccttaaaaccaattaactctttcctctctcgaagcttgctttacacactgtgtttccatactggcgattcgcttccaaagaaaggaaggcaagaaaaaaaattaagaatcataattctaagagggcaaatgcacatacatttcatttcattttatttttgtagtatgtgtttttggaagagagaggagagaagtacagagctctgtattggttctaaaataatactggaagcttttgctcataatgtggtttctgcctcacccacgcacagcaatcctggtgttctatttttgttgcctgtttctcaggctacactgcagttggctgtagcactagaagcttttctgccttctagtttcaggactaacaggagatttagcagaggtacttttggaaaacaagcacaccccagaataaaatttttatgaaggacaggcttgattttttacttgctatttatgcaagacaattgtccatttcacaaatcctattgtatcttagtaccacctatgaattttatcgcatccatccagttagtactatatctataaacaaaacaaaacacaaaacacaaaaccgtggcttatatgtgaaaatttcccctcagcctctcaggctaaattcaatttacttgcaaaaggaaaagaaagtagtctgatttcttatggatacagaatttctgagcatatgcacctgttgatggataaatcatatatatggttagtacccaactatgactgttctgcattcagctatacattggttgcccgaaatatggacctcctaacttttctgtagaaatagcatttatgatagtcaatagattaccagacacattgtggcgttcagctatacagtacagtagatagtatcagagttttatagtctctggtgctacatttatatcctttctatataagagataaattttacattccaaagagggatcctagcatcttgtcacttccaagagcaaacccaaaagtgataatctactagtcatggaagctcttttctcttttctaaactaaatcagcgaggaaaatgtaattctaaggcatcagaagcaacaggggaaagagaggaaaaagcagattatttcaaaattcccagaacaatccgatggaagagggatcttggtcaactccagagtatgaagtcagagggggcaaacaaggggacacagagttttgatgaaagggaagaaataagcacgttaaatcattcatcaaataggccactgctgaattcct

SEQ ID NO: 586539 - DNA, 4001 bp, Homo sapiens
gctttgtttttccaatgccacattccagaggaagcagcaagcggagggaacaggcaacagggaattctaccaacagggaattctaccacaatctatctctctaccaaacaggcacacacattcataccagggtgggcatgtggactctaatcccttcttagtggaaaacacacatttttaaatgaatccccaatctagaatgaattaccgtaatagccacagccggagtgagtctgctgatgagaaacgcagatctggccacctgctttgagacgccttggaccacaacactgccggggtctttaacggttggccttttcgggtagggcatctgccctcctaaatcgcgtttaaatcccaggaaaagagagaagatgcctccctcaatttttgaactatgctgctcttgctgtatccgtttctgctgaacatagcattgatatcttttcaaagagaaggggggaaaacaaggggagaattgcaccactgcagattccaagagaagtaagcacaaaactacagcaacgtcaaataatatcttcttcggcaactaggaaaatccccacatgctctctggtgtcagcccaatgcagactgaggcgcgctgtgcccggaaccacaggaagccgggcatctctgcagcctgtgtccctgccagctccccctacgcgctgaaattcggcagggaagaagttatggtgcccagcctctgtgtgcaagacagagacaccgcgcatcatggctctgaaaatcagccaagtggccgggacgtcaaagcggcagagcaatcagaatgccctggagccggggatggaggggccacattgtttgagccctcggattttgctgcattgtcaccgcccgggaacgtgggggtagcaggaagcgcacctccagccaaaaatggaccggacgcattccccccccctccccgccccggcagctccctccctgcctgtctgcaagtcgcaatacggtaggcgacatgactgctcccgctaaaactcaggtggcaggcccggctgagcggcgcagccggccggtaacagggaggcgctgggggagcacccacacagcgcctcctcccctcctgcacccgtccatgggagcaagggccggacctggccacgcgcccctcgagcgagcaccggcgagcccgtgcggaggctctgggcgctctctgggctaaccacgggcattgcatgggacacaattgttcaaaagcgagcccaaggcgaagcgcaaatccagagctttggttcacaaggggtgggtgtgggctgggaagggggattacgtaggtctctccgccccctcccctgacacctcctcgccactgggagggcgctgaggggcgggggaggcgctgcgaacccgcttgggggcttctttgtttctctccgtaccccgcaggagggccgggtgcgcctgcagtacccaagccggggtcgccacccggggatgccggcccggaccgggcggcggcgcgacccaggctgacaattgaacctcgcgggagaagcgagagggtggggaggagggtggatctcggccccgagaagggagggcgctgccggggcctcgcgtgcggcggggaagccgcccagagaagggcgggggggaaggggcggcagacagtgtccccgcgctacgcccgcttaccttggcagccctggcctgggcacagatcatgctcctgtcagcgcgcagattagagctggggggcgcacgtgccccgcatagtgcaccgggcgcctgggactggctggggaggggaccctggcgaccgcccgctctcgctgcgctctggctgccgggtgccccgagagagcggaggccacggccactgtcacggcggaggggcgcgcgcggctcggcgagtgtgtgcgcgaggagggggccggttcggtcagagtcgcacggtgttccggctccaacaacagcgcctgatgcgcggtaacgcagcacacttcatcgctttatcctcccgcttgcatcccctccctccctgcctgctcctctgtgggtaccagactccagaaccaaccacaagccgggcttgctctcattagcgctgccccgccctgcagcctccgcgcacccccacccccgcccccgcggtaaatatatatcgattcttgttaccgccggccccatccttccaacacccagcacgcgtactgggcatatccaacaccaaccctggctcctcggcccttttgtgtgtgtgcaaacagtgtagcagaaaggatgcggtacagacactctaggcgggtaccctgtgacaggtgttcttggcctctgtcttagacactttcctcgcttaccttacacacagttaagaacgctcagagacacatttcaggaaccgtcctgtatttgcacaagcacacaaaacatcgtaatgacaaatgcaaaggatgaaaatcaccccagaatatctattgttgggcaaacctagctcccaaaccgcgttttctattacactgcacacagtgtcagaatgctagaacgagaaggaggcaaagtctagacccttccaggtacagccaactgagatgcaaagagaagtgaaatgctggttactattggtggttggctgctccatgtatgcacatttttgtgcatctggtcgacatttggtttgtgtgtgttcacataaaatgcagaggctttgagcacataatctctatagcctgggattttatgatccaaccacattctctacaatgctgatttattccttcccattattttgcccagcatcctctacatgagctttttttcactttctgagaagttatcttctttcccagaccccaaactccgcctcctctagaataaacaaaggcttcaccctgacttcagaactccttactgaagacctgagtacggacttgtcaaaaccaaatctccttccccttccacccacagtggctagtttctcagtgcctctcattccactgacctgcctcttggcattgatttcactcttacaactggaactttccagaactggaaactttggacgatgtgaaggcagcttcaccagctgtgctcttttctgcaaggaggcacagcccttctctttccgtattccacttggggtgcccagtcctttcctgacagacccttttctttgcctgacagcagtcagatcttctggtcagatgagctcaaagcagaccattttcaaaccttagctaagaatccacacagaaagctgtgcacacatttctccggattttacacttggattagtaccaactcctatatgaagaaaactctccgagaatagacttgaacaggctgtggcagtaaacagcaacagcaaccaaccatgtgatgtttccaaccagagacttgaaagaaaacaaaaactttcacataaaccagcatccatggtttctaaattagcacaatgtcaccaaaccacaataaaggataatttttttacctcaactaattgccaggatgttcacctcattattttcagtgaatcagcatcaacttggctcagagatgtttgctctctgttctatccatcatggagatgacttgacaagtccacatctctcatagaggttattgatgtagcaatccttgtggtgtgctttatcctcccctgaggagttgctttttttatactgaagacaaaagatattaaaatagcagtacacaaagtttcacatcctgagtagataaagaagccttgtagagcagcttctacatgtcaggtgcaatggcagcatatacagactcctgtgtattgtccccttttatttttattatttttattttttgtgaggggtctcactccaatgcccagggtggagtatagtggtgcaatctccattcactgcaacctccgcctcccaggctcaagcaactctcccccctcagcctcccgagtacctgggagtacaggtgtgtgccaccatgcctggctaatttgttttttgtatttttagtggagatggggttttgccaagttgcccagg

SEQ ID NO: 586540 - DNA, 4001 bp, Homo sapiens
tacaaaattgcagcaatgatccctcctttacagaccctcttacattgtatgacaatagcactataaaaaagtatccagtgttaaggtacacttgaagtcctactgtagaatttatctatattccagcaacaaaggactccctagaccggtttcattgtattgaatataaacatcagatttcacaaagtgacctctgctgtagctcaaaatagctggcatttacttccctgttatcatgtgtggtattaacaagcataacacaagtattgttgactgaaaataaaatcttgcatctttagagaaaatagaaattatgatgtgttttgaataaactgtacaaactgtacattttaggcttcaaatttttaaaaattttttaaaaagaagaagcaaacaaaacttcaatattcctaaaagcaaagattgccaagtcatctgtggtctttacaacacactgcctatggagaaaagcaaatttgcagaagagagaaggtcttaaggtataaaaactgctttagctatttatgaacatgctattttcctaatgtacatttgttttattttagttgaattccttaactaaattgtctctaagttcttcttaacgccagtttcaaaaacaacacttataaaatgatagtagtcctactgttttaaatataaaaataagtgggatgatgacccaggatactttcaaaaggaagacaaatgcacaaaggtagtgacagttataataattatttactttttcaaaaaattttagaaaacaaaaatctattataggcttaaatttgataacataaatactgtgataactggaacaatcacaactctgggaaactcaaagacttaaaaaaatttacaaactgtacatttcaaatgtgtgagataggtacaacagtaggtatgaatttgaataataacatttacaatgcaaactttaacaaaatataggagtgaaagtaaagctctaaatagctgaagaagcctaaaagttaaattgcttattttgctaagctgttcttaatttttaaaaaatgtagccttaattgaactcctatctgttgaatataaacaaaacaagaaattgatttgacttttaaaactgataaataggaagaatggaaatgagaacatctggtgaaaataatgttgacagacagcagttggaatgctggaaagagactcctttaaactcaaaagataaagaggagaatgagggaaaatattaaggtagaaaaaaattcttaataggactagccattgggcaaagagaaaagctaaaggcattttggagtaacaatcttttcaaatacgttctcccttttgtgtaggaaatttttttgttagtttggaatcttacctttcttccatatttcataagatgagacagataacttaaaacgaagcagtaaacagtttgcaacaatatctttaattaaaaagaaaacaattttcgtaaattatttgtagtttcactctaagtggtcacaatttcatggcctattagaatatttgctgaaataaatgcattaaagactattgaacctatatgtaaactctaaaagaagaaattcattatcttttaaaaatatctgaattatcttaatgagtgctatgacaataattgttgttccaagaaaacaataacaatctatttattgaaactcatttctcttaaatgttcctgcttctttgctgtaacagtgtgttattgttaaaaggttctgacctgctcttcaattatctgaatgcatctacagcctaaagcaaatatttaccttatgtccacaattaaaaaaaaaaaacctaacaaacagctaaaacacaattcacacagggccttaccgaagagaaggaggtatattttgcactgaaagaccccaagtgtgtcaccgaagggctccatgaaagcatcctgtcccatgcatgcagtgccctgttctcagtggtaacttggaccagcagctgctggtttatttgctagggaaattagcagtgaggtaacagaccctatcttgcctcttgcttctgtgatttgaatacagaatgaatgtgtatacaaaggacacagggagtgggaacacctgttatgtgcttagcaagaatacaggcttatggctttcagaagagtttcttagcaactaccagtaattgtctatatatttcataaattatacttagttattaaaaaatcacatgaaggaaaacatccttttgcgtgactttactgaaaaatggcatgttttcataatgaaagaatattgtgagatttccttaaaaacaaaagctggttttctatcatgcagaactatgccattattattttaaaattaaaaaaaattatatgaaaattgaagtagctcatgtatctgctaaacagttataaatcttcatgaagtcactaacatgtaaaaattctaccaatgaatcaaaagagagatccagaatatatttaaaacgtattttttctatgcagtgtttcctattacaatgactgatttcatttaatctttgaattcatcttatttttaaaagcaaatcacaggtgtgtttccaactgggactgaggcatggaccatgcataattataatgaaaagtgcatgccaggagatagtatctgaggccacattttcacagctgatgcatagaggaagtgaaccaatgatctagaaaagatcttacctctactgcagtgtccaggttacaggttttcaacctggtctctccattgtcatggcagcagatagtctaagcatgtccgcttaatttactaagttattagttaacccctatttgcaagaaggctctggttctagccttgttatataaaatgttaaggatatatccaaatctgcatcaaatcatcaaatcaaggaaaattccttgcatgcatcagttttaacagtaaaggcccactgaagaagttcaatgataagaggggaaggaagactatacctcaagcataattaaagtaaaaaaggaatgatagtaactttggaatccaagtttggaaacactctttgcattagggctctgaactcttctagaaggacttctataagcaaagaaagtaagtgactattgggaaaacgaagtcctcttcagagatcagtcactttcagatccctccatgcttcagaaaaatggcaagagctcctcatgcttcccccacctccctgcaaaataataacaatgccacaactttctctgcactgtctctaaatctggtacacacatctattgcagcacttatctccttaatctttattttattggatgtttattttccctctgagctctcgaatacagagaataatcttattcattcatggatgttgggcacgtagcataatgcttaactggtatttttgttaagttgtttctccagaaaacaaaactctaagtgctccttggcccgtcttacgattctcagttgatgcgtaagaaatacaaataaattttaatattggattgcacaaaatacaatttggaaagtaatatggaagttctacagatatcacataggttcccccaacatcttttagattgatattaatctccaattgccgttatcaaattagctgttttcagtgtttttcaatctagtgctggattataatgaagtttgttgggtccctggcaaaaagagaaataaagacaatgtactgtgtttttccctagtgttaaatatactcaatataaaggagttttttattctgagattttctttgttgtatttgaaaatattccctgtttcatgacataaggtgatagtagatgctacattaaaaaataaatgccatatgaatcttacttgtaatctttttatttcatggcacatattgaaatataatacggcacatctagggaaagggctactgggataatcatgacaaagcgccctctagtggtaaactgtagatataaactcttacctgctggagtaacttctgatttcaacatgtttacacaggaagtgagaaaaagagtgctcaag

SEQ ID NO: 586541 - DNA, 4001 bp, Homo sapiens
ctccccagtctcctctgtggccactcatttattccacagatagttgctgaatctactagtggtcagcaaaggttttaagcactgaggacaaagcagcaaataatacaaagtccctgctcctagggacctcatattctaggtagggaagagaaagaataaacaaataaaaatctataatatgcccaggtagtaataaaagctatgaaaaagagagaagcagaattggagatagagagtgactctctctctctctctttctattttctctgagcatgtgtgtctgtgtgtgtgtgtgtgtgtgtgtgtgtgtgtgtgtgtgttggagaagtgagattacattttatatagggtggtcagtaaaggcttcacagataaagtgacatttgagccaagacctaaaggaaacgaggggagcatgctagtatcttggagaaaagctgtctaggtagagcaaacagcaagtacaaaggccctgaggaggagtgtgttttggcccgttccaggaaaagcatgaaggccagcatggccagaaccgagtgagtgagggggatgcagataggaaaatggggtcagataggcgctgggtatgtggggcattgcagattgttaataatttgacttttactctgagtgagatagaagcaatgggaggattttaagctgaaggaggcaggaatagaagcagggagagtaggtggcaaagctattaggacagttcaggccgcggctgattgtggtattgagtggggcagtactgggggtggtaagtggttggattttgtctatattttcaaggtaaagccaataggctttcccgtggactggatgtgggatgtgagaaaaagaggaggtcaacggtgactacaaggttttggctagagcaattgatagaatggaatttgtatttattaaaatggggaatactgtcaaataaacaggtgtagagatcaaaaatcagaagttgggcttggacatagtatattttacatatgtcacttatttcaataaggaaaataagtgtctgaaagttagctgaccccactcctcctcagaggacatttccaggcatgtccattgtccttaagtaccattcttgcacaagtctcatcctcttccaaacagtgtactgaaacaaaaatcttcatgacaaaaataggactcttcccagggtacagtctattgttgagaaaataagattttctccatctcatcaaattagcaacattatacttgatagttcccaggcaaacaaacaataagttatacttagtgcttgattacctattgcactaggtatatctcttatgtgcatgtcttatttaatcttcagaaagccttgtgaggtagataatgtcattagtgccatgagatattgaggctttgaggattaattgatttgtgcaaagttgtgaagccaagatctaaagccgaagtagtttagtctcctgagcctttgctaactaccatgctagactgctgccctcgtacactcacaggggactcaccatcaaccgtgacttgtatcttctgactggcagatagagttccatttccctgaatgttgaccttcacgatgtaattgccttcatcagggaactgcagtgggttgataagcagagatgcattgggtggcatcatggtgaacttgtgttggtattccaagtcaggaaccacagacttattcacagagcccagtaagtatttgggcattgtgtggggtctctcaaatagccatatgatctggatgtctgatgctggagtgtggaagccatagtggacgggtaggtagagggcctgacctctgacgccatggacagtgtgtgatggcactgtcaccttcagccccgagcaagcacctgttgcaaaggaaaggaaagttgtgaagaccttgagccacatttcacaatctaaaggggcaaatgcagagagaacctgatcaggtgataatccttttcaaagaagagtggcttctaggtactgactattctagtactggttacatatagaggtaaatatttgtccctgaaaccttctgcacttaaaaaactccacccaaagaccgtgctggttgcacaagataaaaaggaaaagcagaagttattttctacgattgctacggaataatgggaaaaggagaactaagaaagtttactacttctaaagtccaatgaaaccattaaaacatttggaattatgactatattaatgtctgtcatatcatatcataatctaactatgtgatttgagaaatactagaggttatttcctcccaacagtttcccttaaagctgtctgaaatgactgaatattccattattggaagttcttccttttagccaaatgcttgccaaatgcaaatatcccaaggagagtggtattaaaccattatcagtcatgaccagttatttccacccagaacaggcatctggttggtgtatttgagaaacagcaagaggcaggtacagatggagcacagtggaggaggaggagcatgataagatatgaggtcagtgaggtggctgtgacagactggcaggaccttaggatcacgggaaaaactctggcaattttactctaagatggggatgcaataggagtttcatgaacagaaaagggctatttttttaaatgttttattagacctagtctagctgctgtgagaatacacaggaatagggctagagcaggaacagggagaacacttagttaggaggtgactgcaatgtaataggccagagacaactgtgctggaaactagggtgttagtaaaagacgttttggaaaaaggctgattgtgacaaaaggatttggtgacactttgagggtgtcagaaacaaagaggatgccaagcttcttgactcggaccaactggaagaaaggaattgcagtaaataaattaatcatggggaagactgtggggagaatagtttttgtggggaagacgaggattcagttttgggagcgttcattttgagatgcccattagacatctaagaggcaatgttgtgaaatcctgattaatgtgaatttaagagagaatgaggggcctgagagggccttggggcatggagctctgcccagtggatagccctgggcagtgctggggatttgtggacccatgcattcactgctgtatcttcatgtttcttcccagtttctggcaactggagatttccccgtcttaccttaagccatgatatattattttattttatttagcatttctatgtatttgcagggggaagagagtcttccttagctcaggttaccatgttgctggaagctctttgcttcaaaatcctcatattaaaaggggcaatatgatacctacatcataggaacatttgacgtaatagaggagagagtgagagaaatttaaatgtggaatattttgaatgatgagagaaaaaatagacaatgaaaagaaactgtagacaatgagtatagacaacactttagggaagttttgctgtgaagaggaccagagagatgggacagaagctggagaaggatcaaaaatgtgaaataaagagagttttttgctattgggaatgtttcactggaaagggaaatgttgatgaggcagaatagagatgggtgaaagtggaataaaatccttaagcaggtgagaagagatggaaattagatataaatagaagcattttacaattttaaatttctcaagtacaaaatgttcatcctctttgatcgcttccactttttcatttttttctacatttttttgatttcattctactagaaagggagtcctcaagcttcatccaagtcatgtcatgaaaggccatcaattttaaaaagggaaaggtagaaagatctgtttgccttttgtgattatttccttggaaaaactcaaagatgtaggcctgttcctatgaggaatccagttctaccaacagtaaatttatctccttccttcccagagtggaggtagaagcaaagattcccacagtttgggcctttggctagctattagtagagag

SEQ ID NO: 586542 - DNA, 4001 bp, Homo sapiens
gagctgtactgtctatattttatttattatctctgcaatatccagttatgattcagaatggaacacagaatggaaaagccatatgagagggatgcaccaaatggtggtggggtggagggcagttctcttttaaactaatgtccatgtatcctctacaggagaaaaatgttgaaaggggttgtggtgaaaacgaatctacaacttataattctttggtccttgaaacatatatagtaaccttgaaagtataatttttataggggacacatacttatttctaagaaaaaaaaatcttcaatttctgtttaagtttctgggccaagtgttgaaagtaaaatggaattttagtgtaataagcaataaaagctctgatacgggttgtagtgctttatcttttttttttttaagaaaggatatatctctcactcgcatattaggttgatgactttaagtccaaagaaagtagtcccttttccatgcctgccaattctttgagacagagtctcactgtgccactcaggctggagggcagtggtgcgatcttggctcactgcaacctccgcctcccgggttcaagcgattctcctgcctcagcctcctgagtagctgggattacaagcatgcgccaccacgcccagctaatttttgtattttcagtagacatagggtttcaccatgttggtaaggctggtctcgaactcctgacctcgtgatccgcccgccttggcctcccaaagtgctgggattacaggtgtgagccaccgcgcccggtctttgcctgccaattcttaagtcccttgatatttctgcttcctcttactaattaactgaacctcatcaggaaaatattaatgatggttcgaacactcaggagacacaacctcagaactcaaaatacctcgcggtctaccaaaagagacctatttgattcaagactggaggggagaagcaggaaaaaggagggtacacggcacgaaaagctgctggtcagagcagctgcccccagcttttacacacttactggtttgctagggtaaacgttagatagatgcgtttttagtttccccacggtccagttcaagaagcagctaatagtctggtcactgtatttctgattcggtgctttaatgatgagggtcacaggaatctccatcccactttggtccatggtgcccccaaagtcagacagagtccagaggagcggcagttaagcccaaaagagccgagatggtcaccgccggcgcgactgggatgaggacagaagtgagttcttagtattccgtgtccaagtcagttacaagtgcactggaggatacgaagcccattgccggtaccaaggatggactgaggtggtggcgactgcgacggtggggtctgggtgcccggccgtggaggcagctctccccgccaggtccgggctccgccgggctccggactgtggaggccgtcgtgaggagaaaggaagctatacgaaggaagggtgggagggatgagggcacaacggccggcccggggtcactgccccgccccaccgcgacccccaagctggaacgcaacaaggcccctacgccacggccccgcggtgcggatcggggaagcagctgggccgctcagggcggtcagcgggcactggggtacctgagagaaggccgcggggcccgccaccgccgccctccgcgcccaggcagggccgccagccacaccgtccggccaggcgttttccgtggcagccgctcccttcctgctgcgcggcgaccggcacggcccagccccgggtctcgcgaggaggcgcgggtgaaagggagagaagctgaccgaaggcgcggcccggctctccgcctgacccctcagtctggacagcgcagggtggcggcaaggcagggctgggccgggggcggcccaggcgactacaggtagcaggagggcggggacgagagccgttgcgccaccgctggcgcgccggttttgttgttattgcgaggattgtctggggcccctttaagccggaacaggcagggcggaagtgcgtcaccggcggcacgcccctgcacatggacctcccccgtccccgccatccctgccgatcctgttgctgccgccttcccgccgtgctcgggctgcccgggactctagccgccaggcttcgcgtcgcccagcggcagatcgggctcctgggagcctctcccctggccgtttgctcggcctcggccccagctgccctggggcctagccactagctcccctggcgctagcctaccctgtcttgaccgcaccctgaagatttgggaagtctttctccatcccaagagtcgtctctgcaaaagttggtgtccttcctggtgctgaaccacgcttctgctcaaaatgtgttgagcgtcgtctgtctgcaaagcacggtgccaggagctttggtggagaaggcatggggtacatgtgtaaagagtacaggcttttggttaaacctgaagtcctcctctactttctgggggaccctggccgtccttgctgagcctccgttgacttctctaatggggacggtaatgcctacctgaccacaagctgatgagtaaatgagctatgagtgcaaagtgtggtgcagttctggcgtgtgccagcctctcaagtgtcagtttccgtctcattcctcttaatcttcactaaaatggacaagtattcattgagcacctaatgcgtgttcagtatggtgggagatgagggatgacagtattatttttctattttataggttagacatagaacaaaaggttgagtctattgcccatagccgaacttttcttcattttctactgtggtttagaagtcggtatagtaagttaagggttgttagatgtgcattttcacagctcccagcttccacttaggagtagataacataggggactttgcgagctggtctctttccctcttagcttcagaagggcttcgaggtagccaccactgaattagttgagagacaaggcacccctacggaggaaatctcaactgcacaacccctactgtgccccaattcagcaggaagcagttagagcggtggtcaaacctccccaatagcacttgggttttcctgttgagagggggtactgagagacaggactagttggatttcctaggctggctaagaatccctaagcctagctgggaaattgaccacgtccacctttaaacacggggcttgcaatttagctcacacccgaccaatcaggtagtaaagagagctcactaaaatgctaattagggaaaaacaggaggtaaagaagtagccaatcatctatcgcctgagagcacaacaggagggacaatgatcaggatataaacccaggcattcaagccagcggtggctaccctctttgggtcccctccctttgtatggaagctctgttttcactctattaaatcttgcaattgcacacttttctggtacgtgtgtgtcacagctcaagctgagctttcgctcaccgtccaccactgctgtctgccgctgtcacagacccacagctgacttccatccctctggatccagcgaggcgcccattgctgctcctgatcgggctaaaggcttgcccttgttcctgcagggctaagtgcccaggttcgtcctaatctagctaaacactagtcactgggttccacgattctcttccatgacccacagcttctaatagagctataacactcgccgcttggcccaagattccattccttggaatccatgaggccaagaaccccaggtcagagaacacaagacttgccaccatctcggaagtggcccgtcaccatcttggaagcgacctgccaccatcttgggaacttggggagcaaggacccccagtaacatagtgaccaggaggaaattcttcctctcaacagctaatgcagcaggatctcttacaccgtaccctccctcaccttgctcttgctcttcatggtagaacacgtaccatatcttagctgtactctatcaactgcgcatctgaagtaaa

SEQ ID NO: 586543 - DNA, 4001 bp, Homo sapiens
gtatgtctcctgccaaaagttcataatgcatgccgaaaacaaatagacactgcctacggttgatctactgtttgggttttccacactgcgttccccttgcgttagcacagatgaattcaggtaaccagattctacttaagaacagtgacattttaatctttaaaaatgaaaaccctcaaaatattagccattatttcaatttaagctcaaaatcccctaaaccagcagtcatctgtgaagcatttttttcttcttcttcttgagatggagtcttgctccgttccccaggctgaagtgcggtgacacaatctcggctcactgcaacccccacctcccaggttcaagagagtctcctgcctcagcctcccaagtaggtgggactacaggtgcctgccaccacgcctggctaattttttgtatttttagtagagacagggtttcaccttgttagctaggatggtctcaatctcctgacctcgtgatctgcccgcctcggcctcccaaagtgctgggattacaggcgtgagccaccgcacccgaccctgtgaagcgattttaacatgacacatgtcaagcatgataacctgcttgatttgaactcactgctttttcacttcttcagaaatcttacctaaatgctttcagagtgaccctttccaaacagtgtcattttccaaacgggccacttcacaaaataaaagaaaaccaggtgggttgaatgattttcctttgcatttagaaaattcttgagttttttaacccttgtaccatatcaaaaactagatcaaaggtctgataaatgtcatatttaccatctcaaaagatacagccagttctcttttttatattgtaaaaaggccatgtctccatctgggcatttgttcccactcttttattcccctgcgcctacccttgatattcactgccttctcccgttggcacctcagcctctacaatgatacaacaaaatacagatgtttcctcttgccctgataacaagagaaacttcccagagcagcaaacgagatctctaaatctccaagcaatatgaactttcaagcaactcctccccaaacggcaaatccaagggagaaagtgggagacagagatgggcagttctgcagctttaatcaaagtctccgtgcactgcagtttcaaagggcaggcatccgtacccagaaagaataagatctttaaaaagaggctttctctttcatttttatgatatgcaaatactcagagtttattctgcctcctcaaaatgaaaacctgtacaaagtcgtaatttggctccaaatgttgactaggtgatgtggagtagtgcattatcatgaaaaattgttctctggaaaaggatgacttcctgccggactgaccatcactcttgcctcttcagaccagaccctctctttagctttaaacttgtccaaagcagccaagttcagccagtattagcacttcctccctatctcataatccacaactattaggctaagtgggacggggcttgggttggaggtggaggggagttgagggaaagttaattatcattttaaatgctattcaaacaacaacaaaaaagaatgtcaaaaaaagcataatgagagcttttagaaacctatactacatactgagttcagaaaggatgctgggaatagggtaaaaagagggtgttaaaaggaatagggaaggttagcaggagagttaaatactaatactaataatgaagaagaagaagggaactaacctgcataggggatggcgatggggagcaggaggagatgcaggaggacatgctgcagcagcagggctggcaggagtttggtcacccacatggtgctgctggacgggctggcggatccctctggaggagatgcctgggtgaaagaatcctgttcggagtcagtgcctaaaagagccagtcggctctgagctgctttttattgcgatgagctaagtttgttgtgtgattaactggaaagatctaggtctgaactccctcttacggtaagaaactgtttaacaacagccctttactctcttccagccccctcctttcctcactcgcccccccttcaacagcaccaaacagatccctgcaaccccccccattccccgcctccccccaaccccacgcttaggaaagaaacttacaaagaaaaggtcacctggcctgaggccagcttcaatttggaagctggagctccagatcccagtggctcctatccgagtaaggaagggaggagcaaggctgagcccaatggctaaatcaaggcacaggcaggggaccaattcgctcaatttaaacaggaaaatacatgtgtttatatatctatttgggaaaagaggaaggggaagcagcataagaagaaagcgaagagctgtctttcagccaaatgtgccccagctcctaatctgtctagttttcctgctagagcaactgagggattcaaaacactgacacaggttctctaggggtttagagacctgggagaggtgggagcggggccagggaggagagcccaggcacgtccagcccaggtagaaagaggttagttaagaaaagggtgtggtattgtggggccaaaataagcaagcaaaacaaaagcacgcagattgtcagatgaaaaaattgcccctgccccatgggctcagagcaggcagctttttttttttttttttttttttttttttttcacaaactgccaaactcacgaaataccacacatttacccaaagtatacaaaataaacttgtctgatctgactttttaagagaaagtccaagaaacagtcattgtccatagcctgtccctgacaggtaaatatgccatgtggacttgtacaggcacacacgtgcacacaacacattcacacatgttggtgtgtatgtacgtatacactggttaggactgactttcaccggaaatccctcaagctgtttgaattcgtgagtactgaatatgcctctcttttccagcttcatctgcctgtacacgacagccagcttcccaaagtgtaagtggaaagatgaggagcttgtatgggcatggggggactcctaggtatcaaatccttgtgagatcattgcccagacccctcacttgattcagagaatttgtctttgcacccagaggtggatgctctggtaactttaagcaagagcctgctttatttctaatggatgctgagggatacttgcccctgtatctctctgagatggatattagtagagaacagtgcccctgtccacagaggaaaagaaagcaggccaaatgtgggaatgactagagcggtgggtagctgtacagaagtgattgtggggctgaattaaactcatccacagaacagccttccctccacataccaccttcatttgtcctccagctcccttacccccactttcagggaaaaacaacctgcctgataagtccctgaggttgtgggatatctagagaagctagggattaagagaattccttttgagggatctattttatatgacccgtttctattgctaatccttctcttttatcattttctccttacttaaaaatcatttgtcagcctctgtctggtgtccccaggatccattttactttctttttactgttcagtagactttttgggaaatctcagttcaatgcatagcctgaccgtgaccctgaattgctccactgcatctcttgtgctttattagggtgtaggggctcagaaaaatgataccccaaatgaagacctcagaatcagctctctctgaccttctcctgctctccagtctccggcccttcattctcccccaaggcgaggcatagaaactagaatccctctttcccaaggtggctcctagaaaccagaaccctttttcccaaaccagccataaaacctaagcatatcactctaacacctcaactttctgtgtgaaatctggccataaagacattatctgacctaccttgtttgatcgtagctcataagaccccattccaaagaaggtcctgc

SEQ ID NO: 586544 - DNA, 4001 bp, Homo sapiens
ggctaatgggaactgaaagaattgtgaattcatgtgaaaactggtgctactgtggaaaagtgtctattcttttagggttatctcaaaagtcggaagcatttttgtagctcaatatatgaagctcaaacagtggttacattcaagtttggcatattctgagtttttatcttgttactgtggttctgtatcagacatctggtctcttgcatctcaccgagcctctgttcttctccagccagaaaggaaattcagaggtttcactgagggggagaatgggaagctgttaagaattgtaagagaaagttcttacaattcctggccagccacagtggttcatgcctataatcccaacgctttgggaggatcacttgagcgcaggagttcaagaccagcctgggcaacatggcgaaactccgtccctactaaaaatacaaaaattggacgggcgtggtggcacatgcctgtaatcccagctactcgggaggctgaggtgggaggatcacctgagcccaggaggtcgagactgcagtgagcagtgtgactgggccactgcactccagcctgggcgacagagaccctgtctcaaaaaaaaaaaaaaaaaaaaaaaagggcggggggccaaggggctcaaatcctaacccactattttttttttaagcaaagattagaaaaaattaatgccaaggttttttttgttattaatcctcagtatgatcttgctaaacgatgcattgttacaactctcaaactttcagtttgaggaagacaacggcagtgcccccacaaatcaaccaatttttcaattaaagaggagtcctggtgtgatagaaagttaaggaattaggaacaactgataacaactttctaggtcttgctgggaatatcctgattcactcatccaaggggcctcatgtccctcgtgcggagtatgaaagactgtattagatctccgtggatcttcatcctggctctaaaaactgcctctttgtaagttcatggctagcttccacaatttaccatggtatgagaggagggaggcaggattaattctgcccacaatcttgaggacgctgaacgtgttttggttcataatttgacaaaaatgacatttttttaggttacagtagaggggggaagcccgtcttgctggtcaagggtgactgaaactttgctgaaagacttactgcctggcttgtacagccaccgcttgtgtaataaggccatcccctcggactcaggtggttaaacatcaggccctgctgcccaagtgtgtccccaacccaaggtgcaccctgggggcgctgaaagaccaggggtcgctggggtgagtgcgggttgctcctggagttgggcgctccaaacgtcctcggagtcctaactccaaagcagcatgccggggtcccaaatactctcttctcttcagcccaagctcttccccacctcttcctaaatcccgaaaagggcgctgaacccgttcatcaggagcccgggagaaagggagggaaggcagaggggggtactcgcggagtgagtggcggccgcagaaaaggacaggcctttagtaccagccaaaatattgttttttaagccccagcccaaccgcagggcctcccgagaaaagacttcttcggccgtctggacagaagaagcgagcggccgaaagaaggacaagggggaggaggcgtgaggtccttacccgctgcaaagctgccggctgccggccgcagccgccggctccagtaccggagaccggaggcagctccgaggagccgtaaggaggctgccatgctgcgcccgcccctctccccgcggtgacctccgccgcctcccggagggcccacagactgcgagcgtgtgcagcgggactggctggctcgcccacggagaagggcgcgcgcgcacgcgctctcaccgctcgggggcgggtgcccacgcgcgagggaaggagcgcggagccgagaggagcggcctgacgcggcagggcctgtcaatccctttacggacagggaagcagaccaatcagaattcccaggtccgcagctgtgcgaaggaccaataagaggcctttttgaacagtgacgccaggcgccctggcgctgcccccaagctcgtgcctcatttacagcctgcgggcgggagtctccttgtttaccaaagcagagggcgtgtgggaggcgggggccgtcgctcgctcccgcctcctcggaaaccttgtccccacaaccgctgcgtgttaaaaaggacaaaactgactcgcagcttgaaaaacactcagaaagctaccatgtgtgtaataacttttaaattcatttgattttacttaacacaacagtttctcaatactaaaaatagtaggaaaagaagttggtaacattatctttgaagggaagagttactagaaacttgcactttctatttcaaggcatatttctctaatctttgaaaattctacaccctaaatccattttgtaagcaaaactaaatataaaatccagaaagtagtagtatatgtatgtgtattagaaagaccttttttttttttggagacggagtctctctgtcacccaggctggagtgcagtggcgcgatctcggctcactgcaatctccgcctcccgggttcaagtgattctcctgcttcagcctccggagtaggtgaggtgggactataggcctgcgtgcgccaccacacccggctaatttttttggcactttgagtagaggcggggtgtcgccattttgcctaggctggtctcaaactcctggcgtcaagtgatccgcccgcctcggcctcccaaagtgctggttattacaggcgtgagccactgcgcggtgcagagagacagacatttagtcattcttctgtcaatgcttagtgtacatatttgagtctgtaaaccccttgggggtaattgcaggccttctcatctccactgactccaccaaagggttggaagccatgaccacaccaaagcaagactatagcctttggagaatggcaatacagcaggaaagagaatgtgtatggagtagctagggaaatgcgaaccccaatctaagtagcacaatcaacaaaatttgactttgacctttttttcaactcagtaacccatggagttgaaagcaaaggaattggatcatttccatctgggctcttttcatgtttctgggcatgctggcaacgtttccaaaaacttaaaaacttgtacagagtgcaaggtccctatctgtaactgggaggaagttaatgcccttctttgaccatcactccaccccaaccctctacccaacactaaatgaaaagaaggaaggaaagggacgaagggagggagggagaaaaaactcatttcaacaattagaccttctcctagatttgggtccccacccctactaggggtaaattagtttctggagcatttcccacctgtgcctctcttcctggtttcgtcaggttttagctggaatagatctcctgcaggcaacaaatgtgggcctacaggtttctttttctttttcttcctccagcactacaggtttctataattaactcctgaactgcaattggtctttcaactgtgtctcctccaagaagccctgcattgtcttctccaacaatgtctcctccaagaagccctacattgattcataaactaaggaattttcataggtttccatgattttaaagaagcgttatgaatttttaagtaattcttactgtttgaaggtgcttgcagatattattgtactggcaaatgcagttcctgcctatggctggttagctttcttcatttgattgccctcctgatgcccttgtttgaaaggcactgcaactcctccctgagtctttgccacgcatttttgtttgtaattgtttcaatgccttatagtggcccctgacttccgcttccaggaagatggagtagataggtttctccctattcttctaagtacaactaaaaactcaacattatatataagataaacatagggagactttgaaag

SEQ ID NO: 586545 - DNA, 4001 bp, Homo sapiens
aagcaattctcccgcctcagcctcccaaggagctgggattacaggcctctgccaccacacccagctaacttttgtatttttagtagagatggggtttcgccatgttggcgaggctggtctcgaactcctgacctcaggtgatccacccacctcagcctcccaaagtgctaggattacaggcatgagccaccgcaaccggcctaaacaggccttgcccaggcaatgagcatccagttagacaggttcttcaaggcctagtaatagttctctggttacaacggtgctcagcttgtctgctaggaatgggactcccatctggacatgtctaggtcagtgttccaaaatatggccagtatggaaggaggtcttatcacatgcttctggatggatggtctggaaggcccttggtgggctctgtgttggctagttggcttctggtggtccaggaggtcccaggcgatgggctctctagtaagccctctagggactccatcactctaacgaagatggagagtagggtcagtaccacacctaacaggtagaggttcaacacatgcttcatggctgaaaggaccctactcctctgcagagaaacagagctgccttctccttctgaaaggcctctggaccctgagaaaaaagaggaaaggatgaatctatagccttttggggatatgcatgcatccagccctgactcttctgtcctctcacagggctgaaggagaggcttagccagtgagggacacagggaccagggagttgcacagcaactctccaagaatattttacattgcaaacttcatggctgcggagccagtgttgcttcttggactaattcaagaacacttcttaaaacttttactttcttaggccaggcgcggtggctcatacctgtaatcccagcgctctgggaggccgaggcgggtggatcacctgaggtcaggaattcgagaccagcctgaccaacatggtgaaaccctgtctctactacaaatacaaaaattagccgggcatagtggcacatgcctgtaatcccagctactcgggaggctgaggcagaattgcttgaacccgggaggcagaggttgcagtgagccaagatcgcgccattgcactccagcctcggcaacaaaagcaaaactccgtctcaaaaacaaacaaacaaacatttactttattgaaaattttgttcctgcaaggcacaatacacaacccctgtgctacagtgcaggcatcagtcaccttcctgaaataggcccagtccttttgcaggggggtggtgggtaatgggaaatataagaacatgccctggagaaaggaacctgcctagaagtctctcccacatcacagattggagttaactacaaactttttgcaagtccaaataactctatgagggtcaaatctatcaagttcatttatttaacaaacataccatgaatatctgcaatgtgttaggtaccctggaagatactagggccacattgcaaaccttatagacaaagggtagttaacacgcaacacgctaagtgttgggacagcaaggagatcgtgaaggtgctctgggagggcatggcagggatgcctaactcagcacctgtgggcgtgggatgggccacgtggatcctagttaggaccaccttaggacaaaacagggctgacggctgaatggggaccccagatggggcgtgggcgatcagagaggatcccggcggcgcacccccagccctggaacgcgaggctgctagcgcggcgagcactctagcgatgggggtggggagccggggaagcccacagggccgctcacctccgggggaacagccgggagtggatcgccggctgtaggagcaggtcgtgcaggagtccggaggaaagtcggttactaagcaccagcgcagaagcttcccgccacaaaactcaccggagacaaaagcgccgtcagccgcagagcgcagagcaacgccgcccagcctccgccccttatagccgcgagcacgccccaggagggtacgcgcacgcgcactggaggccgcacgcacgcccgggacgcacacgacgtggcgcacgtccgcggccccaccccgcgggcaacggggtttggggattgtcccgggtgctctcccgcggagctgtttccaaaagtacacgtcgtgcggttttgagtcattgtgttctggagtgagacgaggcgtgtgtattaatctcgactgccatctctgctgtagaaaacatttgaaggagtcagagagcacatatcccttctccccagtaggtgaaaaacaccgatggccttcgtgtccgtgaagccccgccgtgaagggtgggttcttccccagagatttcgggtgcactaaattgtcagagggcaccagacccctaccccactcgttattttcttcatttcaaggactgaagagctggttttgtttcacttcatagctgtaccaagattccaaatcccgagtttcagttgccatcggtatctctggaatggtgaggcccttgtgcaacatattaagctctgcaagctctgctttctatgagagtttgtcgtgtcgcttcagaaaacgtgaaatactcctggccctggtgtgggatcctaactgcatatgggcaagtcacttggtatttaaatgggcctcggttttctcatctgtaatgaagacattggccactagatgatttttcttcttcttcttcttttttttttttaaatagagacagtctcgctatgttgcccaggctggtctcgaactcctgatctcaagccatcctcccacctctgcctcccaaagtgctggggctacaggcgtgagccaccgcgcccggccgctagatgatttttaagggtgctttcggcttgaactaaagagccaggaggtcacagaccagccttatgtccagatttggggggctaggctgccttactaatcacccccgaacccacccagccaagactgtgcggtctgtcttgagagcacgcaacgggggatctcagaaagtagagtcccggagagacactgggaatggggaggacccccgggaaggggtgtacacgccgtggaagggaaggccgctggtggctttagaactggcggttccgtgtacccgggtcaagtgcccgtgccggatgggaaagaaccctgtgactttccacatctcagcgagctcggcgggctctgcttaagaagggctctaagacgggaagggaggagccatccccactgcgacctttcccctcctttcctggctggctggctgtggtctgtcgggaatgagggggtggggaagccgggaaagcagaaggttggggctggaggtctgctggcaggcaggcagacatttggagccaactttcctgctcagcccgcagaacttttggtccttcgctataccagagtttcgtctgtttttttgcttgactgtgtgacccttctctcacactgttattaaataggtctcaagctgcgaaatcactgccagatccaaacgccactactttgccaggtgaaggccttgggcgaaccctttaaccttcttgtagttctgtttcctcagctgttctgtgagatcataacagtcttaacctgatattaaatgaattaatccatataaagcgcttagaacaatgcctggcacataaaaaacattctatgaatcttaacattatctgtatcatcaactacaaaactcccagtgaggggttttgctcattagcagcctaggcttgctgaatgaatgcaggaattctacaatgaccatttgagttctacttagtttgagttctaaatttatacttcacacagctggaagaagggatgggcacctctccaacaattctttctccccatattccctgccattgtctaaaggtcatgccagttggaaataagaagggtttgggtgagggcagctctatgctttaccattctgtcagctacaaatgtagctacctgcatcaggatttagtcctgccttcaacaccttggccaggctaactg

SEQ ID NO: 586546 - DNA, 4001 bp, Homo sapiens
agtgcagtggcacgatcatagcccactgcagcctcagcctcctggctcaagtgaccctcatgcctcagcctctcaaacagctgggactataggtgtatgccaccacacgaggataattttaaaattttttcaaaatagaggcgggatctcagtgtgttgtctaggcaggtatcgaactcctgggatcaagtgatcctcccaccttggcctcccaaagtacggggattacaggtgtgagctaatgcacccagcctaatttttttattttttgtagagacagggtcgcactatgttgcccaggtggggggccaaaggttttcagaataagaagaggggatgaagtcctctgggggtgaaaagctttattcttttttattattattattttgagacggagtttcgctcttgttgcccaggctggagtgcagtggcgccatctcggctcactgcaaccttcacctcccagattcaagcaattctgctggcctcagcctcccaagtagctgggattacaagcgtctgcaaccacgcccagctaattttttgtatttttagtagagacagggtttcaccatgttggccaggctggtctcaaactcctgacgtcaggtgatccacccgcctcggcctcccaaagtgctgggattacaggtgtgaggtaccgcgcccggccaaaagctctattctttgaaagattccatatacagaaccttcagtcagattctcactgtcttttctaactaaaatcccaaagccctttccctccaactgtgtttgggggaagtattcctcgcataacacatcaggggaccagcctctggagagggggacccaaatggatcttcaaaggttccactctgagcacaagagtgtagaagaaatctgcccctccagcattggcactgggattaaaagaagcgttgtactctttgaaatggattttacatacaaatgaattgatgaacaccatcaacatgtcagcttaattcagcccaatcaatacaccaggcattaaaaactcggagaaaaaaatggattgtggctttttgttgatgacactgaggaattttggccccaagccctggccaggcaggacaaatagggcagtctgcctattagctgtcaggcacatcttgggggataaaaccaagaccccaagtcagggctcaggggcaccatggtctccactttagcccccaaagtaattttcccacaaagtggccacactttgcatttcctacattccttttccctgctccgaccccttccgcccggcctcagagctgacagctggggctggccagagccaagcaagaggcatcgagaaagggggatgctaaggggtggggggtgggaagggatgtcaatgcaaccaagaagtgatcggaggggaagagaggtcccctcacccttcacattcccagcccggcgcccccactctccgcccccacacttgagcctccaagtggctcccgtgcgcttcccttgtttaggggcaacccttccattccgccccttttcagttccttcccctctcacctcatcttgggactcctgcccggtacccagccgatcaggctcctcttggccacgcatcctgccatctcctccgagcccgcctctgcccttctccccaggccagctggggtaccctggggtccccgaccttcctgggatcgcccagatctgcacgtcaatgcccccgctcactacaccctcgccccgtcttcaactggggcctgcaagactcctactcccttcaaagcccctcccggacaccgcgtccctcagggtgccccagggatgccccggggtcccccgtcctcacctgagtccgctcgaagctctcgcgctccgccgcctccagcccagcgccgaccccgcgccggctcagcaccttgggcagtgggttgggcacctgcttcatggagctggccatccgatccatgtcgccgcgaggagccgagtcaggggccctcggctgccccgggatccccacggcgccgcccgccccgccctacccgcggggatccggcgctaacgggacggctcccgcctgccattggctgtgagttctgccagtcttccagagaccccgcccctcgccgaacggcttccccgcccgcccccgccccttcaggagcccctccgctggctcggccccgactagcctctcggggcctcgaggcgcgtggtgactggtctggagtcctgtcagtcaccgtggtcccgccgttctaggcagggccggggcggggtgcggacggggcgaggcctggatggggcgtggcctgggcgggctgccctgatatgccctcgctcgccccgcccccgcccgcgcaccgccctctcctcccctcggccgcagtccccgcgcgccccgagcgtgctgccctccgccaagcgccgcccactaccctgcccgctcctgcagggggctatcccgcgacggcccgtggagatgggcggggatgacgcgggccgggcagtggggcctcccccgggggaatcccagcccgcctgcgaatagcccgttagctccttccgggcctgggacccgggagcgccggactgaccagccctgcggccgcagcccgggaaagcgcagccccgcgggcggggcgcagcgtgggcgcctggccggatccggctcaatgggtggccgcccccacccagctcccaggcttccccgtcctgcacttctccattctgcccctgcccatgccctctgcaaggatcgcagagcccaggtcccggagttcggggctgagtccgcgggcacctcccgggacctgcctcccaaacctcatcaaaggaacccgtcagagcttatttgttggtagaaagccctgtagacactttcggtttatcttaggctctgagccgcgcgtcccatcctgctcagacgtcagccagggtaccagcaagcagagagaagtgtgatgcttagcaggagtgctggagaaagttaaaagttttccgttaaactccaatttaggtgtgtttttgtttttgtttttgtttgtttttttttttttttttggtttcatttggagtcagtctccctctgtcgcccaggctggagtgcagatcgtaacacactgggaccttgagctcctgggtcctagcgattttcctgcctcggcctctcgagtagctgggactacagatgcacgccaccaagcctggctatcttttttgcagagatggagtctttctatgttgcccagactggtctcgaactcgtggcctcaagcaagcctcccaccttggcctcccaaagtactgtgattacagacatgagctacagcacccggcatagatgtattttttaaaagttatttgaaactcggagtaatgaatggcacctttaggcctaacaatttggtgattcgtgtgtgtgtgtgtgtgtgtgtgtgtgttgtaaatttggccaggtgcggtggcttacacctgtaatctcagcgctttgggaggctgaggcaggcggatcgtttgagctctgaactttgaaaccagcctgggcaacatagcaagactccatctgtacaaaaaattttaaaattagctgggcgtggtggtgcaagcctgtagtcccagctactcacaaggcgggaggattacttgagccagggaggcagaggttgcagtgagcagagatcgcgccactgcactccagcctgggagacagagcgagaccccgtctcaaaaaaatatatacatatttctttgtagtgaggggtatgttgctggattgcccaggctggtcatgatctcctgggctcaaatgatcctaccacctcagcctcccaaagcactgggattacaggtgtgagccaccctgccctgcctgttttttttttgtttttgtttttattttttttaataagagcgtttggtaaaaattcacacattcaatagagaagtgaaagaggggtgggcatttgcggttactaaggagccactgaagacttttgctcagatgtgtgcactgaggagct

SEQ ID NO: 586547 - DNA, 4001 bp, Homo sapiens
ccctagtaacagggaaaccagccgtttactatagttctgaattcaatgccaagttccttctctcaactcaccgggagtgtccagcagagggagtctcaaggaggtacttaataaagagaaaattgtttcattttaacactctagacagtgggagcattgactgtagccccctcctgtagacgcagatgaacaatgaacgcccgacatgggttctcccgcatgttcacatgtccaccggcatgttctattctgcgtggtggagtgatcagaaatttcgttttgttttgtcgaatggttaaatggaccttgtgttcttcagaatcaaagaggaaagcccctggaataacatctctctgttgccttctaaacagcccctttgtttctaagagagtctgaaaaaaaaatatttacagtctataggttatttacagcctcgttatccagggcctgactggtaactttattccggccagaaacctaattcatttggagccctgaaactaataacagattttcttttaagtttttttttttttaatcagcctcttataacagagataaaactattaatgccttccctgtctcactggccacaactgttctccggatttacaggaggattacattcccccctcgtgccctcctctgtgccacacaaaccctgtcccctctcatttgcgatttcatccacagaatatctgaacaaaaccgaaagaaagccgggggacccacgctaaaagtatgtgaaggctgcgatttcaatgatttcatgagacaaacatttacacgatgaaacgactgaaaaatcagacacacttgggtttaaaatttctcctactacaagcacacaaaaacacatcgaagtgtaaaaacttagttgattctgggttgctttctggctggaagctgacagaacggactgaagagaaacgaaagacagtgtgcgaggcagacctactgcttttctgccttgcgttcttttctttcttgctaaaggcagtcaaatggggaaaaataccccgatgccaggtgaaggtgcacaacacagatcgacccagaccgagccagaaaaacgtctccgccgctcccccggctggaaaacccaaagtccacgtccccttccacacgctaatgaggggagattttcgcctatttcattgttctgcctggctctgacatggacttttcatctctctcctctctccccacctagccccgtgcattccgattccacagcccccccaaaatcggaggctcgcggagaataaaggagcgtggggtgggcgcggaaagaaatgggaaggggcgcggggcggagagcgaagtggaaaggaggtgctccgaaaggtaatgtgggggggcggtggaagctaagccgcatcaccttcatttatcgcaaataaataaaaagcacagtcaccggtccgccttccccggcgtccctgccctccccgggcagccgcccaccctcgcacacgccccctcccctcctgcgcccccggcccctctccccgccctggaagcaagaccctgccggcgccgggtcccggtcatcttccgggcgagggagggggtcgcggccccctcgggccccgggtgggggctggggcaggcgccgggggctgcgggcgcggggccgcgggcagaacaaagctgcgggggccgcggagggcggcgggcgcggggtcggcggggccgggcgccccttaccttcgtacacgggggccatcggggccggggtgtccgcggttcatggcaacggggacgggaaagcggcgcgcgagctcggcccccccagcctcagtcggaatctgccatcttgagcctgtgtctccgctctcggcgcagccgaggccgcccgcgcccgcatcaccgcctcccgtggccggcgccgggggagggggccgggcgcgccgccgccgccgccgccgccgctgccgcccgggcccggcgcggggggctcggggctcggggctcggggcggccgggcgggcggagcggccgaggccgaggcgccgagcggccgcggcccccgagcggatccgcggaggggcgggagccgggggcagcgcgcggccagggccggcggggctcagctcagcatggctgggcgcgggggctccgcaaaagttgctggcggaggggggcggcgggcgggggcgggggcggggcgcggggccgggagagccacagggagtccgcgcgcaatcgagcgccgatggcacggatgcgaggcggggaaggccgaaccgaagggcagagccgcgccggcggcccgaggggaccgcgctgggaggggctgccgcgcagcgcggggggactgggcgcagggcgggccccgggtagtgggtgagagggccggcctggacccggcgggcgcacggctccgagcccagcgcagccgagccggtctgcagaggggcccccagaactttgtgtgtgtgtgtgcacgcgcgcgcgtgtgtgcccaggtgcgagggttcgcgcgtgtgctggcggggagggaaccgacccgaaagagagccccacgctggcaaagtggctcgcccatctcacagccggttggcgctcgcggaggtaggagtggaatgaatgaatgaaggagtgggcgcgcgccgtgctccggaggagggcgggtgagtggaggagcttcggaaagccacacgaggtcagaggcaccgaagccctgccgtgcacgccgcggaaatgcagcccccggggtggtcgctgggttcctgccggagtctggcttccacgccaccctgatcttctcctcctcgcgtctacactgtcccgagggccgccactccatcacttgaatgggagctcacaactctctgggtcctcgcttttctcagcgctctctcctatcagggcttccgctaaacactctccagactctccccagccgggagcctctccaggtttgcttctccagctgcctcccggatgcttggataggatgccctgccatcccctccaacttaggaagacttgttgagtctcctcttaggcactgtttttaaaactgtgggtcgtgacacagtaatagatcataaaataaatgcagcggaaggcaaccagctttcaaaaagaacgaaatggaatccaatagaaaatattagagtccattgcccttagtaagggcaactattgtttcataaaccttttgtttcgattataggtactggacaagtgtactggaccatgatgtcaattttatttccgtctgtgaatcgtgggtttaaaaaagttgaaaagctatctgtgtaaaataatgatctctaacactgtataactttcttaaaaacaacctcgtgattttctcactacttcttatcctttccggtctccatcctccgttcccatccttcagtccttcccaaaaaaggcaagctctttcacacttttttagtggtacatcacgacaccttcctctgtgtgatcttgtactctgcggtcttccttgcccccataatcaatgctacacttcctatcccttctcttaacctaatgccattcacgtttgcagaatcctagactactgttgctaaaaggacctcagaggtcatctgggccagccctgcccttttagagttgaagaaatggagtccagagaagtaaaatctgttgcccaatgtcacacagtattgaagcttaggaataggtctcgtggctcccactctagtgttttttgctccacaccggtcatttatctccttcccttctatcctccctgcaatctttaactttagtcttggcccaggtcatcctaaatattgccatcttcataatacgtggttctggccatgccacgctcctggctaacatcctctaaggactcaacctctgcaggtggggctgagtgccttggcttttcatcaaggcaggcgagtcctgacttagctttctaaggacatgagttcagcaagtcactgcttctctagccaaactggtttacttgtagcccagtgccagcttcacccatctctgtcactgtg

SEQ ID NO: 586548 - DNA, 4001 bp, Homo sapiens
agtcacacgtaattttcaatcaattattttttgttcctagcaagcagcattaattgctgctctcatcccagttctacggagctctccctccattcgcatgctcccaactcctaaaaagtagtggtaaaacccagttcagatttttttcctgtagttttcatgactcgtaaaaattaaagaaaaaattaactgaaatgatcaaactagctcctatgagacacaaagcagtcttttgaaatggttacttgtcacgatagttattttcattttttcagctagtttttattcttaattgtcgtcagcacataggttatctctaaactgaaattacggataatgtacatttataacaagttttacaaatcactaacaaaaagcaaaaactcattacttacctcacaatttatccaaacttacccgatgtccactatcgattttaaacaatgttattttataaacgtgcttagggtcaaagaaaataaccaggtagacccccttcgcttgagaccttatgcttatcaatgtaatgttcaaccaagattgcaaacaaaatgagaaaagtaacaaagttcaaatacagagcggcccaggcccaaaacagttttgcacatcaatccatacgcattacaggaaggagcctctgaagccatgttttaatcgaagtataactaaggacaaaatcgttatttcactttcctcgtaatcatctataaaggtccatggatctgtcccgtaagggttaaacttctcagtaacaacattacttaaaatgagtcagctctacaacttaaacggaatccttaagaacagtaaaggattctgacgcgaatatccctcccccgcccagaaaaccaccttcgtccctgcccctcgtggccgatggcttccaatttatgtttattttgccgcggttcatctgtcgttttactgactgcagacccagataaaaccgttactcaaaggaaaaaaaagacaggaaaaacataaaatggtttctttgtcctacggctcgcattgaacccggcccgacgccctgggtggtgatatcttctctgaaaccgggcccgcaaacccggagcaccccccctccccgctcttcggtgtggcttccgaacgcaatggcgccatttcatcgaggggaaggctgagcgcctttaatgaggtgcgcaggactctaaagatccaagctcacaaaacactccaaatccacctcgaaacgatatgaaaacagcccgagaagaaaaaaaaatagttaaccacttctacttcttgatagagaaagcacactaagaaaataaaagagttataaggaaaacgctgagaggaaggcgagccatgaaaatggcggccgccaaatccggttcccgggagagagggggaggggaagctccgcagcctcgctcacgaggacctgctgcccgccgaaacgctcgccgaggagacgccgtggcccccgaagcagcgtgctttagaaagggaataagaattcccgcctccgcgccccactttcaccccagcggggcagcgtccgccatgtgaaagctccccatcccccacccccagtgaagggaaatggcgccgggaggctgagggtggggaagctgtttgtacgctcaggcctccgctcaagaccccgttcataaaccttaagccccactgctactgaattggtccgatttcctgcctctctcccacggaggcggctggccgacttccactgaggcgccaacggcctcgccatgcccttttcaataactcattgatttcaaacccgttacctccatcgcggactcagtcgcttcagcccgatttcccgcagccgagcgagatgagagagatctccgcggacgaacacgaaccggactcgtcctggcgctgtagtgagaactgccgctgctcgagaaacaactctgcgaggagcacctccgcacgggacccggcgctgctgctactgccgctagagccgctgccgccgcttttctagaaccttcccccccactaacgcgtcttccgctacgtcaggccgtcgcgtaaacgccctatccgccgccaatggcgggaaggctctacgccccaccttacgccaaatgcgtactcctcccacccttgcggccagagacagtacccgacgttacttccgtaaatgcgctcaatgaattgcggaaggctagagtcctgctagttactacctcttggaatagggtcccgccccctgccttggcgcaaggcaggtgagaaacggtcgcgcagtttgaaattaacgccgacgggaggggcttaatccgcagcctggagatccagccccctcaacccgggaggtggtccctgcagttacgccaatgataacccccgccagaaaaatcttagtagccttccctttttgttttccgtgccccaactcggcggattgactcggccccttccggaaacacccgaatcaacttctagtcaaattattgttcacgccgcaatgacccacccctggcccgcgtctgtggaactgacccctggtgtacaggagagttcgctgctgaaagtggtcccaaaggggtactagtttttaagctcccaactccccctcccccagcgtctggaggattccacaccctcgcaccgcaggggcgaggaagtgggcggagtccggttttggcgccagccgctgaggctgccaagcagaaaagccaccgctgaggagactccggtcactgtcctcgccccgcctcccccttccctccccttggggaccaccgggcgccacgccgcgaacggtaagtgccgcggtcgtcggcgcctccgccctccccctagggccccaattcccagcgggcgcggcgcgcggcccctccccccgccgggcgcgcgcccgctgccccgcccttcgtggccgcccggcgtgggcggtgccacccctccccccggcggccccgcgcgcagctcccggctccctcccccttcggatgtggcttgagctgtaggcgcggagggccggagacgctgcagacccgcgacccggagcagctcggaggcggtgaagtcggtggctttccttctctctagctctcgctcgctggtggtgcttcagatgccacacgcgtcccgggggcccggttctccgctcccctcccctccccttctcgccggaccccgcgccgggagctgcgggaaggagtggagggtcgggcggtggcctcgcggctggcctggcgcgcggccagcgccggtagttagtggggggactgctctgccctcgagggggtagggagctgtggcgacggttgccccatttcgagacaaagcgcatttccccctcccctcccccacccgcgttccggcggaggcgccccctcccccagccgccacgcggggctgggtcgagacttgggcctcccggagggcggcgcgtggtcccgcgtccgcgaggcctggcggcgcgcggccggctgtcccgaggctgcggcgaccgcccagttaacgtggccgccgcgggggtaggcgcgtgcggtgtggcgcagtgcccttgagcccccgtgccgcggcctttgtttctccccgcggatgcgctgaccacgaggcccgcgctcccgggtgggggcgggcacccgcgcttaggcctctggacgccgggcttcagcggcgggggtcgggagcgggtgtttgcaagaggtgattcttttttcaaagtgtcacgaaacggggttgaagcatcttaagttttttccttttgttatttaattaccgattggaaagagggagggtttctgagcagaaaccaagttgggattgcagaacagagaagattcacagtgctttaccgttgtgagttgtttgggtaatcgtgcctggttttaaaccgaaaggattgtcctttaaaaatggaacatggactttattataaatgggacttagattggaaaagacattggtcccctattttaagccatgtgaagctgttttaggtaccaggatccccagtaaagtctttctagactcacatggttagg

SEQ ID NO: 586549 - DNA, 4001 bp, Homo sapiens
tcctgagctcctggactcgcctttcgctatatcctactttcaaggacaagggaggggagagctgtacatatagttagataaaagatgagaagattccttctggcatgtttctgttggcaaagggaactattttccaaaaggtcatctgaaaggaacagtaggttctgtgaattctcctaaaagcaggagggatgttaaggcccaccagaaaatgtatgctggcacccaatctggatgaaggtgttaaccccgcaccaagtctctggtccagaattatctgcaaatatattatcctggccaggagctccccagataggattagaaaggaagaaagagactgtaaatggaaagaaagataagctaagcatgtgctttgggtaagaagtcccagcccaaggagatgcctgggctgttgtctggggctggagccgcctcagtgggaggtagtcagagtgtctgaggtagaagaccccggggaaggaacgcagggcgaagagctggacttctctgaggattcctcggccttctcgtcgtttcctggcggggtggccggagagatgggcaagagaccctccttctcacgtttcttttgcttcattcggcggttctggaaccagatcttcacttgggtctcgttgagctgcagggatgcagcgatctccaccctgcgggcgcgcgtcaggtacttgttgaagtggaactccttctccagttccgtgagctgcttggtagtgaagttggtgcgcaccgcgttgggttgacccaggtagccgtactctccaactttccctggggcaaagtgggaagccatgagacggaaatgtaaaaatttttaaatcgacttgagattccccacacgcttcatggcaacactcaggtaaagaaaagatcaagaactcagcacaaatcgggctgtggagggtgagtgatgaggtgtaaagtgttaacctgatgtaaaccattagcatggtcagaccggtgattaatggagcctcaagatattaacagaacactaccgtcacaataaccacccccacatacttcctatttcccaaatgtataaaatccttgaaaacacaccaatccctgagacttctttgccccaacacctctgggcaccctctccatgcactacaacactagtctgatacaaaagccttttaaaaaaaagatcattattaatttccttggaaattaagcataccagctccttccagaataatcaaggagcatccaccaaccagcaggactgacctgttttgggagggtttcttttgactttcatccagtcaaaagtctgcgctggagaagatgtctccgatgcgggggagcgacaggcttcttggtggctggcgtggagaggggacaaggagttattatacgtagccagggccaggctctggtgctcctgtccatatgagtggtgaatgtattgaggcgagcccaccgcgcccccagcataaccctggtggtggtggtgatgctggaccatgggagatgagagatttccagagtaaacagcgggagcgcactgggggtacccaccacttacgtctgcttcctgatttaacgcgtaggggctgtaaggcgcactgaagttctgtgagccatagcttggaccacaacttgagtgggagtaggacacccccaggttcccggaagtctggtaggtagccggctgggggtggcgatggtggtggtggtggtggtggtggggcgaaccgatctgcacccccctgcccactaggaagcggtcgtcgccgccgcaactgttggcgctgaccgcgcacgactggaaagttgtaatcctatggtccgaggggtaggctcgggctgagcaggtccccgagtcgccactgctaagtatggggtattccaggaaggagttcattcttgcattgtccatctgtcactgagtgacctggtcctgcgaagcccggcgtgactgtgccaactttctcacttcctccatggggccggagaagaaaaatgatatgaatgtacagtgcgcaagagggggggcgggagggcggaggacgctggaggaggggcacgtgacggtgtcagccaatggctgagcctcctgcaaaagtttgccggcttccgcagtgatggatcaccgttttagtggcatttaaatccccggcgctccgccgtctaggtgacgcgcagtcgcccccccaggcagcctaggcggcggcagctgctgcggcgactgcaaaggccgatttggagtgctggagcgaagaagagcaaaagctgcgttctgcgcgcgcccgactccgctgcccgccccgccaggcctccgggaggtgggggctgggaggcgtcccccgctcccgccccctccccaccgttcaatgaaagatgaactggcgagaggtgagaagggaagagggctcccggctctctcggggcgggaatcagtgggccagagctcgccgggtggccgcaagtacgccggcccagcccgcagcgcgcccagccggaaggcggggaatccggctgacaccgcgccccgggttcccaggccacctcctctgttctgaggctgggctgggagaccgtggggctgtgaggagcgcatagaaccgtggtggagggcgaggctgggccaccggctcttcaagctcggaatggagggggaagagcgcagagggctggctgggaggaactcgggtgggcgtgaaggagacgagggcaagaaaagaaacttcccttcttccaggagggtcttcgaaaccctctccccacagcccctctcgtcattagcatggcaatgaggagtttctgtaattcgacttggaggggcggatgagccctggaaactcagagctcgccggaaaaggccgggggcggccgggctcttcttccccaccttccctctctcgtcgctctccgcccctttctctttcccactcagttttgcaccgggagccctccgggatgcggagctactcgaccgccggatttttaggggtaggaggcgggggagagagatgacgctggcggacgtggccagcgcgggggccgggcggtgcgctgcaggccatctgccggcgccctgagacccaggagcctccgcgctcccgcgtgggcctcacagggccggtccacagctccaacatagtagctgaactcccttcgttgcgttcctctttttctggaggggaatgttagaagagagagagagcttccttttataaccttcctcattctgctgcacgtctagagtgggtgtgggggctggcaggtgggaggggcggtggacaaatggctgatggtggacgggacactttaccccaacgacacctcctcccctttccaactggctgtgtagttgcttatgagaaccttcaagtccttccctagagagacacatgcaaatctgagcctcatcccaggccaggggtcctgttcctcatcaccctacttccctgaggctgctgaggtcgttaaattgttgtttactattaggtttcacgtcaaccctgggcttgtagagagaaaaagccaaacggagaccaagaattgatgcagtcttgggtaggagaaatcgagagcttgtccaggaagctttgctgtataaattataagcaatgctgtataaattttactccaaccatgtgtacaatgttggaatcagatgaaatttatagtgaatgaatgtatgtgggtttggggtttccactcctcttcagcctttcctcccgttagaacaaggaaggttttttttttttcaaggaaggtacatttcaaatatgttagtcaccctttcagtcttctgtattctgttctccacgtaccgaagttcccccaaacctgtcctctcaagagaaaaaacccatgctgactctggactccctcagtaacaatgaaacattctccccaaacatttcctttcagaatagtatttgtgactttgatccatcccaagcatggttaagagggagcacgggcaggaaaggcccactttctggggttgggcagccacccctgcc

SEQ ID NO: 586550 - DNA, 4001 bp, Homo sapiens
aagtcatgacaaaaattgagtgggccttcaatctacatgacccttccaatttacatttcccccacttttccaaacacctgttttagcgctaagccgtagatgcttgcagaaggaaaggcctgggagggcaggctgtacatcttgaacttaacgcttttctttgcctcttgccatatggcagacaagcatttcctgtagcccccaggctaggagcgcggggtgcttacttggaagatgggccaggcagcttggctgtctcaccccagggccctgattgcccaagactcgataaggggagaaagaagggcatcattggtccaatggggaaggcaggaaaaaccgattcgggggtcaagggccctccctcaagtttctccaggagccagggatagatagctgggcgattccgaggtccaggggaagggaaatggcccttctctggctctcagctcagggccccccgcttccaggccggatttgccttttcttcttcccgcaacgaagattcccgcccctcagcaactttgaaaaaagcatgggggatcgtaaactcgaacttcgccggttaatgggcttatttattggcgctggcggctgcttattttggatgccttacaaacatccgcgctatctgcgggcgagctactttccctccctccccctccccccgcgtgggccgcgccgcgcaggctgggcagggaccagggctctgggtcctcccggccacaggaaagagcgcacaggagggggcctgctcgctggtgtcctcgtccctagtcagggggagctgaggccagcgccgaggacgtcttgctgtggggcgctaagccggacatgaattttactgcgtccccacgcccaaatattaaaaagcaagttcacaaggtcagcctgcctgcagcttgggccaaggccggccggctgctgcgcgggctcctagttttctgatccttctcctccttgtgtctgcctgtctgcccgcctgactgcagccctctgcagccctgcttacccagggaatccttctccggcgaggctttgctgctctcggaaggggccggggagagctcctccgcggccgaggacgacgcgtgcgcctcctcgtcgccctgcgagcccccgccgctgccgcaagccagcgtggggggcggcggcgaatcgagggctcgctccttccgggccgcatcggccgagccggaggctagcgcgggcgggagatcgaaaccgcgccccgggggctgcgcggggaacgggccagccccgagttgctgcgcgccgccgccgccgctgccatagcccttggcggtgccgtaggcctgagaaaggcggaagtagccaggcactggcaccccgctggaggtgcccagggcgcagccgtcgggcggcgggccccgcgggaagggagccagttcggcggcggtggccgagactttggggcatttgtccgccgagtcgtagaggcagtaggagctctcttctttgatgttctgcgcgaaagagcacgaggtggcctgcggcgctggctggggtggttgcggcgggggcggcggctgctgctggggcggcggcggcggcccgtcaggcggctccatccggcaagaccggggcgcgtctagccacaggtctatgggcgagggcccgtagccgtgcgccccgggacctagacccccgccaccgccaccgctgcccggcgacgctgcctcattgcgcttgccgcccagcgtggggaagagcccgcagctctgcagcccgtagggcaggtcggcggcgggcggcaggtagaccccgccgtgggcgtagtaaccgccaccgccgccgccccccgcgccaccaccaccgccgcctgcctcgcctctgcccgagctgatgagcgagtcgaccaaaaaagagttcgcggcggggctctccgagcatgacattgttgtgggataatttggcgaagggagcagatagccctttctggctgacatttcttgtgcaaaacatgctgaatacgattagcaatccccccgcaccgcggcgggcgcccgcagccaatcccgagccagagtttccgcgcgaccactcccagtttggtttcgtaggcgcggggccgctctccgagggcgccctcagagcccgcgattgatataaatatgtaatctgtattgatgggccaggagacgcaccccgacaccttggcccgaaggccgggagctgtgggggctgccccaacgtggctggtggggggcctggccattgggctcgccccgcccctacccggacgtgagccccataccggggtcccttagaagggcccttgggccccgcgcagttaacaagtggggtgtttatggtgcgcgcccagtctgccttgggtgctcaccatccctgtcgcagaagctgccactagtccccggtgtactctaaccactgaagcggccgtgtcggggactcacgcgcttcccattcagctctggatctggaactggccccttgtctgaattctgcctcctcaaaagtggcgaacctggccctatggccgtcaggatcctcagagtgtcaggagcccagagtgaactagaagctgacttgcctctacttccagtatccacagatttttccccaaaatgcagtggttgttccctagcccctaacccccaacacttttctcccctagtccgttgatccagttaggatcttctcctctggtgttgtgctcacccggcttgccttctctacaactcctgtcagtggactttggtgggctggcgggactgggggtgggaagcggctgccagccttgatggaaagacggccccactcccactcccaaggccagagccagatccaagcatcccctcatcacctagggaagactctaagcccacagtcatttcggggaagtaaaatgctggccttggggtccttggctggcccaaagtgagagacttggaggggtgtgcccggtgtacacctccgctgctttatgttcctgctctcctgttagctttggcactcatatgctcctggaggctacaacaagaaccagtgtcactacactcctacctctctgtcccctcccctcttcccctccctcccataccctcagctagggcagtccttgctcctgcagtgtgtgcattttaacgaggcctcggtgaggaaatcctttccctgcaaggccgggctgggctcatggtcctgttataagagcatgtggaggtcaggccctttgctcagcaggctcaggggctctgttttagccaactggaaatggccggcctggggtgctagcccccaagtgtgagcctcatgctagtctcaggaaatgcaaccttttccggccagatccagtggagcccgggaggtcgctgccttgcccctggcccgtgggctacaggtctccaggatactctaggcctgcccgcccctccggccccagtcggagctggcattactgaacgccggcatcccaggaaatagaccgctcaggccgctgccttcagctgggaaagactcttgcatccgggtcatacgcggcactttgcctccttcctcccagtgtgaatccagcccaaggtggaagaggagcctgagaggaccctgaaagcgcagagagagctggctaggtagagctccagctctggcttctgagattcaagcagctgcggtcgctgcgggcagtggctgctccgagctccgggcccagaaggccgctccaccgctagcgcggcgctccagccacttcaacctcggcgccccacggtgacccggccgtaaggactgagcatcagggtgcggaggaggaggatggagagaaaaagagagagatagaaggagagacggacagagggagagaaaagagagagaaacaggaggggagagagaataagaaagccagttctctccagcctgacagggtcttgaagctgcagcagcggctttagagggatcaagacagggtctgtgccaagagatcattaactctccttcgctcttcgcatgctcctgcgcccaag

SEQ ID NO: 586551 - DNA, 4001 bp, Homo sapiens
cacagataaaagccagctccctaaataggcccccggggaagctgctcccgctgcccccagaacagaaaggagagcttcgcacagcaacaggcgagtttgcgctgcctaagcctctttgaaagcagccaagtgggggttgccggctgcctctcgcaggccagactaaacaaacagccgcctgcggacatttcaccttccagcacctgggctgccccttcccaaggcagtaaaggcggctccagtcccagtctttcccggctgcggccaagactgggcagtccttaacatctggggcggctgccgggtctttgtcagcctgagtcctggccaccagcttctgcctccccggccagccttccggctccgccgaggtggggaggtggcggcggaagccccctaccctaggccttcgctgagcaccacggccacacggccatcctgcacacggcagagcagcggctctatcttaggtagggtgaagggaaagggggcttcccgaagctgcgggcaggctctacttgctccccctttaaaaaaaaaaaaaaaaaaaaaaaaaagacccacaagacaaaaaaaaaatcgcttttgacagattgaataacaattgtgaataacatgcagttgggcagaaggaggcacgtaattgccaccacgccagaggaaaatggcttcctttggacaaaaaggccaactttgggttaatttgttcttttaatatattgctagagctaagcgggctactttatctgttaaacgcgctcctagcgccgtcgttaaacagcgacgcctttgaatcccggccgggactggagtcccggcgcaacacatggcttttataaaaatctccggattacctcgctatcaaaagctcccgaagcccttgcagggggaatttacaggcgcccacctccggctccccagcctggagctggccccgagcggggtcgagctgctgggcttgggagctgagaagggaaaaaagggaaaaggggagttgtttttttttgcaggcatgccttggccggtgggtatttcacggccaatttcagcactcgccacgtgatcccgccttttataacaaagttttgttgggggaaacctaaaggcccttcataaaccttatatgcttataaaacagcatataaaaatttaacagcggtgctgcgctagatttccaactcccctttcataaagcgcagggcgctgcctttatacgtactggagccgccggccttgtcctcagtgtggccggaagacgactcggggctgctgctgctctcggggcgccgccgccgctctttctcctctgctgccgccgccgtctcccggcagccgccgccgccgccgctgtccgaacttgaagttgccggcgcgcccgttgcagccgccgccgccgccgcggaggtcgccgtggccgccgggggccccttctcggcgctcttgtccccggggtagtcggaggaggcgaggttttccggggtgccgtaggctgtctcgaaaaactggtcgaaagcctgtggcaggacgccgttcctgcccacggtgctatagaaattggacgagactgcgggggtggggtggtggtagacgttggccgagctcttggccagcacgtcgccaggcacgccggccgcgctgggcgcctgcaggcagtctctgtgcacgagctcctccgcggagtagcagtgggccagattgccgcgggggtgccatttagtggcgggctcaatggcgtactctctgaaggtcacttcgcgcacgggttggacctggggcaggttggaggagtaggagtatgtcattgggcgcgaagacggggtctggggcagaaaagaagggaggctggagaaatctggacccgagacgtagtaagtacaacttggcaaatacatgttagaggagcagggaccacgctcatcaaaatccattattgggctaccttgggctctccgcagtagccgagcttaacatgattctccactgcagctgcctctttgaagcggatccgtgaagtagaaatttggagacgtaagctgacgtggaaatctatccccatccttagcagggaggtgctggtcatgtgacccgatgttgaaattgacaagctgctagctagtccgggccttttccccccccctttccttttttttttttcctcctctcccctccctcccggcttcctttctttgtagccacctcaggggaagcaacagatcgtcactcggtgttctcaccgaaagcacgtaatcgccggtgtaactcatgttggctggggggcctcccggcgcgcgcggagaggctggggtgcgcccccatgcagcatgcttgtgctcaattgcagggtcctcgttctcgagtgtgcagagggcggtgagagctcaactctcgtccccacctcccacccgcagctccccgggtgggtgagggatgccctggactggggatagccaggtgggagtccgtcgctgtgtggcctgtggtctcggagtctgttctcctggagtctcgcatttgcacccccttcttcgcagtccccctcccatagacttgctctgggaagcgcctctgcctccgaccctagccggaaccccttcggggccagagtttgaagccgtggatgtgcctgcctggtggcttgtccgatttgcacggtgacttgattacactctctcattcatggtcacttccgaagcgctttagtgccttccgtccctaaaccgccaacagccagaacggcttctccccgcggtttgtcactgatccgcagggcccggaagggccttcgtcttacccgggatccacctctcccctcatcttccctgcctacctcttcatcccaccttctgtccttggagaaactccctcctcctcgctgcctgccgggcttcggagtgactcggcagagacagaggcacaggggctgccctgctgctcaccggtccacccatctgcctggtcttctggagctgaggactcgggaaaccatgcaattgaggcaagccttgggctgctttagaggcgctgacatccgaggagacttctcctgggtatgctgcatcttcgtggggggcccatcaggctgcttacagagctccaggggtgtggggagaatggaggtggaaaggacgggctgagggccaaggagaggtggctgagaaaggggtaacccacctactctcctactctccttccttgcaatgtgtgagagtgaaagcaagggatgtgcagggcaaaaactcagagagctctgtgcctttcctactgctcattccacaggaggaatacaataccagagaaaggagaggtgcttcccgaactccctgcacctggggaaacagggatgtctttaaaaagctaggtttgtgctaaggatagagagaggccatagcaatactctgagtctagctttcttgagaagaggaaaaaaaataaattaagaaggcaaaatatgctccccatcctgcaggattgaaggagcaatgtttggaggaagcgaaagaaaggagaggacacagagcacagagcagccaggcagagccaggagctgagaagggcccagacctgaggcctcccaacaactctcttcttggaaggatctgggatgttgctgaaggaaaataaaaaaatatgtaaaaagataaccttttgtttttccctctccaggaaatagccaaagttatttacatatcttggggagatttagagtataaactctaagatctttggtatttaagtgtcaacatcgatttatttatttattgctgagctgactgtaactgactcaataacaaatctaatcgtgtattgcactggaaaagaaatattcttattatgtattttctccaaataatggcctaccattgcatttgaatacctgctgtaaatatcaataatatgaagtaattactctgtagtcgagtaaactaatttattagcattaatgtttatgtggctctccacctccccccaccaccacctttacaaggattgcttatcacaaa

SEQ ID NO: 586552 - DNA, 4001 bp, Homo sapiens
attattattaagcattattatcattatctgggcaaagcaacgagttctgaagcgtttcttcaagttgccttcttgctctatttttaatccattaactagtggttttcagtttgttgatgacttttttctctttaaccctcctgttctggaaccagattgtgacctgccgctcagagagattcgtcgtggctgatatccgcctccgtttgtccttagtaatgaatttattcgtggcgtattcccgttcaagttcttttaattgcaccttggtataaggcacgcgcttctttctccccctcctataggagctggcatccgagggatgggagaccacgtctagaagacaagggagaaggcaagttacacagggatcggaccccagccagggcataggcgacagctcgatctgagccacccgccttgcagcgcccggctgctctttgccacccgctgtacaatcctgtcttctgctaaagcctagagggtcagtggggaaggtagttagttctgaactgaaatgaaatcacccagggctccagtgacttccccaacccggccatcctgcaggagcagcgcgtaggcagcctcgagtgatagcctggtccaacggcccacaccttagcgccaggctcaaggtacaacacttctgtgcctgcctcctttctgggtgcccgtcccaatactcgaagcttctacactgaagccatttttgagagaatgaatagggaggggcaatttggggagctgttttctggtcaatttctcatccttaaattggtgtcaggggctggggagggcggggcgcagagggagagggaagctagccgaggtctccacaagccacccctcacccagggagagccagggaccagctcaactcgaggcagtgcaggcagacccagccagccatgctcgggctcccaggggtgcagagccgctagggcagaccaggaagagaacagaaacgcacccgggatcgcccgggtgcgagcggagaagaagctggagcagagccggaagaccagggctgggaataggtcgtcatttaccgggcagagtggacttccagaggtggggaggctgcgcctgctctttggggcagtacatttggccgttccagccgttgggcagcgcccagggctggtagctttccatgggaagacccaagggttcgtggcgcgactcgccggggcccccgaggcccggcaccactggcatatccaggtagccaggcatgggctgatggtggtggtaaggcccggctgcgtagccctggtggtagaaggcgaactccttagcgcgggagctgaactcctcggcagctgggccggcggtatccatgtacttgtccgcgaaggcggcggcggcggcggccgaggcgggctgcgcgcacgacttgatggcgttggggtgcgggcccatgcgggcgcacgggtagtagccgctgccgaagtagccatagggcagcgccgcgggccccgacgagctctgcgccgctgccgagcaggggctgcattgcttggcggcctctgcgcccgccgggcccgccgggccgggacctcccgaggacgacgcggcggcggcggcggcggctgcagcggcagccgcggcagcagcggcggcagccgacgggggcgcctccccgggggcgctgctgtaggcggacgcggctcctggcgccaagggcgccgggtgcgccatcaggttgcggcactggttggccgcggccgccgccgcagccgcggccgccgccgccaccgagaagttgccccctgccgccgcagccgccgggtgggggaagcccccgcccccggccccggcagccgccgccgctgcagccgctgctgcagccgccgccgccccttccatgttcttgttgagctcgtcggccaccaggccgccgccgttgtcgtagagaaacatgacggtgggctcgatccagcgggggtggaggagcacggaggctgtcatagcccgagccgcatggagaagaccccagtggcgctgttttaaaaagcccccaagaagtgaagagcgcgcggcgcggggccggggcccgagcgaggggggcggatcgcgccccgcggggtcgcgccaggcggccgcccattggcccggcccccccgctccgcccacggcgtatgcaaagcgggcggctccgactccagctctgcacggtgcacccgtcgtccccgccgcggcccgcgccgtccccagcgccagccgcgcggccgcgcaccattcacccgggggagaggcggaggaacgtgcgggtggggcagggaaggaaggcggccccatctccgccccccttcccttcctttatcccagtggggcccagacccgcgcaaccaggcggggaggggaggtgggcgcgcgattgggttgcgatctggagcagtggggacaggtcaggtaattctgccggcggtcagggatgggagagtggggaggacgggaccagcctagctcagaatgggtgtttcttggagcctctgggactgttttctttccaggaaccggcgcgtatttctgcagtgagaccacaggacggacatcggcgccttcggcttcgatggagttgcgattttgctctttccagggaaacagtggcagggtgtttgctgcttatcggttcctgcggatatgcctgggtcccaggacattccactggaggcttggactgcatttaggagcccctatcccttccctgtccacactgttagtgagcaatttcatatgtttgcatttagacccatagactcagaacgactcatcacacacacacacagtgtacactgacacactcacattcgcacacttaggtatacagcctgatccttgctctgacctggtaacaacgcttcctcctccagagactttgagatagagcgagcgatccctgtgcaccattcatccatgctcccacctcgccagtatggctggcttagttctggaaggggcttaagaggaacaagccccagctgtgcttctggctgggacttaaaccccccttctgggccctaaagccacgcttctttgtggaccggacctgactctccaggaatctgggaacccgctatttcactctattttgggacaagaaaaaggggctctttggggccacttcctgccttcccctcaagtaggatctccagcctgcagagggtgcctagtccttctttgcccaagaaccagtccaagaagcctttcctctgtgcctgggaaatgcaaccttttcttgggagcatggtagggtgttggtgctgaagaaccaagcagcgacccgtcttgtagctgccatgttttgtcgaggggttctgggggtcctgctgctttagagccacatacttccacttcctgattcactactgtgagctggtcagatgcctagaagaggaacaagcgttcaaagtgaaagtgggcacattaccggaatagtgctggggagagtgctggattcttttccaccccaggcggactggtgagaagccaggcttggacctgtcctctgctcctagcttgcacactcagccctaaactcagagcagcacgcataccacccctcacacacaccccaccatctgctgtctaaggcccctgggcttcctgcaggatccagaccaatgtggctgggcttgggcttttatctgtcctgatcctggatttgtcctgaccaatgtaagtgtcgcccaataaaaccttctatgacccccacaccagccacccccccaccaagtgtgccctttccttcttgactttttagcagttctgggtaaatattgatttgcccccagtttaccttctccctgactggccatttgcagactcaggaactagcctctgtagggacttgatttttctgttactttctggccgtttcaccaccccccttcctccctccaagtggcattgtaaaactcacagtgacaaagagacagagtagggttctaggcccctgttcctggggacttgaaggcggttttacatactggtcagac

SEQ ID NO: 586553 - DNA, 4001 bp, Homo sapiens
agtctaagctgtcagctgaaatatctacgggactgtcgagggaacctggcaaactgggtgaaactgcatctgaaagctgcaggcaggaatctgtggagaaaacgctaaagtcctgcaaagaggggacctcaagggcctcaggactgtcattgtttaggccagctccacagttctggcccattgttgacaagcagttgggaacagtgggtgactggtgctgaaaatgtttcagatttttctcattgctggttaaaggcgagactgggaaactttgggagtcgccattgtgtccattgggagcctgctgctgagagagggcattttgctgaaaagtgtagccttccctctccagaagggccccagagacgctaagggcttgctcaaagagcgtcttctcttcctcgtcctcctctactttctcggagtcctcaaggcttttacatttcccttcgctgttttggttttccttgcactgggtctgcctcttgtgcttcatcctccggttctgaaaccacactttcacttgtctctcagtcaaatccagcagcgctgcaatctccacccttcggggtctgcaaaggtacttgttgaaatgaaattctttttccagctctagaagctgtgtgttggtgtaagcagttctcaggcgccgcgatcccccgccgctgccatcggcgatttccagggattctgcggaaagggaaaccaacaagagacacacgcacagttggaggtggaggggtccgagcggggttattccactggagaataaatatagcagaaaagatcaactgcaacaaaatggccgcccctggatgcagtagagctattgtgctgcctttcctgggagcccagcctgggcagaccccgtctcctccatctctatcgaattcatgcctgtggctccccccaacctcttcatccgggagcaaactttatattagccacaacacaatttataattaatgcgtcagctgcttagctgagcaagagcgatctatcactcttcattactgtcaaaaagccaaactctaggacaactagacaggaggaggtcagttccaactcaaataaatcatcccacattacacaagttcgggaaagtttccccccacttcctaaaaatatatatgtctcattgtagagcgcaggatcccctttcctctccatcaaacccactcctgaacccacaggggcagggacaaggcaaccaagcatctctccctctcctccttctctcccagcccactctcccctccccccacagccactctcggggcagcccggagaaggaagagggtcccagagacctggggccaagtctttggactgacctttgtggctgaggcaagcagggccggtggctgcggcggtggcggcggcggcggcggccggcagaagtgcggttttcttggccgccttcttctccttcatccaggggtactcgggcggctgcagggcgccggcgggcaccgggctgccgcggctgcccgcggggctcggcttggggcggccgccagcgccgtggcgagggtgactgccggggttcaggctgggaatggtctgctcaaaaggaggaggaatcagtgtcgagtgtgaaagcgtcgaggtcttgattgatgaactttgaaatgtatcagcgacagggggaaaagatgtcaggcactcagcgagcgacggctggctattgataaaaccaatctctcgctcaaattcgtaattcatggccttctccttggagccccctcagagaaaaagttccctcttttggaggggctttgggggggcaaggcctaggaaaaaggcgagcgcagaggaaaaaaaatctatcatagaatatcgctgctagggtgttttttttctaattcactgattacagccgtatggggaccgcgctactattaaactattgaattcatggagacaaggttgaaattggaccgaattggctgtcacatgattgcttctgcccaatgacaatttgggctttaatcaaaagaagccactgtctgtttgattgatccaaaaaagtcgggaaggaacgcctcattgggggccagcgaggctttatttacacttttttcagagcaaaaatacatatatgttggtgtgggtggggatgtcccggagtacgtgggggcgagggtgcctgcgtgcctcctgatctgcaaggatctatctagtgtgtgtgcctgggagtgtgtgtgtgtgtgtgtgaatgtgcgcgagtgtaagccctgctgtcggtcccgccggtggctgccctctgcctcccccgcacactccgcgcattgtttgggactgtcgggaagacgcctcgcacctcacaaatcatttaagcacctcagtctgacgcctgcagtcattaacaaagtaatccattaatcttcaaagttttgacacccgagggccctgcgtcccagccacataagttctgttaaagcaggagaaaggagcagaggaagagaggagatgagagagggagaataaagagagagggaagaagagagagtttgagagatggagaaagagaagacagaaaagagagaagaaaggaaagattttggttgggaaggggtcttccttttctttcccttttcctccttcacttttcctaaaagcagttcctggatctcaaaactgatctctctcggtctgttttccttcctgtctgtccctttccctctttttcctcttctccccctttctccctccctctctcttctgtccgcctccccttctcccctcagcctctcgcccccctcccagtgtccagcccagagtctgcgccccgggcccattgttagcaggctattccacggcagctttgcatctggctccggcgggaagcggaaaacgggaggcggctctcgaagcttcccgaccttcctgcgccatcaacttctcaggagtggctggagaaagatgcatgtgccaagcgagacaacaaccccaggtccatgtgtccaaatccccgtagccagggcggcggccagccaaagaaatgccgccccgagcaggcgcgtgcggctcctggcattctgggtttcatacccgtagggctcgggtgcggtgagtatttccgatttccaggaagtctgttggaagttaccagcagggaaagagaagatgcttgctcctctctttccctccctctctcttttttttctacccttcttcttgtccttgtcgctctggttgggggctggttggtttagatacagcgagtgctccctggcagcctgaactgcctcccacaccttcctgatccttgggcaccggggatgtttgcttccgggttctgttgtgggaaacagcactgcgggggagaggaggcgacccaaggaggaattataaaggttttcgttctccttcattatcttttttccaattcggagacttgagactgagcgcatcttggacagtgctagagggttcaaaagataacacctttaggtaccaaaaaataatttttaaaaaatccaccaagccagaaagaggtgaggaggctgagaggtagatctggaggtacctctttcccccccaaaccctgaggatggtgattcgcttttgcttcctttgaaatagactaactgatcagactcccccaggccggcaggcatcaatggcaggaaaataaatcattctgatggtcagggagagagaggttggagggggagaaaaatctacgtagaaaacaagaaaggccaaccaaggagcaaaggcaggaccccatctctgaggccagcgtcaaagagggtttggggtggaaattagacataagtggcctatatcattgaccagcccagagcattgccttgcagatagagatgctattttggaaaatgtgaggttttttagttttcttgcttttattccaaacaaagctccaaaggaagtctgggcgcgatcaatcttgctcaccaaaagccttgacagcttctagcccttaagaacacatttcagcttccagctccttccaagataaaatgtggccgagc

SEQ ID NO: 586554 - DNA, 4001 bp, Homo sapiens
aagtgcctggaagcatcatcaataaaatggcagcgcatctgcacatttccctcatcgatttccctcttccagctgctccggctgctcaggtcagcccctaatcctccatcccctgcctgaaaacaccgccatcctgggagagattccccttctcacccacccatcccccacccctcccaggcaatctagccctgcaagccggtccacctctgcctgcacctggcttctggaccctctttccgcctggggatcagctcctgagactccagccctgccctgctgcagtggacaaagccacccttgcactgggggccactgggcccacctaggagcccccctagtgccccctcctttacacccccaacactttccagggaattaaattcagagtctgaggcgctactgggaatctttcaaatggtttcggttctaaaagagaaacaaaggaagagagaggctgagggtcctgtccatgagccagggtctcctcgcctgacctttgtctctcacagccataactcactctagatatgaacaatcggcggaaataccttaaaataaattccatcctcctggtatagcctcgacttccatcggctagctcgcccagaaccgctccatgagtgctgaaaactgcaatcggctcagagagcgctctccggagaaggggaaggagaaggaggaggtgggtgcgtgggggttgggggaaagctctggctctgtagagaatctagaaaacgtaatcacaggcgaagcctgtctgggtctccgctccaaatgccacaataatgcgctgtattatgtgctcacgtggtcatacgtcaacttaaatccttttatttgaaatagggaaccactgaaggaactaggtttccaaacagaatatttagctttgggggagggtaggtggggaaccttgaccagcagttttgagtttaagagttctgtctaagcaataggatgcttggagccatcctcccatgaatgccatataagacatacaagcttatctccacttatatttctttacacaccctccaaacacaagggttacagcaatgctattcacatttttagaatccatttaactttccttacagcctcccacccacggacaagctggatcctgcacacccatgcaccccagtctcctctggcccacaggccagtatatcaaaaggcaaggggcaggcccagaaataactggcctggacagcggacttcctcacagcctgccattgtatggagtttgctaacacccacaccatacactacagacgcaagaaacaccaaaaaggcacataattacctgacaaaaggttaaagcatctcctccaagtccagttggttttgttcagtgggagcccactaggaaagatgtgcttggctatagagtggtgggtccgggttttgcaaaatctagagaaacctagtgccctgactaaacttgcacttaagcatttcctcagtgcacaactgagtgatacatggaattataagtttctaaacataaaaaatatcagaggaaatgatctaattgctctgcaagagacccccccccccaaaaaaaataagaaaaaaaagaaaaagaatcaaccttcactggagtgccttaagttaacaaggcaatctgggaccctctccacaggcaggtctgtccacccacttttccaagacaattctgtgtccaccagcaaattctctccccacccccacacaagttcctatagagatatcaactcaaagatgagaaagagcccccttcagaactctcaaaataatcttgagcagaaaaccagtagagaaccaactgtgctcaggaagaacctaactgaaacaaataagctgctcccacccttggttccacccctactcctgccttctgcctgatgacattgcccactaatttcaacattgtaccgtttcatgagctgtctaaaaatcttctcttttctggtcttagtttctgaacttctgagagtgctctgaggctagtgagatcctcaggccatattctttttttcctggagaatgggtcttcagctggctatgcctgagtgtgaggactcacttatagcagctgcaggaggctgtgcatgattcctccccttcactcctcccctgcagaggaacagaaggggtctgatgaaaatgtaaggcctttcataagagaacttgttcatgggttgtccaaatcagaaaggcaataaaagaagagacctaatcccctggaagcaagtcctggcctaagctggtgacaatatttcagtaaggttcaatctgtggtgtagctggaagagaacctccatgtgaacttttccagctcctatctaagttacaagctggaaagtaagaactccaagtgaaaacctgcctctctcaggtttgggggatagaggacaggagtagaagctggtttccaaaaagcgttctcctgacccccaagaactcactcctctcattcttactgctgcctgcctcatacccctcaccaatcattcacactgagctctccagataccctagaaagggacctggaggtattgctggcaaattcctccctacccccaagtttctgaagaggcatcaactcaaagatgagaaggggcccccttcaaagctcttggaacagtcgagcaaatgaaaactcttaaagccataaattgtccgggtgcggtggctcatgcctgtaatcccagcactttgggaggccgaggtgggtggatcatgaggtcagcagttcgagaccagcctgaacaacatggtgcaaccccgtctgtactaaaaatacaaaaattagccaggcatggtggtgcatgcctgtaatcccagctagtcgggaggctgaggtgggaaaatcacttgaaaccagaaggcagaggttgcagtgagctgagatcgtaccactgcactccagcctgggacagagcgcgactctgtcaaaaaaaaaaaaaaaaaaaagccataaatcaatgaaataagtcattggtactgcttcagagaaatgccttaacgccagcaaagctcagaggcatctcagctccagcctggggcctccaaacggctgctaacatccagttaatgctccaactgctgtttaacaattaacattaatgacttggggtgggatgggtgatttggtgggatgagaagggaaaaatctgaaaagtcaaaagacatttaacttttgaggttaaaaaacagcttctctatgagagatcttggcctgggcagcctatctggggaaccagcagctgacagtcctcctttgccactctgcaatccagtttcctggagcaaagctacgggccttttaaaaacccagctgccagtccctcttcactcacttcaccggcctccaacttggcctgcgctgggactgatactgtggtcctggtcaccagagccaaaatagggggaaagctggcttggaaaaagcaggcaaccaagggtacacaccgttagccaatatttgcaaggctgttggcagattagatatatctgtactcaaacactgcaatctgatttctctgtcaaaagtacacttaacatttttgtcccattacttaaatctagtggattttctactcagcatcaggtaaggctctcttagcccactgtgtgcgtgtgtgtgtgtgtgtgtgtgtgtgtgtgtgtgtgtgtgtgtatgatagattcttatttaacatgagatatttcctgtgggtgcaagtgcagtagagaaatgggccaagttctctggacacgtgtggatgtgtatattgtgttatacacaaggccccaaattcctgcaactatttatacatgcaattgttctgttgtttgctgagatggaaatcatatacacagagttacaaattcctgaaatgttccatctatatttgatataaacagacatacagtagctgagaaagtaacacagcttgactattgctctgtttaccttctattggaaaaaataattgtatccagaacaccatatcagccttatagcacgactg

SEQ ID NO: 586555 - DNA, 4001 bp, Homo sapiens
ccccaagcagctttgatggcccatgaggcaagaacccatccttcttctctggctgtacacacctgtgaccgtccaggtcaagtgtaagcttagatgcatacctccattcctggcagaatatcttcctaagaggaaagatgtctgtgctcttattgctctctagagtgagactaaaggttgcattccaccctcgtactcattaacttaaggaacggtggagggaggatcattcggctgcctcagttttctcatctgtaaattaagaagattgaaccaaaatggcctccaggtctccttcactttggacagtctttcaatctgggaatctctttcagccccaggaaacaatcccagagaaagtagggctggcttgaaagggaaggggttgccccgtgattttggagtcttcagaagaggtgccagagttctgtaagttgcagcctagagggtttcaagacagccacagcagcctccctcataccatcaagggaacagaacacacgtctcttcctcctattgtttccagcccatgtgtttctttggaacacgaagcagaattattcttgggacagtgtataatatagggaaggggcaacacagcagcagttgagaaaggtgagcctgtgttctgctatacaagactgtgtttagggatgcagagaccaggggagtgccaagggcagcctactgcctgcacagaacccactcattcagaggggaagccccaggcttttttgctacattgattctttgggtttttcttctctttcattctaaagagtcattgatctgtttctatgtgggaactgctagagggaaggcaacagtgaggagagcagagtttggaagcttaggggaacagggggacagaggaaagatggtgatatccaccccaccccaccccatagggaggaggctgagatataggggaatggggcccgctgggacaactgggtatgaagtcagagatgctatgcgaagggacttccctcctcccccatctatctaggtaatcttcccatggctccatcctgggtattaagtactctactatgcctgtcacagttgaattcctgctgtaataaaacaccgggtatatcatagatttcagcaaaactagggaaggaagcctgcaaagtgccatttttcttcaagggggagagtgttaagtacttaattcaaactgtgaccattaaagtgtctcctatccgatttaggtcgatttcagatgttgacaaaacttttgtctccggagtcatgcacaacttggctctgtgactaaagcagatgagtgtgtattggagggagggagaaagagagaaaaggagagtatgtgtaaggctcattttggtaaaattatagagcttacacaaaatactgtctttaaaggtcaaggatttgaggggccagtagggtttgcttaaaaaaaaaaaacaattaatgagatagaaaatttgtcctctcggtgaactcttatggttgccctagcaaagggcagacaatgcatgattttgaagcacaaagtgggattttctaatctcttataacaagctcccttaaaggccaatttgaagcaggcaaaacaacacttaagaaatggcaatcatttggatcattttctataatctgggttttgtaaaactcaccaataccttaataatcaatacagttgggacaaaaatgccatcttgtcctggaatatcagaaaaatgatctcaatcctctctcttccctttctggatggacttataagtgcaagtgaaagaaagtcacccctttcatcctcatacaactgcctgcagcatgaagctaatgaatattcccatacccctcttttcccacaaaggagaaatataagaatttaccttaaatgatgatagtctgccatttgagattttgcagcttgacactcaatttccactgagagtctaggcattttttttttttagcagacagccaagatgctgtgtccttgcctgagaccacattatttgcaagaagatccctctctcctccacagacttttcccagagaatgcctttcagaattgctgttgaattacaaagaagtatttattgtttgaggtgattaatgattcctgggaaaattgctattttcagcgtgatttaattttgttttacaagtgtgtgtagtagggggagggttaataagtttcagcagcagttgcattgcctccagaaatccctggcacccgttcacaccttataaaatgcactttatgccaggtttatcctgatttgggaaggtaagtgtgtatttgattgctcccgaattttcttggctcttcagagactggtatctatcactttcctctcaaatctgatttgtaggtatagaacggatcacccttgtttgtatcacacacagggcagcaggggtgaaaggggtaccagctctgacactggctaaagggttttgccactaatgagagaaatgtgtttaaaaattctctgatattgcagaggcaggtgagcacttactcccatctatgctaaaattactacattacttaaaagttgcactttttcaaggccaggtgacagttctaatattctggggctagtgtgcacaggtttttgtggtcttattgtagggaactccctgcagtaagcatcaaatctaaatcagtaaacaaatactagggttatagagatcgagaagtgggttttgattttcagccttttggatctagatctctggaatcgagcagaaaattcacaaagcatttgaggaaagtgacccagtttggctattttccagcagtaaactctcccaggtctactttgcatggggtgaactttaggggtatattatgctttttcctcagaagagacattggagagtgtacttgtaaaattcagtttatttgaaagctctttcttcaaaaaagagaaacaaacaagcaaacaaacaaaaattcccagtctgtagttagtgaagaggaccttaagaacagccaggaaacaaaaactaatctcaaccctttgcacaaactattttttatctcctgggaaacaggcagattaagtgtgaaggtgcaacaaataccaaataccaaagagaccacttctttccaagtgtgctcagagttcagtgtgtagaacagctgcagaaactcctgggcccacagcactgcatggtttcaactttcattgcagggaaggacacgtttctatgccttacagagacttgaagcctgaaagcctggccaagtttgggaagaagaggagccctctcagagctcaagagccttcctactctttggaacttttccacagtaggccaagcttgacaagagttcagctcaagttgaacatacatacacacactctcacacacaaattatgtgagccgtcagaatccaagtgaatccagctcaagctatctacaaggtttttacatgcaaggtcaagtatctcaatccagaggacttttgttttcttaatgaaaagcttagaaaacacatgaatcttagatttttaatgttttttaaatggagtttattcttagcacatggctttctatgtagccacatcacaatttgtacagttccacataagtctaaatgcactcccctctccccaaagaccgtgccccagaaggggacaacagtatctctgtaacagtgtcttaaataaatgcaagtaagaaaaactaacatgtcacacctaccatcaaggtctacacatcttaagaattaaataatcttgtgaggtccacaatgtctactcatttattcagttaaatacaagcttggatgagctgccttaatgggggaagaggaggtaaggaaggtggggaaagggtctgtcttcttctgctttcaacaaagatgcaagtgtatgtccccactcagcatgggctgtccagctagctgactgtagccatctcaaaagtatttgataccaagtagtccttctcaggtatccacacctggcagccttgtttcgggccagcaggttgttccaccagccagcatc

SEQ ID NO: 586556 - DNA, 4001 bp, Homo sapiens
agttaaatacaagcttggatgagctgccttaatgggggaagaggaggtaaggaaggtggggaaagggtctgtcttcttctgctttcaacaaagatgcaagtgtatgtccccactcagcatgggctgtccagctagctgactgtagccatctcaaaagtatttgataccaagtagtccttctcaggtatccacacctggcagccttgtttcgggccagcaggttgttccaccagccagcatcctggacaactgttctctcttgggtggcaaccagcacagactcttaaccggataatgtcttctttttgattattcttttcaccaatttgggtttgttttggtgtctattatggtccagatggggaggggtggatgaggaacggagcaggagaagagaagagaaaagcaggtaagggatagaaactggttaagatctctagaagattatatggaggagggaacgggtgtggaggtgctcgggtgggggtggggatggaggtgtgggctctgagtttgtgctttccctggtgggccggcagaggccgaggccgaattggaggatcgcatcttggtgttgggcagtttgtggtctttcttccacttcatcctccggttctgaaaccagatcttgacctggcgctcagacaaacagagcgtgtgggcgatctcgatgcggcgccgccgggtcaggtatcgattgaagtggaactccttctccagctccaagacctgctgccgggtgtaggcggttcgagagcgcttaggctcccctccgttataactggggttaactgaaaacccagaaccccgaaatagaaggccaaggaggagggagcggaagagagggaaaggaggaggagagagaaggtggggtggggaagagcaattggacatcatcattatataataacctgacaccaagttcacgcaagatacataaaacggcaaagaaaatgtttcacaggctattgacaacgggaaacacccgagagccataaagaatggtgctgggcattggggctgaagaaaagcttcaaagacacatggcctgaagcctctgccagggcaattaaatttatgggggctataattactgccctaacagtttggcgtctcgtaaatctcctgataaagggaccctgggtacaaaagggttctcatgttgggatcaggcggctggctggcgcgcacatacccacatctcaccgcagcccgggtcagatgggggctcccctcccgaggcccccttcccctgagcctctccctcctgaccccgaccctcgaacccaggcccagccccggcccacctcccgcgcctcccaagcggcgccacgtaccggcgctgacatggatcttcttcatccaggggtacaccacgggctccttgcccttcaggcccagcgggctcttgtcggccaagagcagcgggcacgcgggggcgctgccccctgccgggacgcctggggtggcgggggccgcctcgcagcgccgcggggccgctgggggcacggcgcgaggctgcaggggcggcggcagctggggctgcaggacgtggctcgcatgcaggccgtgcgctgggcccttggcttgcgccgggggctgctcgggctggggcggccgcccggggctggcgccgccgcggtagccataggggtaggcggtgtccgcggccccatgcgcggggtacagcgcggcagcagggtaggcgggctcgcgggcggtccgcggcgcgtagtaggaggcagtgggctctcggccgccgcccgcgtgagggagctggggctgctgcagcggcaggtgctgggtcgggggcgctgggggctgctggtagccggggcccccgcccgggccgccgtctgcgccgcccgagccgctgtgctgcgcgtactcctcgaagggagggaacttgggctcgatgtagttggagtttatcaaaaacgagctcatggtcattaatttgtgaagtgcaaaaatactaatttttctcgcgttgtcgttttttctgggcttgccgaggcccctccccctcctgcctcgcttcccatccccctttcctctgcgcccttcccctccccccgctgtcaagtgcccactcctccccctcccgcagacgccgccaccaaagttcgagccgctcctccccagcccagcgcgcgccccgccccgtgccccacgtgcagcgcccccaccaatgggcgcaccgcgcgcgcggacccggatcaggaaacgcgcgggtgcgtgatggatgctgctgtccggcccctgggctgggggagggagcaggagctttggaccccagccccccagctttggttcccgctgggaattcaggccctgtcaggctgtaggtcctctcgggagccctctgcctgccctactgctggcctaggcctcgggctgtctggcggccgcgactcagcgctgacctcgggcgcaacccagtcaggcttcgtgtccttcaggggttctaggctaacaggcgaaaggaagggcgttgggaccgaggggcatcctggtttttatgtacgccactgagaggccaccagacacattttctcaaccgcagatcccccttccccacaccctgctccttgcgtgtcagcctgagagcccttgctttgagaagcttggcagaagctgcaaagggtgggcgggcagctaagagaaatcgacccaaggatgtaaatcgaggccattccattataactggatggacacttttcattttttccttctttcagagacaatctgtttcgtgttttcctaagaaaaattggaaccttcgtaatagcatctaatttgacgggggttgtcgatgtgagagctaaatatgcccgcatttactaggtgcgattgtgagagagaaggtggcccaaggatgggaatggatagaagcaacacctccacagaaccgagctttgaaaacaataacttcctatttcagaactatccccaaacaaaaacaagctaagggtagaataaacaccttgccgggtctgatcgctgatgggtcttttccagctaagaatttcatgttttctcttttagatcctgctttctcaggcagtatctgaggctagagttatatttgcaggacagtctataatttctgaattgctgaaaattagcgtattaacgatatcagaagctccggaaaggagggagaggagactgttgcctgctatttggtaattgaaatttgatgggtacactaattacgccattattaacaaataaattacttattaattccacctaatgttgatctttgaagtaaatactgatgccttatttgtgctgtgtgctttctccctttcttttctgagtagtagacatatctagatcctctacttttcagcctaaattaaagcagtgtaaactagcatagtcaccattctaaaaatattttcatattggcatgcaaaagcaaggatttttcagctggtgcaccttagttgatttttcaaagagcagtataaacagccttctcacaactgagtctggaacgcagacaaggaaaattatttcctaagcctggagacacttgaaaaggaatgtcaattctatcttcattcatactggttactcatatgagttactaaatgctggaatatatccatttgatggatagtcacttaatgcttagccacataaagcctattatatgggactaatctttaaactaatttaggaaaagaggttaaaaaggggatcatattagctttctaactggaatcaccctgaagaggtacaaagagattttccacgttaggtgtatatgagtgtgaagagtgctgtccattcacatgaggcaccctgaaaatttgtttttaaagaaatttgagccacagacagaaatcaacactgagtgtaatctttagccatcctctctagactggaggaaaaatttagaatgtgatacatctacctgaaccaatatctctccctagcaagaaaaaataatatacacataggttatataaaatgtaatataaataata

SEQ ID NO: 586557 - DNA, 4001 bp, Homo sapiens
aggcgctataatggcaataaacaggctcatgattaaaagatgaattagggcaacgagaacagggcttcttcacagaaggaacacaagggagtttcagaaagtcaccttagtactgacactacgcgggatccgctaatactgctcagtactttaaacgctcagatactcagggacggaaggcccctcctgccgcggccatgctcatgcttttcagcttattatcttttttccacttcattctccggttttggaaccagattttaatttgtctctcggagaggcaaagagcatgtgctatttcaatcctccttctgcgggtcaggtaacggttgaagtggaactccttctccagctccagggtctggtagcgcgtgtaggccgtccgggcccttttgccttccgggccgcctatgttgtctgcaatagaaaagtcagcggtttagccaccaactcctgtcttccaaagtccgccagggggacaagcttgggtcatgagcagggaacccaggcgaaaagctcaacaagttctgcctaccagcccgcacacccctcccgaatttccttctctcttcctttctagaaagaaaacaatacgatttggaccctgggaacaatctgcccatctgaggctggggccgtgtcccggcggactccggctttccctggcccctctcctgccccctccgccctgccccgggcgccccgatcgggaggcacagccctcccaggctgcccaccgcacagaaacccaggaagcaaggccctttcctgagcgcccaagtggccttcgggtcaccctccctcaaagttccagccccgagagccgcctcccgtttccagcctgcagggttggggagcctgttttctttttcttccctttccttctctctccctcctgcccccaaaattcagaatcctgcaggctctcgcctcgattctttcccccaagccccttttcgggggctgtaattagtaacgctgtttccccagcgtagccctcctcataaattatccgccgtgacaagcccgattcacggctgctacagccatcctctacctctctgcgccttgctcggctggcctgacccgggagcgcgtcccaaggcgtggggttccagaggggttttttgcttcctcccccttccaacgtctaaactgtcccagagaacgcccatttcccccactatttgtgagcgcagggtgctcgcaaagaagaggaggaaggaggaaggcaggggagggagaacggcaaggagagctccgcagggctgggagaaatgagaccaagagagactgggagagggcggcagagaagagaggggggaccgagagccgcgtccccgcggtcgcgtggatttagaaaaaggctggctttaccatgacttatgtgcagcttgcgcatccaggggtagatctggggttgggcgggcggcgccgggctcggctcgctctgcgcactcgcctgctcgctgctggcaggggcgtcctcctcggctccggacgccgtgccaaccccctctctgctgctgatgtgggtgctgccggcgtcggccgaggcgccgctggagttgcttagggagtttttcccgccgtggtggctgtcgctgccgggcgagggggccacggcggagcagggcagcggatcgggctgaggagagtgcgtggacgtggccggctggctgtacctgggctcggcgggcgccgcgctggcgctggcagcgtagctgcgggcgcgctctccggagccaaagtggccggagcccgagcggccgacgctgagatccatgccattgtagccgtagccgtacctgccggagtgcatgctcgccgagtccctgaattgctcgctcacggaactatgatctccataattatgcaactggtagtccgggccatttggatagcgaccgcaaaatgagtttacaaaataagagctcatttgttttttgatatgtgtgcttgatttgtggctcgcggtcgtttgtgcgtctatagcacccttgcacaatttatgatgaattatggaaatgactgggacatgtacttggttccctcctacgtaggcacccaaatatggggtacgacttcgaatcacgtgcttttgttgtccagtcgtaaatcctgcctgatgacctctagaggtaaactcgtgcactaataggggagttgggtggaggcgaggggggtggcgcgcgcgccccgggcgcgtgcccgccgccagttgccgccgttcagccggactcgagcgccacccgctggaggcagggctcatcgcccagcttccgaccgggggctgcaagggccggggtcgaattgaggttacagcccattatggcaaaattattgcatttccctcgcagttccattaggatgtaccaattgttaggccgtcagctgccgatcgcgcgcccggcgaggatgcagaggattggggggaggtggtgacttgcattttatttacaacaactttatttcccccgttttgcagcccctcttatttttgtgtcgaggttggggtcggtactgaccgtcctgccagcagctctgaattttgaaaatacagatatcaccttcggggaagggggaaagccatttagccaattggagaaataaatcctgcccgcagcagcagcagctacaattacggctctgtttttgcgagcgcatgagggacagtgtccctgccgctcttaaatgacaggcgtctattaaagatagcttttgtgtagtgtttctccaaggcgaggtcaaattccatacacttttataaccgtagtcgatttttctttcgtgtgaatatggttttcgtgtcattagtttgcgatttgatttgcttacgtatccagcctggaaaatcttcatcacagggtccggttcctcgagccagccgggccccaagtcggagggttctccttgaacccagcgagtgggcccaggctccctgcagccacagaggctgcctggggtctggggatccgtggggcgggttactggggtcttgcttagacctccaggagtaaaatgagggcgataatggaagcattccttggcagtgcctagtatctctgtagttattttccacggctccgaaagactcaagtaaatcacaaatatagctgagaggcaagtggagtctccccgctggaggcccggcgttgcaggcgcccctggcacgtctggaagccaggactctggcggctcccatggccctgggcccctcgttgggtcctgaacgctgctgtggcggcgacgcgggcgctatcggaggctgggagcgggaatccggagccgggagcctaccccgggctgtaatgttccacccgcgcccaggttaactcgcctcggctgaggctgcttctcttccactgacggttgcacacgcgggaccgagagactgggctctgttggggccccctttgttcctcgagcttccttcctgttctgggaggcggcttgggaggccgcgacaaggccgggctccagctcttagaccccctctttccactggccagagatgatttgatgatgcccttcgggacttactggcgagggacttaggcagagacgcccagacacgaaacggggctcggcccagggctctttcctccccagcagccccgcgtcccgaggtcggggagctcagagacactagcacaggagccccagacgcattcagggcgcaccccagaactccggagccggtttgggcatccttgtggagcgggactgggtgtgtgcagtgcgccccgctccaccgctggtattggctgtgtgtgaggttttgttttgttttgttttgttttgttttgttttgttttgttttgttttgtaagaaataaatgcacagacgcttgcaaagctccgggctcccctgaagctgcggaagcccccagatgggagcaggcggggagaaaagttggggaacaggcgagggcaagggggcaaagccgaaggaggttgcagcgctggcctggtccctgcccaggcatctactcgcccgc

SEQ ID NO: 586558 - DNA, 4001 bp, Homo sapiens
ggtgaggcagagcgcgttggcgatctcgatgcggcggcgccgtgtcaggtagcggttgaagtggaactccttctccagctccagtgtctggtagcgcgtgtaggtctggcggcctcggcgcccatggctcccatacacagcacctacgagcagaaacggccgggcgccggtaagccagggcctggagggttgacccagtcagcccagtgcctcccacaagaggcacccagactagaaaccaccccgcctccactccagcctctcccactatgtctggggcccaaagcatactgaatgggagattatttcataccaagcgagatgttttccacctataacgacttggggtggacattatcgtttttgaaaaatctgcctcataggaaaaccattacaagcaaaataacagaatgagcattcttaatttgggatgcccaggtcgtgtttttgtggggatgcagggtgtgtgtgtgtgtttgtgtgtgtgtgtgtgtgtgtgtctggggtgggtggtgtggaaccatgtaagtagtgtacacactctgaattcatagtggtctctctgaggatgctactgtgaccagccatgtcggaactcaacacattttttgaagagttaaaaatggtcagccctcttgaatctttacacattctcccaaattatatgacccttctgagaaatgcagaactcccccaaggataaagtggatgttaatggaaaacattataattttaacaatccgcattaggctctgtcctagggaattcctaggagtctttgggattccctgtggagtccttggaaaccagaggctaagagatggagctataggtagtctaggatttctggcaatgtaggattgtgttgggctgtctgatctggtgccaaagttccccaagggtggtggggggtccctccaagacaggtgtatgaagctcaggcatgggctcagaagagggcagaagttggctaagagtgggcagttgagtagaagccgggggagatgagggaggagagagaaaaaaatcctgagtctggggctgtggccctccaaggctttggggagacactggaagaggccaaatggccacctctctgtacgggtttctgaagggcagaaaggagagggggttgggaagcaaagggtatttatcagtgacgcagtgcaaaaggccctctggcttgggaagctgagcagggtactcagggtgcatggacaggctgtccctccccaccagcctctctctctcttcaggctgtccctgtcacaggtctcatatacgtgccagtgcccccatcctcccctaaggtgtcagcttacatggacactggggccttgcccttcctctgccatggcctgatagccccattgggaactgattttttcttctcttttaagaagccaaagaaactttgctggttctttcatcctttctttctctctattcctctttctactctgtttcctccttctttctttcttttcctgcctcctttcccctctccctccactgtcttgggatatgtcttacccgcgcaggagttcatccgctgcatccaagggtaaaccgggctcgtgtacttccggtcggcgccttcgtcatggagtgctttgccctgcccgctgctgctgtcgggtttgtactgctgctcgggagaaaagtgcaggtagtccccggggcccctctgcttgccactgcccgagggcgaggcgccactgaggtccttatcagaatagaaacacgaggccccgtactcgtaggacgcccggttgcaggccaggaccgagttggactgttggtagaaacaaggtgaggtgtacgtcttgtccgggagactcgacgccccgtacgaggccgggaagggcctcagcgcgtcatagccagcctggtagaggggcagctggcccaagaaggagtcctggccgctgggaaggctcccggggaaagtgggattcacaaaataggaactcatttgcgcgcccctctgcaggactgtgatttgttgtgtattagtacatctggctataactattagtagtcatcgaactggtttgtttctggatggccgaacgccaaaagcgacagcagcaaatcgcaccagctgacgcggcggcggccaatgggagcgaacgccggagcccgctccccggggaccgcggcgaccgaggcagcaaagttacaaacagcccccagcccgcccgcccgccgcccgcccggcagattaatgggcgcgcacagctagccggcccggctctcttcccgaacgccagcggcgggcacggccctttcagtggcgagcagatcaggccagagtagggacactaatgcttgggccgcctcaaaggccccgccaggtcccctccttcctcctcccctttttgctttattgaattttgcgggttccccgcccctcctcctccaaacaggaaacctgaaggtcctgctccaggaggggcagtgacaaaggtggctttgctccctgccggcctgcactccaggcacggcccagagttgcccctcccctagcgctcccctattcgtgggtgcgagttcttgagctggagcaagggccatgagaaaccaggccttcactctatgctcttcactcgtgcgccttaggaatcggtgaactccctcattctctccttctccgctagcaccaggggcctgggccttgcagcccagagctgaaggatcacctcgagctgaccaggactcagccaaacgtaggttcttcccacccattccctcctcccacatacacatcctgtttgagtcccaaggggctcaatggcccgcgcctgcctggtgtcaaagcactccttccagctgggcgtccccatcccacctttgaacccagggaattgaaaggccagaaaccactggtttcaacaagaaaggaccgacagagcagtggccgtgagactgggctcctaagacagccgagggacctgctcccctgcctagcgcctggggactcagcatccactgcgagaaccgctcagagctgaggcagataaaaatccagatgtggaatctctctgtccacattccagaggcacagaagacgcagaggccctggccaagctgggcacagagggcagctctgcagggcccaaggccgcgggataattgatgggctcggtttccggggcgcccgacaaccggcactgtcctggggccgccctctttactgcccttcctgggaccgcagggagggctgccgcccctcagtcgctccggaaccgggaatagtctcaccggctccagaaatcctgaattgctttcactgctgtcccaggcctggcggtccccagacaggacattaaaagcctgtcctgagctgctcactcttgcctgagaggtgtgccttcgagatagttgacttttacaacacatggatcaatctcgttttgtaaaatgtgatagcagcccaatggcatttttacaactgtgtttgttgggcttgtaaaaccccttgaattagctttaaaatcctcaattctgtggaggttgaagaaagactatttacgtgatttggatggatttctggagactgtttacaagatctgtaaaaccctggccaatgcaggctcacccggttcaggacttagtggggaggtggcaattggcagtgttccagtaggaatctagtaatgacttagtctcttccttgcttttcaatttttttcctgaactctcctcccacaaagggaaaaaattgggaaaggactggcctaaggtcgacctccgaagagcccaagaggcactcctggaaggcggctgctagcccggcaacgggggctacccctggaagccggatgcctgttccccagtcgatccgtcctggaaagggtttactttgcatataaagcagggcctcgaatgagaggatagaattgggcatttcccacacattacttcagggaaagaattcaataggtgaaaatgaaaactcgagtcaaaaaattaaaagggacttttaaaaatagctgttt

SEQ ID NO: 586559 - DNA, 4001 bp, Homo sapiens
agggaatccaaggcgacccagtctctgcggccgctcagtccacaaaagttgggagctggagtaggtgatgggggtgggtagagtgcaggttggggactgggttgcttttttgtttttgtttttgttttttacattttcttttatttttcccatttttgtaagtaaaaccagtgagtctcttaaagacgcttttccgactgtccggtgcagagagggccccggatcggcccctcattcctcctcgtcttcctcttcttcatcatcgtcctcctcgtcggccttgtccgcggcagcagtggcggcggcagagggcacggcgccctcgggagctgcggcggcagtcggaccttcgtccttatgctctttcttccacttcatgcggcggttctggaaccagatcttaatctggcgctcggtgaggcagagcgcgtgggcgatttcaatgcggcggcgccgcgtcaggtagcggttgaagtggaactccttctccagctccagcgtctggtagcgcgtgtaggtctggcggccccgcttcctgtcaggtcctgagaacagacatgcagacacatgaacacaaggacagacaagtagacagggcactcgttaggctgctgtcccagagcccgcaccttcctcctggcctagtccccagcgagcatccccctctgccccaggccccgaactgagctaggggaggagggggagtgttagggaaagaccccaactgcagtgccagacgcgcaggcagctctgtaatgagcaaaggcacagaatctcaactttacaaccgacctttccagccggctaagcttccacaatgtcctgcttcctctgacaaaggaaaactgtaaatatagagtgtgagcaagtgggaaacgctgcacttttgccattcaaagatgagcccggccattcccctgccttgctaggcaagtgggcgactcttcccagcagcctgagccctcatccccaggaccttcctagggcaccccgaccctctgtcctcattccctcgcccccatcttgaaatggaccctggcacagggtcgggtgagaggccctggagggcttggctctcctagcttttgagaaagaaatgtcaggcagcaaggaaaatgaggagagagagaagaagaaagggagggagggtgacagaggagggagaaagagagacagaatagcgaacaaacttaatgttaaaattccaagacaaatggagttaaataaatttacgaggatcgaacccattaattgggccataaaaagttttatgagcctcatttacatacaatgctatgggctccacgcaatggcgcctccgctccaattaaaaccagaaaggctgcgccgggagtcacggggctaccggctcgcaacagcctggctccgctcttccggccccgcgccccgcgctccgcgctccccagcgctgcgctccccgctcccggtcccgctccgccagcctggcccgcctagcgactgcgcctacctgaagaccgcatccaggggtagatgcggaaattggcctcagccgcgccatgcagcgcgccctcgtccgtcttgtcgcaggcgcctttggcgaggtcactgcagagcccggggatgttttggtcgtaggaggcgcagggcaggttgccgtaggcgtcggcgcccaggccgtagccggacgcaaaggggctctgataaagggggctgttgacattgtataagcccggaacggtcgaggcgaaggcgccggcgcccgccccgtagccgcttctctgtgagttgggagcaaaggagcaagaagtcggctcggcattttggaacagagaagcccccgccgtatatttgctaaaaagcgcgttcacataatacgaagaactcataattttgacctgtgatttgttgtccggcagctttcagtgtcggttttacgaggtagagtgatatatgataacattacacccccagatttacaccaaaccccattttcttttggacggagctcgccgcagcacgtgaccgcccacatgaccgcctccgccaatctcagcagtcctcacaggtggtctcgctccgcagggcccgcagccgcctagaatggaagggcaagaggctcaaatatgcggccaaagaatccgcccgcgcccggcgggcctggcgcgtcccgcggaaaaagacctggaggctccgcgggagcgcccagctggcggccaacctccgcactggggtctgcggacgccaggcggcccggccccacgcagcaccccccaccccgcccccccgccgactcctgctagtgagccctggaccaagcttgggatcctccccatccctctcctgtccgcctgcccagaccctggaagggtctctgtcccccgcaacagcctgccccgcggtggccttgtgggcaggactcagctatgagcagatcgactctgcccaagtcttctctcacccaggtccagtgggcgacaggccggacttagactcggatccagacggggaaggcgcagcatctcttgcagctgcagagagattgccaccgcaaactggagccatgtggttcgaataaagtcaacgtctcccagcttcctttccttaatcggaggcacactgtttatccgccctaaaggaagcagtgaaatatttatctattaatgagactcatttgccaacagatttattaacgtggggttcccctccctcctcccggacgctgtagtgctgcaggctctgtgccttcgctcctgggcacctggctggctccagcagtccgataaattgctaaagattcctttgtcctttccacaacttctggttcccctctggcgcatggggagccagggctgtttcccccagcttggaaaaatctcgggcctgcacccttccaggcactcccaatactggaaggtttctggggtaggccggggtgcctgggaacaatacatgctttagagcggatttggagagggggctctggcgtctagggactgcaacccactgtggacttccttttcttttgaagacaccgaaaacaaataggggaaaccaccccctaaaggccacccagctgtggaggcttcacctatccaagtaccagctcacatggagctgagcgcacagtggtctcacttcctcccatccaggcctccaattcctaccttccaggcctccgacccctgcaccatgttgcaccagctgaagcccctgccgcccaccgctcggtggaggatggtggggagaacccttcccctaaacgcctcataaactgcccggctgcgctggaagcccggccaccttttactgctcagctcgattacacaccataaacccgacctcacaatggaattgccccggaaattctcctgtaaattgtagagtttagttccttgtgtactgagcacttcccatcactttcagagggtccaggccgtccccgtttaccgcaccctctcagggggccccaggaatacaaaaggtggagggagggttcagatcgggacgccacggagccccagttcctgcgcagtgaaccaccggggcttgggtaggaaggcgggggctggtggggcaggtgggcgctgggctgtctcctcccgggccacggaagcctgggggtaggggtgtggagtgagggacaacatccggggacgcctttatggcggatcagatgataccttgtctccgatggagaatagagggagtaagacaaaaagaaaagacctaaataatcccagtcgcatcgccttctggaaggaaataaaaacccaagaaagttaaaggaagatgaagcaaacaagaaggctaggagatcaaagaggcagaattagaccgttttagaccaataaatttttcctggggtgacacacagcaagacgcaaagagaaaagaccaaggcccccgccgccgccgtctgtctagactcaagcgactgaaggggccaacagagctggtgtttaaagtagaacctgcccagtccaacagcccgagcagggagcgatttcggggatcgcggg

SEQ ID NO: 586560 - DNA, 4001 bp, Homo sapiens
gcggaagggggacggacagttctttctttttctctctagcttacccttttttctaaataagcccaaatggcatcactcgtcttttgctcggtctttgttgattttcttcattttcatcctgcggttctggaaccagatcttgacctgcctctcggtgaggttgagcagtcgagccacctcgtacctgcggtccctggtgaggtacatgttgaacagaaactctttctccagttccagggtctggtgttttgtataggggcaccgctttttccgagtggagcgcgcatgaagccagttggctgctgggttatctgcggggaagagaaacactgggtttaggagcagaagacgcacatcccgctggggcaaatgagcctcctgcatggggtctctggccgaagtgcagaactctgctgaactggttaggaaaggcagtcaggcctcggacacaatggaaccctggcagacagacgcacagacagtcacttaaaattgcacgcagtaaaactttggctcgccctcccctccgagaccttcctttctcctactctgtcctcttgtcccccttctccttcctcccactctcaaaacgctgtatagaatgaaatttggaaacaggtctccttgccacgcagagggaaagcatgctgccttgtgttctgtagcaagattaggattcctctgtcccgttcactgacttcgtctttctttcccaacctgtccctctacgccccccactccttatttaaccttcctggaaggccttcggagctgggcaagccgtcagggcgccctaaggccgctgatcacgtctgtggcttatttgaataatctgtcatggggacccttgtggcccgggtcgcccgcagcctcatcttggcaggatttacgccgccactggccgaaggcaagaagtggaaggaatcggccgtctcccccagcgtcccagctccggctgccctggctgccgccgctcacggacaatctagttgtacaaaaggctctctgggctgcactgctttcgaagaacggcccaaagtatctcggtcctgggcctgggcagccaaggagaggggcggccagtcttggctcgtcccgaagtgcccgccccgccccctctcgctgcagcagccgcctcctctcccgtagccctgcgggccgctcttcactgctctccagacttggggccctatctgaggcgtcccaaacaccaacttctggctcctggccccaactcgagaggcttccagcgaggacgaaggcaggctcgagagaaacctggcgggccagcagatccgggaggccggcgtggaggcggcggcggatttgaagggaggagacacttactgggatcgatggggggcttgtctccgccgctctcattctcagcattgttttcagagaaggcgccttcgctgggttgtttttctctatcaactggaggagaaccacaagcatagtcagtcagggacaaagtgtgagtgtcaagcgtgggacagtcaccccttctggccgacagcggttcaggtttaatgccataaggccggctggagggcaagcccgcgaaggagagcgcaccgggcgtgggctccagccaggagcgcatgtacctgccgtccggcgccgccgccgccacgggcgcctgggggtgcacgtaggggtggtggtgatggtggtggtacaccgcagcgggtacagcgttggcgcccgccgcgtgcactgggttccacgaggcgccaaacaccgtcgccttggactggaagctgcacgggctgaagtcggggtgctcggccagcgtcgccgcctgccggggaggctggcccagggtccccggcgcatagcggccaacgctcagctcatccgcggcgtcggcgcccagcaggaacgagtccacgtagtagttgcccagggccccagtggtggccatcaccgtgcccagcgcctggcccgcccggcccgacccacggaaattatgaaactgcagatttcatgtaacaacttggtggcaccgggggggaagtacagtcacctaataagttgccggcgcccgcgcccccattggccgtgcgcgtcacgtgcccgtccagcagaacaataacgcgtaaatcactccgcacgctattaatggtccgatgttttgcagtcataatttttatagcaaaagccatatgtttttatgtaaagggatcgtgccgctctacgatggggtttgttttaattgtggccaacgacgattaaaagatcaaatctagccttgtctctgtactctcccgtctccccccccatacacacacttcttaagcggactattttatatcacaattaatcacgccatcaagaaggcgcgggtcccgcgtgcgagtgcggccagcggagcccctcacataaaattagacaataattgaagccataaaaaagcagccaaatcgcattgtcgctctactgtatttaaatctatatttatgatatttcataaggagttattgtttcagaagccacacaggctggcgggaagtcggaaacgaccaacagattcgtttgcctcgccgtggctcccagctgtaaaaatttacgaggacttggaaaggttagactgttgtgtttggttggcgagctccctgtaaataatccctgcggtccccgggagaggcgagtttacccgcggccgccctcgaaaagtcaaattcaacgcaggatccgtcccaaacggagccgccgccggccctaccagggcactccaggcagggaccggccgctcagggagtaccgcgggtgtaggtccccacagctacccgcctggagcgaggggcgcccgggcaacccttaaattcgcctttgctacgaggaccccacggaggagctggccaggagggagcggccagccgccaccagggcgaaggttttgagggcctggttggttgtgcggcgcgctcggtccccggccctcgaccccacgcacacgcgcgcccagcccgcctttctcatcagctggcaatcaggattcccaggcgcaggcggctggcgacccagccctgtgctccagcctcagaggctctaaccatgagcgctgcaagcctggttgcgctccgtgaatcccagctggggaaaaaactacaagtggcatgaatggaaggcaagttcggtttgggaaaaggcagcctcgcctaagagaccccgcagctccggaacctgggaggcccgcaccgatgtggcctgtcccggggccgcgtgagcctttcagggctccttcctccctttccagctgctactccgggcctcgccttggttacctacggggcccggagactcggcggagaggtacaaggcccaaagagaggcagccacagctcaaggccagggctggaaattagaacggggaggggtaaaagggcatcgactccagtcccattcctgggcctggccacgttggggaagtttatttctcacccgttgggggtaaattaaaaggtcgccgccactccgttaattggaaggaaactccccctgcccccaattcctaacagaaagcagcgactcctagaacaggggtaatcaaattcacgtgtggatactgtgcctgcaacagtgtgtttttcattagcccacttccctggcggcgaggctggcggcctcgggcgcttccatctctctctctctcttttgccttcatcctcaccagcagttccagtaatccccccctcaaacaccctgacacacttccggctgggactcccaaataccagcgaggctgccaagccgcgcggataccgactgggtgccccttcctgcacccgcgcctggaagagggaagtggccgacacaatgaactccgaaatggccccgtcctgtccgcctcatctccctccccctaatattttccttgccccataaattcctctaggtcatgcccacccccaccacagtccaccgtgtcctaaataccccgcagtccgccaggcctctgagattttcatttaaaaaattaaccctggaggaaaccc

SEQ ID NO: 586561 - DNA, 4001 bp, Homo sapiens
atgttgtccaggctggtctagaactcttggcttcaagcactcctcctgcttcaaccccccaaagtgctgggattgtaggtatgagccactgcgcccggccctaagacctctgtctttatggatgtgagtcagcctgtgtccagcaacctacaccagtgtacccacatggcccagcacgggcctgagcaaagatgactcctgaaagccagcaaatggcaggtgcctgaggcttccttccacaaacaccagggcctgggccagtgacaggtggttgctttgaactttatttgagaaaaacagaagataaatgtatcaaaagaacacacaggtggcgggggaggcacagccagtggcggcagcaggggtgggcatccgggctaaggctttacttggcggcagtctcatcggattttgcagcttctgggcccccaagctgggcccgcgactcgaaggtgactgggatggtgatctcgttggactgcgtggctagcttgggcatgggggcctccacggtcagtgtgccctcaggggacagggaggaggaaacttgggtggggtccacaccggggggcagcctggacgtgcagagaggaaaggcaagcgttacattacacaccgggtgggtccctgtgccctcttccctgaccccacccccacgccacccacccaccccgacctggcgccaggactcacgtgtatttccgcgtgaagcaccgggagatgtagccatgctcgtcctgccgctcctcgtgcttgcctttggggggaagagggaaatcagactgcgggggaggggactgcctttcggccccgctaggccagaggccccacctcctgcttggaagcagccaggactgcaggctggtagggattaacagagggggttggggatgggggcgtgcccgccggtctgggctctcagaaacttccggaaagttcttcgattcagagttttgggaggaacggagcagggcgcggagctggggagtgagcagtacgcaggcgcacttggagccgcgcacacgcccactcagcggctagaaactggcaccgcgccagggaactccccgcttatctggggatggggctgtgggtgggaaggggactctgtagaaaagcgcattttctctcttcatcgatgatctttaaaaaaatttttgtttgctttttttttgtaatggcgcggggtcggggcgggggggcgcgtctcgctatgttgcccaggctagtcttgaactcctggcctcaagcgatcctcccgtctcggcctcccaaagcgctgggattacagagcagaaagcgcccttagaagcgacccgcactcccaattcctgagcaagggaatcaggagtcctgtttttcccggtgctgggccaacgtttaactccccaggcccccgggacccccgtttcaaccgcacgcccccggccctgcccgccctgctagcctcctcctctcccctgcaggagcaggggggctcaccggtgatctccaccacgccatccttggtcttgaccgtcagctcgtccggggcgaagtggttgacatccagggacacgcgccagcggtccgcagtgtgccggatctccgagaccccgctgctgagttgccggctgagcgcgcggctgtaggcgggcgcggccactgcggggctctcgatggcggcggggggcagggggcgcacgtagcctggccagctgctgccgcctaaccactgcgaccactcctccggcagccggggcagcccgaaggcctggtcgaagaggcggctatgcgggtaccagtcgcggaaggggtcccagctggggccccgcaggagcgagaaggggacgcggcgctcggtcatgctggctgactctgctctggacgtctgctcagaaaagtgcggggcgctgggctcggctgcgcttttatgctcctccagtcgggtatttttagcaggcggtgtttgaggtctctattaatggcaatgacccgtttgagggccgcccctccccatgcactcctcccccagcgttcaggggccgtgggcggggcgaagagggttcagccctcatctggaaccttctctcgttaaggaaagcaaatgaattcgagagcgcgacgctggagccgtgccacggcagggcactcgccggccctggtgcttaagcgttgctggctgtggcccgtggccagggccgtccttctgttaaggaggacagagccagacaggttgggttggggcatacaactgagaagtggcagaggcaggattggaaccacacgcgtgtgagatagaatgtgataaaaggagtctggtgcttgagcccaggagttgaggctgcagtgagctatgatctcaccactgcactccagcctaggcaacagatcaaagtcttgtctctcaaaaaaattttaaaaaggggctgggtgcatggctcatgcctgtaatctcagcactttgggaggccaaggcagaagggtcccttgaggctaggagtttgagaccagtctgggcaacatagtgagaccctacttctaccaaaaaatatttaaaaattagctgggcatggtggtgcatgcctgtggccccagctactccagaggctgaagcaggaggatcctttgaaccccggtgagtagaggctgtggtgagctggattgcaccactgcacttcagcctgggctacagagcaaaaccctgtctcaaaataagtaaatgaataaatacaaatacaaaaataaagcagtctgggctgggcgtggtggctcacgcctgtaatcccagcactttgggagaccgaggtgggaggatcaccagaggtcaggagtttgagaccagcctggccaacatggtgaaaccccatctctactaaaaatacaaaaattagctgggtgtggtggcgggcgcctgtaatcgcagctgctggggaggctgaggcaggagaattgcttgaacccagaaggcagaggttgcagtgagccgagatctcaccactgtactccagcctgggtgacagagtgagactccatctcaaaaaaaaaaaaagaaaaaagaaaaaagcaatctagtaatctggtgtggttgttaggcgtgtggactttgaagccagactgcctgaattcacatctttgttccatcactaagcagatgaacttgtgcaagttagattctttgtgcctcagtttccccatctggaaaatagagatgataatgatggtaacagtcatgcattgcataaagatgtgtaagtcagcaagggacagcaaatatgaaggtggtcccataaaattatattactggctgggtgcagtggctgacatctgtaatcttagcactttgggaggctgatgtgggaggattacttgaagccagaaggctggaacaagcctgggcaacacagtgagaccccatctctactaaaattcagaacaaattagccaggcatggtggcgtggacctgtagtcccagatactcaggaggctgaggtgggaggagcacttgagccaaggaggtcgaggctgcagtgagcctgatggtgccactgcactccagtccgcatgacagaacaagaccctgtctcaaaacaaacaaacaaaaacaattaccgtgtttttactgtacatcttctatgttttatttatttatttatttatttattttgagatggagtctccctctgtcgcccaggctggagtgcagtggcctgatctaggctcactccaacctctacctcccaggttcaagtgattcttctgcctcagcctcctgagtagctgggactacaggcaagtgccgcgacactggctaatttttgtatttttagtacagatggggtttcaccatgttcgccaggctggtcttgaactcctgacctcaagtaatccacccgcctgggcctcccaaagtgctaggattacaggcgtgagccaccgcgcctggccatcttctatctttagaaacactaatacttaccctcatgttgcagctgccttcaatatttggtgcagtcatatg

SEQ ID NO: 586562 - DNA, 4001 bp, Homo sapiens
tgtgggggatagacccataaagtaacaccctaaggcagtggaagcagataacaaatgcaggctccgggactagtgcagtcaacatcttcagtcttacgtcaggacgggaggatgccacagaatgacagtaacctaggtgataccatatttttaataaaccggctgctgtaatttgcaaagaaaaagaatagactaggatgaaatgctaacctgcatcacctgactcatggcagtcttcttatcaaatcatgctcccatccctgcctcccctcctcctggaacacccccattctaagtgctggaagctgctagttttttccagtgtactgaatcagcgtaccccagataccagcttattcagatgttctaaagggtgttatagatccatagaatttgggggccaaaggggaccctgcagaatgacgcagtctgaactcctcgtgttctgtatatttaacaaacaacccattagagaaggaacatgatatgattagccctgtgagagggaacatgtcagagcaaagtacatctctgatgctttcttccactctcccagtttactccccccactcccaaacacaaaaagttccattttctacaagtgtgggggtggggcaggtggcctggggatatagcctgtacagatgcaagtcgagtatttttaaggattgctgagatacccacctccacagcttcggatatgggtgagacgctattggtcttcctggagcccacgcggaacttggcagccttgtagatcttccagtacacgaagagcaccacacagagcggcaggtagaaggcgcctacggtggagaacacggcgtaggaaggctcgcggcttacctggcactcctcgctgccctcagagtacgtctctccccagccaaaaagcagcggggccagagagatgacagcggagagtgcccaggtgagcgcgatcatgacgttggagacgcacttgcgggtgcggagcgtgtattccatgtggcgcgtgatggaccagtagcggtccagggctatggccgtcacgttccagatgctggccgtgcagcaaagcacgtcgcacgcgatccaaagctggcacagcctccgacctagctgccagcggcgcccggacagctcgtgcaccaggctcagcggcatgaccagcgcggccaccaggacatccgagacggccatggatgccaccaggttgtggggcacgcggtggaaggtgcgtacacggaggatggtcgccagcaccagcaggttccaggcgaacgtcgccgccaccagaaagcccagcaaggtgagaataagcactccgaagaccgagagcaggggcgagctggggcgcaggtcgtctttgccgaggctgtggttggtctccaaaggggagggggtggagagggaaaaggaggttaggttcacaggtaaatccatctctgggtcaggagaccgccctggggtacttgcagaaggggtgttcaggaggacttaaggcggccactgtgcccagagccaatccggatgtttgcaacctctggccagtgggggagtttctggaaagtgcctgtgaatttggccccaatttcctgctagtgagcatccgttggagatggtgtggctgcaagcgcggcaggtctgaagccctcagaggctaaggaagcagaggcgaggggctgcgtgtcgcagccagggcccgcctaagctgtcaggagcccagggctcctcgccttggtggaaaggctgtttggccgcccagagccgagcatctcccagatcggggagaagctgggcggccagcagcgtgtgggtgcaggagaggggctggtgcgtcagagcagtcgctctcaccgcgttgtctccctgcccacccttctctctaggcagccggctgcagccttaactccgtgctagggaagccagttttgggggaacctgctttctgggacctgccttctgtccctgttgcccccgccaccccttcggaggctgcagctccggagagcgaatgctggcgcgcccaccgagacctgccttatccaagtggagatctagccctacgtaagccatcagctgataaggccatctctccccgcctcctggctcagagcgcgcggctttggggctgtccgcggtgctgctgcgctccccgcgcctggcggctcccagtgtgcgccaccacatgtggtgctgtccgcggtgctgccacctcgccccgcccgggagcaggagggttggcgctgtccacggtgctgcctctcttgcctgaaatgagtttgccacgttgaacaagttgaccaatgaactttcctcaaaacgttcccctagccacccccacacgtccctctaggggtggactggaggccctagacactgctttctcagctttccataagtatttactcttcctgcaagagttctgaattaggggtctaagatagtttcactaacttttgttctccggaagattttagcacgtgattgctttcttcttacccagctctcagttgcttcccttaagggttgttttccttaaaggaggagaggcgagatagcagttgctgctgttcctagagatggttgaggtgttggagctagaatgcttcacctggctccaacaggaatggctgaagaatgctttatctcctcagagtcataaggcagatgggtagtctccagtggtccctactaaatttgcttcctgagaaggaaaaattgggatacaagttattataagagctccatctcactcaaaagaaagaggtaatttaactctcccctcacacatgcacacaaaacaaccacaaacacatccacagaaactgagaaaatatcagaagcttctaaccagaaattatgattgaaagcacctcataaagaggcacatgatatagcaatataaaagaagttgaaattttaaaaatgatggacagaaatggcaggaaaaaagtaaggtgttaataagctttgtttttaagtatataaaatgagtgtcgtgaaatcctgtgcatttacaagtaaatttagtcagaaagttttaactatttaaagattagcaacatgttttcatataagattttgtttcttgcagagtaaaacaagtatcaggagaatgcactgagaaaagagaaagtcctccactggaacctagaggacgggacaacatcattaaataccggattattcacagggctgtttcaaacaccacttaaaaacagctgatggtgactgcctgcatgcagagcaactgtgcatggccccaatctggaagcaagcttgtgcttctttaaggcaaatcaccttcttgaggtcatggaactaatgggaatgagatgtaaactatgaatcctcttctttggaaaaagttctgcatctagtctcagggcctgttatctggaggaatggatgaactgtgttgcccacaggcgggcctcaatggatctctatgaatcttgaaaggcattatgggcttgtgattatattccctactgattccccaggccacagctgtctgtattgatagctaagtgagcagcagaatagttaataaggacaaagccaaggatgactgaggataatttgtgaaaaatagagtgtcataaatttagggactgaatagaatattcccacaaaggagagatccaatggagcatttccagaagggacaaaccctgttcagaaagtctggcttatctcttaaaaatacacaaataaaaaatcataatatttcagcttcatcttaaagcatagccccaattttatcttgaaaaacactgaaaaggaaaagaatctgaaaaggtataaaactcccgtctgccatatggtacctctgaaatggcagtattgggaaatataccttcctgggttgtcacctcttatgggttaaactgtgtctctccttcccccctcccttaccccctgccagatttatatatggaagtcctaacccctagaacctcatagtgtgactatatttagaaataagatctttaaagggatgattaagttaaaat

SEQ ID NO: 586563 - DNA, 4001 bp, Homo sapiens
tcatgcctacaatcgcagcactttgggaggccgaggtaggtggatcacttgacgtcaggagttcgagaccagcctggccaatatggtgataccccgactctactaaaaaaatacaaaaattagctgggtgtggtggtgggtgcctgtaattccagctactcaggaggctgaggcatgagaatcgcttgaacccgggagatggaggttgcagtgagccgagatcgcgccactgcactccagcctgggtgatagagagactccgtctcaaaaaaaaggaaatacgaacctcattctatgagtaggaagagcaactctggattgtatgtatgcgcatgagtttgtgtatttgtgtgtttggaggacagctgtgcactaaattcatctggcagtagcatataaaacatacgtgtactgaagaacgaggggccatttaaaggttattatagcagatgaggcagggtgggagtggggagaaaacatgtcaaaggtgaaaatggatagagaaaccatgatttctagacaaggtgacaataccactacaagaaacagagaggctggaagtttcacggcttggaaaaagcagcattctagctgaatgcatatgataacaacacaattttaaaatgaggaggaactgactctaatgcaaaatatagttatggaccagatctttaaatttaaataaaccaaacagctttcaacagtatttattgttaaaaaggctaggctaactatgtctattccttcgaggccaagacttctgtgttagaaaccctgactctcctactcaccagctccacggagaccgtgaggcagggaaagtgtttattagtcagtttgattttcaaagccctggcattctgggcagtcttcaaggctcgagataagttttccgatgttagctctaaataaatctcattgttttctgcagagacaccctccatttgaaattcgttgaagaagttctcctaagggaaaaaaaatgagggatgagggagggtatatgtgatctttccagtgacaatctgcagagtgtgcaggcctctcagaagcttttgctcacctgttccagctcacaccacatgctcactcctccattagccagcttgtcacaaaggatgaagttaagcttatcagggctgatgcggagggtgcaggttttggcaagcttggctatcatgttactgattcctaaagcaggggttaaaataaggaattactaaaatgcacattatgtatcctagagaccaacttattttgcagaatttcttgttcatcaacttctcggtggaaaaataaccacttaacgttggtatcacactggaaagtactttaatacccctgatgtcacgcaattctcccaacaaactaggggagatgtacagcacacatcatcagtgttcaaataagaaaacaggcacctaccagtcattcattcattcaacatggatttattgactactaggtactgcaatacacagttaaatgcaaggttaggcactgtcagggtggagggacgaatggggccttgaaggtatgtcaatgcctgataaagccgtctatgggagcagtggccgcttttttttaaagccacgtgatcggaatcaagtttcagaaacgtcccttgaaagccgccttcatccccacaagtgccctccgacccgccccgcgccctcccggccccaccctcccgcggcctacaccagcacccccatcccggccccatcctcccgcggccccttccggcgcccatccccgttctgatcctcctgcgcggtccccaccgcgcgctcactgcttccttccgttcctccctcgctcctctccggcctccctgctcacgtgtgaagtggttcagacaggccccgtccacgatcttggcccgaaacttcatggccgcggatggcgcagccgcggcgggcctctgtgggtaacagaaaagcgtcgcgccctgagtgtccccgcccggaaacacggcagcgcgaacagtggttccgcccggctcgggctacgcgactcttaccagggttatctccgggccacgccccggaggaggtggggctagggggtcacgccctagaggaggtggggtcacgggtcaaggatcacaggtcacgccccgggggaggtgggggtcccagtctccgggtatgcctccgcgctgccgggtaatggtgggatctacttttagtgaggcggaggcttcaagccccagattcggggaggttgttctgagaattcacgttttgaaagaattttgtgacacctatttcaagtgttattttaaaatatccaaataaaattaatcgtttataaaggttaaacaatattatcttaaatatacctaaggtagagcagctttaaaccctccagcctcagatgacggtactggtactttggtattgaagcatcttggtggattaaggttctgaaaattgtttcaaatgacttctaaaaaaattgaacatattactggctagttggtaaagtcgggaagcttaaagaacactgacgttaagtgataattctgcagtttgcctcaagacgaactttattacatccgataaaattcttattagcataaataatgtcattaggattttttttaaaggaaaaattttaaagggggaaatgaagcaacaattgtatctaatttggtttttcaaagactaaagattatctgtgttaacaattgttatttttaatgtcctttgcaaatagactagaaccttgtctttaacttgacacatagaatcaagataatgataatgcagatgatgatgatgatgattttgagacggagtctggctctgtcgccctggctggagtgcaatggcgtgatcttggcccactgcaacctccacctcccgggttcgagggattctcctgcctcagcttcccaagtagttgggattacaggcacaagctaccatgcccggctaatttttgtattattagtagagacggggtttcgccatgttggccaggctggtctcgaactcctgacctcaggtgatctgcccacctcggcctcccaaagtgctgggattataggcgtgagccaccgcgccaggcccagataattttcaaagacacatgcacacatatgtttattgtggcactattcacaatagcaaagacttggaaccatcccaaatgtccatcaataatagactggataaggaaaatgtggcacatatacaccatggaatactatgcagccataaaaaaggatgagttcatgtcctttgcagggacatggatgaagctggaaaccatcattctcagcaaaatatcacaaggacagaaaaccaaacaccgcatgttctcactcataagtgggagttgaacaatgagaacacatggacacagggaggggaatatcacacactggggcctgttggggggtggaggcctgggggagggatagcgttaggagaaatacctaatgtaaatgatgagttgatgggtgcagcacaccaacatggcacatgcatacctatgtaacaaatctgcacgttgtgcacatgtaccctagaacttaaagtgtaataataataaaaaggtgcaaaatacaaaaattgcagtttttgcctattttaagactataacatgaagcaaaattctaatcttcattgtcatatgcgagtgtttgccaaaccaaacttaatagatcactttcaaagttatgccaacaggcagggcaggatggctctctcctgtaatcccagcattctgggaggccgaggcgggtggatcatctgaggtcaggagtctgagatcagcctggccaacatgatgaaaccccgtctctactaaaaatacaaaaattagcccggcgtgatagcttgtgcctgtaatcccaactactcaggaatctgaggcaggagaatcacttgaacccaggaggcggagatttcagtgaacagaggtctgccactgcactccagcctgggcgacagagcgagactccgtctcaaaaaaaaaaaaaaatgttggca

SEQ ID NO: 586564 - DNA, 4001 bp, Homo sapiens
atcatggcagacaagaggcaggactagactgcagctctcacgtggacagacagagcaatgtatggagactcacgttgtgaacttttgctccagaactactgcagaaattaaccaggaaagctgagagcactcacagaccatctgaaggaagcggaatgctcctagaggacccaggagacaccccaaatagagcccaagctgtggaagtgggaaatggagattgtctgccccaaacacacaccctcaatggggaacctgaaggtctagatcatgggagaagattctgaccttaccttaagctgggtcgattcagagagctgagtgaaatacagggatagaggaagcagcaagaaaagccctgtggactctctgagtcccctgggaagctatttctgccttgtctcataggagtccttggggagggctgccagaggtatttggaaaagaccacagggaaaaggaaacctccagctgaactttgtaacaattccaacagaacctgaagtttcctgtccagacctcaggggagggtgtgaatctggtatgcagactccacaggcagggaggcaggaaagccccgtttgctttcacagctaggaggctggtagtctggggcaagttctcagtcttgcttgcccactgcttggaaacagactcggtgctgtttgagagggcaaggtgggagtgagactggccttttgggttgtatgagagctgggtgaggcctgtgactgccagctttccctcactcccctgacaacctgcatgacacagcagaggcaaccctaatcctcctgggaatataacaccattggcctgggaacaacacccccatccaccacagcagctgccaccaagaccaacccaaggagagtctgaactcacacatgcctagccctgcccccctgatggtccttccctacccaccctggcagctgaagacaaagggcatatacttttgggaattctagggccctgcccactgcctgatgcccctatgctactacagctgatgctctcttcaaagtgccacctcctggcaggaggccaatacaaaaatagtgcattaagcaaccaaaactaaggaccttcacagagtccattccaccctgctgccacctccaccagagcaggtgctggtatccatggctgagagacctgcagatggtttacatcacaggactctgtgcagacaaccctcagtgccagcctgaagcctggcagaccagctaggtggctagatacagaagagagataacaatcactaccactcagctctctggaaaccacatccataggaaaagggggagaatactacagcaagagaacaccccgtgggtcaaaaaatctgaatagcagccttgagccctataccatccctctgacatagcctacccaagtgagaaggaaccagaaaaacaattctggtaatatgacaaaacaactttctttaacatcccccccaaaaaattacactagctcaccagcaatggctccaaaccaagaagaaattcctgattttcctaaaaaagaattcagaaggtcagttattaagctaaacaaggaggcatcagaaaaatgtgaagtccaatttaaggaaatttaaaaaaaatgactcaagaaatgagaggcggaatcttcagtgaaatagatggcataaatagcaaggcacggtggctcacccctgtaacccaacattttgggaggctgaggcaggcagatcacttgaggtcaggaatgcaaaaccattctggccaatatggtgaaaccccatctctactaaaaatacaaaaattagctgggcatgatggcatgctcttgtagtcccagctactcaggaggttaagtcaggagaatcacttgaacccaggaggcagtggttgcagtgagccgagatcacaccactacactctagcctgggcaacagagtaagacttcatctcaaaaaaaaaaaaaaaaaaaaaaaaggaaaagaaatagatagcataaataaaataaagaactattgaaactggaagatggccaaataggaacagctccagtctgcaactcccagcatgatcgacgcagaagacgggtgatttctgcatttccaactgaggtacctggttcatctcactgggactggttggacagtgggtgcagtccaaggagggcgagctgaagcaggcgggggcatcgcctcacccaggaagtgtaagagattgggggatttccctttcctagctaaggtaagccgtgacagactacctggaaaaacaggacactcccaccaaaatagtgcttttcccaaggacttagcaaccagtagacaaggtgattcccgtgcctggctcggtgggtcccacgcccacagagccttgctcactcctagcacagcagtctgagattgaactgtgaggcagcagcctggctgagggaggggtgtccgccattgctgaggcttgagtaggtaaacaaagcagctaggaaactcgaactgggtggagcccaccacagctcaacaaggcctactgcctctagactccatctctgtgggcaggacatagctcaaaaaaaggcagcagacaacttctgcagacttaaacgtctctgtctgacagctctgaagagagcagtggttctcccagcaccgcgtttgagctctgagaaaggacagattgcctcctcaagtgagtccctgatgcccgtgtagcctatctgggagacacctcccagtagaggtggacagacaactcatataggcggctgccctctgggacgaagcttccagagaaaggatcaggcagcaatatttgttgttcagcaatatttgctcttctgcaatacttgcggttctgcagcctccgctggtgatacccaggtaaacaaggtctggaatggacctccagcaaactccaacagacctgcagctgagggacctgactgttagaaggaaaacaaaaagaaaggaatagcatcaacatcaacaaaaaggtcatctacaccaaaaccccatctgtaggtcaccaacatcaaagaccaaaggtagatataaccacaaagatggggagaaaccagagcagaaaagctgaaaattctaaaaatcagaatgccttttctcctccaaaggatcgcagctcctcaccagcaatggaacaaagctggatggagaataactttgatgagttgacagaagtaggtttcagaaggtcagtaataacaaacttctctgagctaaagaagggtgtttgaatccattgcaaggaagctaaaaaccttgaaaaaagattagatgaatggctaactagaataaacagtgtggagaagaccttaaatgacctgatggagctgaaaaccatggcacaagaacttcatgacggatgcacaagattcaatagccaattcgatcaagcggaagaaagggtatcagtgattgaagatcaaattagtgaaataaagcaaggagacaaggttacagaaaaagaataaaaagaaatgaaaaagcctccaagaaatatgggactatgtgaaaagaccaaatgtatgtttgattggtatacctgaaagtgatggggagaatggaaccaagttggaaaacagtcttcgggatattatccaggagaacttccccaacacagcaaggcaggccaacattcaaattcaggaaatacagagaacagcacagatactcctcgagaagagcaaccccaagacacataattgtcagattcaccaaggttgaaatgaaggaaaaagtgttaagagcagccagagagaaaggtcgagttaccaacaaagggaagcccattagactaacagcagatctttcagcagaaatgctacaagccagaagagagtggaggccaatattcaacattcttaaagaaaagaattttcaacccagaatttcatatccagccaaactaagcttcataagtgaaggagaaataaaatactttacagacaagcaaatgctgggagattttgtcaggaccaggcctgccttacaagaactcctg

SEQ ID NO: 586565 - DNA, 4001 bp, Homo sapiens
agtaacaaaattttctatacttttcgtgagattgatctttatgcactgcggtaaagatgcgtagagaaagcagtcagatagttactcaggtgttccaaatgggggaaaatagttacaaaataaaccacccaggcaattaccatccagtatctttagcactcaatgatccacgggtggaggatacagggttaacgttttttaacatcaggtctctccacaaatagcccgctgtagcttaactgttacgttttctaaagattcatctttataaacagtacaattatttccctttgtaatacaaacagaaacaattagaaagcaacatctcctgcaattaagatgtatgtacagtattagtataaaaccaaagagtgatatttgagctattcaggattataaattgattttgtccctgtggtattctctacaaagggtgtttcaaaaataaagactgaaatctaaaaatatatctttggtttgaaaacttacttaaaagcatttttagagagtgtgtgttttaaacagggggtatgaaattgcatcgggagcctagatttcaaactaagcatttcttatttcactccctaaccacagaacagttcagatctcagattcaaaccagagggccacagaaaccaatttgagattttccgaagagacttcactgaaacgtatggacaaaaacatgtttgcgatgagtcatattttataggaccttaatggccaataaatgccttatgtgtctttcttcctacattcagtatcactcccaagcaagctggtgacatattttccaggccttgataatttttataccgttaccagatctcggttactaagattcatgaacaaaaccctttcttgcgctaattttttaatgccatctaaatgaagagaacgcgattctttccaaactaactctccccaaccaggcagttaatgcccttcgccagaataagggcgcgatacttttaagaccccaaagagaagctcaggtgctttgggggtactacaagtaaaaagacagtgggaaaggttcctggagagccgctttgggggaaaggcagacataacaacaggatatgttcgtttctagaggaagcaggagctgcaatagccccggagcaggaaaggcggagtcagcagcgcccaaaggaaacgggcgcgccagggtttgctggaaccggggttgcttaggggttctcgccccgtctagtccgagactgctgagcacctcgcccccgggggaccaagctcaggcctcctggcactagtggttataaagaggtacccatatgctctctgccgcccctgccaaaaaaagggccacggaggggaagagaaaaagcacacaccaggcgccgcggcaggtgaacttgtcaacaagtcaaccctggacgcaagtccctgcccaccagggagctcggggtcctggggccggagccgccgggaaggcgaggcgcgcggtgggtgggtggggtgggctggcatgggtgccggtgctcccagcgctggggccggagcgcggaacgcttccctaccgctcccccggggctgacgcacgctctcacggcgcgcgcatcctccagaccttcccaggccggagggaggaggggaggggaaggggctgatgcggttcccgcaccgggatccgggacccgaggaggcgactcgcctatcacgcgccgcccgcggagggcagagaaggcagctcctaccaggcgtccccgaccgtcccggctgccgggcgtctcctgctgcttcctgcagcccgcccggcgcgcccccgccccgaccccggagggcaggtacctcggagccccggcccccaggagcctcccggccgcggtcggagcgtccctccggatcactcatccgacgtcagcgtcagccgaaggcgagggaaaggggcggggggagcgcaggaaccggcccttcctgcggcggccgccaccagccggaatagcaaccggcggagcccgtgcgcaccgcagcgcagcgcagcggccggggggtgcgggcgccctcgccgcccggctacctaccgccgcctgggcgccgccgctgcctcccttccccgcttctaccctccagcagacgcccgccggagcgacccctcccagggtgaccgggggaaggtgggtggcgttgacctcaccttgcttggggagggtcggggactcggggagtgagtttctctctctctactccccggggtctctcctcgacccccatctcctggggtatcccccgctcggatccgccgcccagagtgaccccgcccctgctctccggcaggtgttccacgtggccatagcgtttgcgtcacaatgacctggcggacaggtgggagccacagcgtacaccccagggttccctctgtgctgtgcgtagtgcctactgcttgcttccaggttaaatttctgtagctttagaggacaggagacttcatgacttcactgccaagaaaagttacagaggcctgctgtacctggaaatcaagtttgagcttcgagaataaaggtcatgttttaaaaacagctgtgtatgtataggtatatgtttttcatttccatatatttctgtatcttttatttttaagttattgccatttgtagcagtttcatcttctcttatcctttgtcaccaggaaagaaccaaaccattgtttctagagaccctgcagtatacagatcacaggaagaaaaagtgttggcatagctgcttcctaatattatctatgtggaaatgaaacctcaatgtagtatgacttcatccctagttatgttatacatttataaataagttcattcagtcgtcgctgaaacaatttaaaagggccgaatgatagttattgagtaatgatgctgacgaatcagaaatcctgcgctaacatggatggagtgctagctctatgtccggcacatgctgtatgctttatatttaatccttacagcaacccaatactgtagataaaatcattatcccgatttcacagatgaagacactgcccagagtgccataaagagattattgagcagggatttgaatctgaaccaggagacttagcttaatctcaagatagcatggtgtcttgccagaatggatggagaaaaagtatagaatatgttgacattttaatagaaagataataagatacctccagaaatttacataacctttaaagttattctttggggattctgtttgtcatagatttgagcctgtcctagtcttaacacgaattttggagctgagtaaacatctccttagtaagtgtgtatgagtaaacaaatcatgaatatggtctacaaaatagcaaattgttgaaaagctaagattcaggagaaattttcagagagaaaagcattgcttatatatatttggcttttataaaaaaaaattcaaactaacgtgttaacaacgcaagccaaatgattttgctgtaagaaaaaaaacccaaagcctttaaaatgagaaagtcttccttacaaaagaaagatgattaagatatgttaagatacattgattccaagaactgtaaatttatgtgtaaaaagctattatcgggagttaaaaggataaagagattattattctttaacagaatgaagtgccgtaatgaacatcataggtgcccgataaatgttgactgagcgttatcatcagttaattgaagcattgagaaaggactaaatcacctgaaaagtttttcctgactctgtaatgttctcctttctaccagttacatgaaaacttaatcagaagccccattggtcaaaggctggctttggggcaaatatttaaatctgttacaaaacagccagtagaatgggaggttgtgtgtgtgttcaaagtatcccctcaaaatgcagatgattggaacaaaagcatgaagggaaaaaacggggacagctgagctgcaactgattacgcagttttcttttatgctttctgaattccaaggtgaaaacgatgactgtgagtctaacctgttacag

SEQ ID NO: 586566 - DNA, 4001 bp, Homo sapiens
caattaagatgtatgtacagtattagtataaaaccaaagagtgatatttgagctattcaggattataaattgattttgtccctgtggtattctctacaaagggtgtttcaaaaataaagactgaaatctaaaaatatatctttggtttgaaaacttacttaaaagcatttttagagagtgtgtgttttaaacagggggtatgaaattgcatcgggagcctagatttcaaactaagcatttcttatttcactccctaaccacagaacagttcagatctcagattcaaaccagagggccacagaaaccaatttgagattttccgaagagacttcactgaaacgtatggacaaaaacatgtttgcgatgagtcatattttataggaccttaatggccaataaatgccttatgtgtctttcttcctacattcagtatcactcccaagcaagctggtgacatattttccaggccttgataatttttataccgttaccagatctcggttactaagattcatgaacaaaaccctttcttgcgctaattttttaatgccatctaaatgaagagaacgcgattctttccaaactaactctccccaaccaggcagttaatgcccttcgccagaataagggcgcgatacttttaagaccccaaagagaagctcaggtgctttgggggtactacaagtaaaaagacagtgggaaaggttcctggagagccgctttgggggaaaggcagacataacaacaggatatgttcgtttctagaggaagcaggagctgcaatagccccggagcaggaaaggcggagtcagcagcgcccaaaggaaacgggcgcgccagggtttgctggaaccggggttgcttaggggttctcgccccgtctagtccgagactgctgagcacctcgcccccgggggaccaagctcaggcctcctggcactagtggttataaagaggtacccatatgctctctgccgcccctgccaaaaaaagggccacggaggggaagagaaaaagcacacaccaggcgccgcggcaggtgaacttgtcaacaagtcaaccctggacgcaagtccctgcccaccagggagctcggggtcctggggccggagccgccgggaaggcgaggcgcgcggtgggtgggtggggtgggctggcatgggtgccggtgctcccagcgctggggccggagcgcggaacgcttccctaccgctcccccggggctgacgcacgctctcacggcgcgcgcatcctccagaccttcccaggccggagggaggaggggaggggaaggggctgatgcggttcccgcaccgggatccgggacccgaggaggcgactcgcctatcacgcgccgcccgcggagggcagagaaggcagctcctaccaggcgtccccgaccgtcccggctgccgggcgtctcctgctgcttcctgcagcccgcccggcgcgcccccgccccgaccccggagggcaggtacctcggagccccggcccccaggagcctcccggccgcggtcggagcgtccctccggatcactcatccgacgtcagcgtcagccgaaggcgagggaaaggggcggggggagcgcaggaaccggcccttcctgcggcggccgccaccagccggaatagcaaccggcggagcccgtgcgcaccgcagcgcagcgcagcggccggggggtgcgggcgccctcgccgcccggctacctaccgccgcctgggcgccgccgctgcctcccttccccgcttctaccctccagcagacgcccgccggagcgacccctcccagggtgaccgggggaaggtgggtggcgttgacctcaccttgcttggggagggtcggggactcggggagtgagtttctctctctctactccccggggtctctcctcgacccccatctcctggggtatcccccgctcggatccgccgcccagagtgaccccgcccctgctctccggcaggtgttccacgtggccatagcgtttgcgtcacaatgacctggcggacaggtgggagccacagcgtacaccccagggttccctctgtgctgtgcgtagtgcctactgcttgcttccaggttaaatttctgtagctttagaggacaggagacttcatgacttcactgccaagaaaagttacagaggcctgctgtacctggaaatcaagtttgagcttcgagaataaaggtcatgttttaaaaacagctgtgtatgtataggtatatgtttttcatttccatatatttctgtatcttttatttttaagttattgccatttgtagcagtttcatcttctcttatcctttgtcaccaggaaagaaccaaaccattgtttctagagaccctgcagtatacagatcacaggaagaaaaagtgttggcatagctgcttcctaatattatctatgtggaaatgaaacctcaatgtagtatgacttcatccctagttatgttatacatttataaataagttcattcagtcgtcgctgaaacaatttaaaagggccgaatgatagttattgagtaatgatgctgacgaatcagaaatcctgcgctaacatggatggagtgctagctctatgtccggcacatgctgtatgctttatatttaatccttacagcaacccaatactgtagataaaatcattatcccgatttcacagatgaagacactgcccagagtgccataaagagattattgagcagggatttgaatctgaaccaggagacttagcttaatctcaagatagcatggtgtcttgccagaatggatggagaaaaagtatagaatatgttgacattttaatagaaagataataagatacctccagaaatttacataacctttaaagttattctttggggattctgtttgtcatagatttgagcctgtcctagtcttaacacgaattttggagctgagtaaacatctccttagtaagtgtgtatgagtaaacaaatcatgaatatggtctacaaaatagcaaattgttgaaaagctaagattcaggagaaattttcagagagaaaagcattgcttatatatatttggcttttataaaaaaaaattcaaactaacgtgttaacaacgcaagccaaatgattttgctgtaagaaaaaaaacccaaagcctttaaaatgagaaagtcttccttacaaaagaaagatgattaagatatgttaagatacattgattccaagaactgtaaatttatgtgtaaaaagctattatcgggagttaaaaggataaagagattattattctttaacagaatgaagtgccgtaatgaacatcataggtgcccgataaatgttgactgagcgttatcatcagttaattgaagcattgagaaaggactaaatcacctgaaaagtttttcctgactctgtaatgttctcctttctaccagttacatgaaaacttaatcagaagccccattggtcaaaggctggctttggggcaaatatttaaatctgttacaaaacagccagtagaatgggaggttgtgtgtgtgttcaaagtatcccctcaaaatgcagatgattggaacaaaagcatgaagggaaaaaacggggacagctgagctgcaactgattacgcagttttcttttatgctttctgaattccaaggtgaaaacgatgactgtgagtctaacctgttacagaggctaaaagtggcttcaaaagcaatgtctaaaagagaacaaatacatgatacaagcattatgtagtcaacatggcactgaaattctttgggctcccggagagtttaggagaaaaccttaactgatttttcttcattctaattattgtcctaacacttagcataatatttgagaaaggaaataatagacaactcctgctcattctccatcaccacaatgagtacttttccttccccttaaataaaatggctccatcaataacacttgcatttgtttctgaataaccagctgttgtttccatcttgcagaacaccagtaaggtgctagtgag

SEQ ID NO: 586567 - DNA, 4001 bp, Homo sapiens
ggctcaaccaacgaagaggaaaaattcatcctgacacttggggcctgttaacttcctccctctctcgcatgaggtttctataatcttaaaagttcataccaaacataggtttatccttctacgttatggcataactaccagacctccataccgctaatgctgcttgcacctgaaaaaaatgtactatttagtcaaataccttgaaaacgtactgattttgaaggctctgagtaacaaaattttctatacttttcgtgagattgatctttatgcactgcggtaaagatgcgtagagaaagcagtcagatagttactcaggtgttccaaatgggggaaaatagttacaaaataaaccacccaggcaattaccatccagtatctttagcactcaatgatccacgggtggaggatacagggttaacgttttttaacatcaggtctctccacaaatagcccgctgtagcttaactgttacgttttctaaagattcatctttataaacagtacaattatttccctttgtaatacaaacagaaacaattagaaagcaacatctcctgcaattaagatgtatgtacagtattagtataaaaccaaagagtgatatttgagctattcaggattataaattgattttgtccctgtggtattctctacaaagggtgtttcaaaaataaagactgaaatctaaaaatatatctttggtttgaaaacttacttaaaagcatttttagagagtgtgtgttttaaacagggggtatgaaattgcatcgggagcctagatttcaaactaagcatttcttatttcactccctaaccacagaacagttcagatctcagattcaaaccagagggccacagaaaccaatttgagattttccgaagagacttcactgaaacgtatggacaaaaacatgtttgcgatgagtcatattttataggaccttaatggccaataaatgccttatgtgtctttcttcctacattcagtatcactcccaagcaagctggtgacatattttccaggccttgataatttttataccgttaccagatctcggttactaagattcatgaacaaaaccctttcttgcgctaattttttaatgccatctaaatgaagagaacgcgattctttccaaactaactctccccaaccaggcagttaatgcccttcgccagaataagggcgcgatacttttaagaccccaaagagaagctcaggtgctttgggggtactacaagtaaaaagacagtgggaaaggttcctggagagccgctttgggggaaaggcagacataacaacaggatatgttcgtttctagaggaagcaggagctgcaatagccccggagcaggaaaggcggagtcagcagcgcccaaaggaaacgggcgcgccagggtttgctggaaccggggttgcttaggggttctcgccccgtctagtccgagactgctgagcacctcgcccccgggggaccaagctcaggcctcctggcactagtggttataaagaggtacccatatgctctctgccgcccctgccaaaaaaagggccacggaggggaagagaaaaagcacacaccaggcgccgcggcaggtgaacttgtcaacaagtcaaccctggacgcaagtccctgcccaccagggagctcggggtcctggggccggagccgccgggaaggcgaggcgcgcggtgggtgggtggggtgggctggcatgggtgccggtgctcccagcgctggggccggagcgcggaacgcttccctaccgctcccccggggctgacgcacgctctcacggcgcgcgcatcctccagaccttcccaggccggagggaggaggggaggggaaggggctgatgcggttcccgcaccgggatccgggacccgaggaggcgactcgcctatcacgcgccgcccgcggagggcagagaaggcagctcctaccaggcgtccccgaccgtcccggctgccgggcgtctcctgctgcttcctgcagcccgcccggcgcgcccccgccccgaccccggagggcaggtacctcggagccccggcccccaggagcctcccggccgcggtcggagcgtccctccggatcactcatccgacgtcagcgtcagccgaaggcgagggaaaggggcggggggagcgcaggaaccggcccttcctgcggcggccgccaccagccggaatagcaaccggcggagcccgtgcgcaccgcagcgcagcgcagcggccggggggtgcgggcgccctcgccgcccggctacctaccgccgcctgggcgccgccgctgcctcccttccccgcttctaccctccagcagacgcccgccggagcgacccctcccagggtgaccgggggaaggtgggtggcgttgacctcaccttgcttggggagggtcggggactcggggagtgagtttctctctctctactccccggggtctctcctcgacccccatctcctggggtatcccccgctcggatccgccgcccagagtgaccccgcccctgctctccggcaggtgttccacgtggccatagcgtttgcgtcacaatgacctggcggacaggtgggagccacagcgtacaccccagggttccctctgtgctgtgcgtagtgcctactgcttgcttccaggttaaatttctgtagctttagaggacaggagacttcatgacttcactgccaagaaaagttacagaggcctgctgtacctggaaatcaagtttgagcttcgagaataaaggtcatgttttaaaaacagctgtgtatgtataggtatatgtttttcatttccatatatttctgtatcttttatttttaagttattgccatttgtagcagtttcatcttctcttatcctttgtcaccaggaaagaaccaaaccattgtttctagagaccctgcagtatacagatcacaggaagaaaaagtgttggcatagctgcttcctaatattatctatgtggaaatgaaacctcaatgtagtatgacttcatccctagttatgttatacatttataaataagttcattcagtcgtcgctgaaacaatttaaaagggccgaatgatagttattgagtaatgatgctgacgaatcagaaatcctgcgctaacatggatggagtgctagctctatgtccggcacatgctgtatgctttatatttaatccttacagcaacccaatactgtagataaaatcattatcccgatttcacagatgaagacactgcccagagtgccataaagagattattgagcagggatttgaatctgaaccaggagacttagcttaatctcaagatagcatggtgtcttgccagaatggatggagaaaaagtatagaatatgttgacattttaatagaaagataataagatacctccagaaatttacataacctttaaagttattctttggggattctgtttgtcatagatttgagcctgtcctagtcttaacacgaattttggagctgagtaaacatctccttagtaagtgtgtatgagtaaacaaatcatgaatatggtctacaaaatagcaaattgttgaaaagctaagattcaggagaaattttcagagagaaaagcattgcttatatatatttggcttttataaaaaaaaattcaaactaacgtgttaacaacgcaagccaaatgattttgctgtaagaaaaaaaacccaaagcctttaaaatgagaaagtcttccttacaaaagaaagatgattaagatatgttaagatacattgattccaagaactgtaaatttatgtgtaaaaagctattatcgggagttaaaaggataaagagattattattctttaacagaatgaagtgccgtaatgaacatcataggtgcccgataaatgttgactgagcgttatcatcagttaattgaagcattgagaaaggactaaatcacctgaaaagtttttcctgactctgtaatgttctcctttctaccagttacatgaaaacttaatcagaagcccc

SEQ ID NO: 586568 - DNA, 4001 bp, Homo sapiens
aatcccagctactggggaggctgaggcaggaagattgcttgagcccaggagtttgaggctgcagtgagctacaatcatgtcaacactgcactccagcctgggcaacagagtgagatgctatctcaaaaaaacaaaacaaaacaaaacctgacaatcacccaagtgctgtagaatacatattcttttcatcagcacatggagcattctccagaattgaccacatcttagaccacaggacaaatatcaataaattcaaaaaggtggaagtcatatctcatatattttctgaccacaatggaataaaactagaaatcaataaaacaagaggaacctcagaaaatacaggacatgaatattaaacaacatgctcctgaactaccagtgggtcaatgaagaaattaagaaggaaattaaaaaattttttgaaacaggcctggcacggtggctcaggcctgcaatcccagcactttgggaggctgaggcgggtggatcacctgaggtcaggagttcgagaccagcctggccaacatggtgaaacccccacctctactaaaaatacaaaacttagctggtgtggtggcagccgcctgtagtcccagctactcgggaggctgaggcaggagaatcgcttgaacctgggaggcggagggtgcaatgagtcaagatcgtgccattgcactccagcctggacaacaagagcgaaactctgtctcaaaaaaaaaaaaagaaagaaagaaatactatcataatctttaccttcccttcaccagacactccctacacagcaagctgaccctgtgctgacttagaacctccagagcaccagattacctcaagacagcacagtcaatttacaaccaaaagtatgcctgcaacagaactctctgccacctggagagtatccccagacgatggccactttacaacctagctctgcctgcaatggtgccagctcgaccacagggtagataagacaccataagtgagtcaagtaaacccccacctgctggctccctcccctgcatgctgttcatgccaagtgcccctttaaaagcccctactttctgcccccaaagaaaagcattatccttaaaaggaagaacctgtatttcttctcataagctaagctttggaataaatcactttctttataacagatcccgctctcgttaactggactctgcaagcagtgagcaactgaacctgtgtttcagttacagtacggcagatgcctcttcagtcacactgaattcacatttgtcccctggtggctagaagaatccagatgtacatgataaatccacggaacacatatatgaaaaatggagataacaaagcatgtcgatcttgaaaagatgttacatgagcaatcctgtaggtgggaccctccatggccacaaagggccagaggttttagctactttgattttctaccaagagctcatcctcccttccctctatccttccctcctcatcaccttcctgacccactatttgcttttaattttctccatgttcttctgcatatgatcaccttctggtttttgttcaatctcaaagaaagatttctaatctctgccaagatacccaccacttaccgggttaagagcatggactcttaactcaaaagacttgagtagcatcttagtccttgaccaatttaacatctttaagcctcagttttctcatatgcaaatggagataatacctaccttgtgatcggcttctgagaattaaatgggatgtccacgtaaagttcttcgcataatgttggcacctagtgatcaccaataaatgttaattttatgtaacagtgctaccagataaagcagctggcatcagcccaaagcctgaccagttcaggctgttggctcaagtgaaaataagtaataaaggaacatcaaatactgggaggaattacacacatccctctggaacaacctttaactatgtagaccttgaatgaaccaggagccagaaggagtgcagtctggttttaacagcagtcagccttggtagggcctcctggggttggccttcacaacaataggaagtgctgagtcatcctgcccccggggtagggtggggaagcaagcagaaatccttcatggcaggcctccgagcaagcattccagggcctactctgtccactctggtctcctgacccatttacagctgaccttctctttgtcacaaccctatttattctcccatctctcgcccactgatccaactggttattttccttctctggactcagacctcctgatcccagttcttgaggtgcagccaaatggtcaggtgttcttataaacacctgaacattttctcctttgaatcatgggatgccctgagcaggaaaagtactaactttcttgtgggaacattgctcccgttcttcttttaagagttaaatgagagggaggaaaaagcaagtaaaagatctgcacaaagtggaaacataaaaatgaagctaaggggaaaaattagatgtgttttccaaaagatagatggagcgcaactatgttattaatttcctaatcttgcctgtgcaatccaagggcatagccagagttgtaaaaatggcttgccatctattctgttataaattctccccataataagtatcaattttggtaactaattgaccctagctttctactgtaggactgtgagatgcatggtttgttctgattgtcaggatgcagagctctgcagcagactgcaggtgtcatgagttacagagctggtcaacacagaaaaggagcaacacaggaaacgcatttcaacatcttcagtcactggggaacctgaattggcaaaaatacttgccctttgaagtcttaaatataccatcccccgccccatgtttccatctaagccccctacttcctgtttcctcgcttgtcaaatgcgaagttgttacaagtctcaatgaggagactcagtccctactgatcctcttgcaaccttgatcacagcccctgcaagcaataggaggtgagaggggctgagcagctcacagagcagaaactaccatctctgcatttccttccctcttacgtaccaatctctgagattgcattctcccagccagtggtcactttccacccctcaggtgatgcaaacaatagtcatcccattgcggaggcacccacaacctgactatgaatctttctccacactgatccctgaaagtggctgtggagtggctaaggttcctccagaagtgcctttgaagaggatgctttcccagcagacaatgagggctgctctctggttcacagagggcacactattggcccatttcctgatctcgagattgttcttcttggccaacattattcaaagcttgccttctgttcaccaggtcctgaaagttctgacttcaatatttgtgctgaagatcaggcccctcgtttaaattgttactcatatttgtttgcagactgattttttgttttagaccctcggtctgtgtactcatattaattctcctggttgctaatgaaatgaactgacacaacttattttatttagttagatttgtgttattattgaggaacaggacagaattgtggaaggataattgagaacttttaaactactacaggttatttaagttattattttattaacatttctgattataaacctactgcaaagtcattttacaagacataaaaagctggggaaaatttaaattaccaagataaaagcacaataatctcaccacctaacagcaatgattattcattttgatgtatttccttccaatctttttcccctacaatttttagtaggaatagtaggtctatttttattcatagcttattcttcattgaaaaatggacactgttcaaggggtgtagcatacatatttgctagtatttccaacaactcagaaaaataggtgttgctaaaattgtggaaactgagtcccaggatgatgaattagtaaattgttcaagctaggatttaatccacacttgttttactcc

SEQ ID NO: 586569 - DNA, 4001 bp, Homo sapiens
aattcagcactgagttaaattaagtcccaaattctgccccaaaagtgaccgtgagtcacctgattaacctctgaacctaattccctttcagtaaaatcaaagttcgtatgttcaaacgtcaccaccttaacggtttttttttaatgctccaaatttaagcctgttactgttgggctggatttttttttttaacggagttgtcttttttaaaatcaaaacagagaatttagcagatttttaaattaacacagcaagcaagtggccttcagatttgcttgcgtggtgccaaagtagtaaagcataaagattaagcaatgaagccaaaatctcaaaatttcttggagtgcttaggacaggaataaacaaagacctatgacatcacactctatttctggatctatcttcctcgtttttatgactgaagtaatggcaacagatgagtgtcatctgattaattttattaacatttattcacaagtcaattcacagtttttctttttcatagcctatttctaagagtattcctcctatgcagctcttactctgctcccttaactcatcagtattaatgatttctaagattcgagggaaagaaaaaaaatacacatatatatgtatcaagaaaaagaaccctgtatgaatgcctgatatttaggtcaaactcacccacccacactgtgatcctaagtaccacgaaagagatggcactctaggcacataaagtacttatttctagagggcttactaacaaggttttgttctttcttaaaaatattctctttaaattaagtgctatgacatacctgtataaaagaagtcaattttattagcttcctaaaactctccactaacataaaaaaaataaagagtttaaatagaaaactcattaaagtaataatgacaatttggttacatagtggagacctcatttgaatcccatttcttttagatgtcatttaaaaatactagttaggtaagtggcttgttaagtaagcaaaagtttgtgtaattttccatctcttctactcaactattatttattcattgtttattaaacaagtaaaacattcacataggaccaagttaaagttttaaaaagtaaatctcacccccatacctttccccagctccacttctgaggtaaccacagttaacaagttctagcacacacttccaaagatattcaaagcatgtattgtgttataaattaatcaaagaattattttccacttgtttacatatgctaaaattcagtgatgaaatggatcttttctactaaaatagtgaaaaggtagcagcaataaagctgatgaaaggtcacaaatgagccctgaagcaaaatttaaaaggcaatccccatacagccaccagaggcctgtataggtactataagcacaaagagggaaggaggcttgcccagaaactttagacgggattaaaggtttgtgcgtgatctaggccattactaacatcattataactttcaaactttagctttcaaacttttccatttcatcaacaaaagggtaatagaataaaataaataccttctagaaagaattcaaatgtttgattcagatgaggaaaagctgaaacacagtggtaagaaatatcctcagaccaggcaccgtcccagcattgtgggaggcttaggcaggaagatccctggggacgagggactcgtgaccagcctggccaacatagaccttgtctccacaaaaaatgtaaaaaatagccaggaatggtgtcacatgcctgtagtcctagctacaggaggctgaggagggagagctgcttgagcccaggagttaagaggttgcagtgagctatgatcacaccacaccgcactccagcctgggcgacagagccagactccctctttcccttaacaaaaaaaaaaaaagtatcctcaattcacatagagcaaccagaggccacaataaattacatattttacatcttgataaagaatgaatttcatcaacatggagagcattcaaaataaagaggcacctaaaaaatgtaaaaaattgctgttttaagaatccctccctatggtcaattattaaatgtttaatacatgatcacgagtttttgagcttttttaaatgccagtttccaataacctttaacaacataaccccatatttacttttcttgtgaacaaaggcatatcattctgagtggcagccgtggcagaggggcaactgtgtccaaaaatacctgatggctaatagttccagtgtgataacgtcggagaatactccaatatttaactcctgtttaaatttctaaataaaatattacccaggttatttaatactcgatttgagtttattggggtctctcctagaagggccttccaattccaattggaatcctttttcttaaccatataataagtagaaaaccataagttcagttaagcacctactcatcccacccaggaaaagtttcaacttcgtagcgagggcacaataacctcaacttttagccaactgcaacctaagctcctcaccaccctgcctctctggggctcactgcagagaacatatagaatgcagcacaaaggagaacgcgtttcttccccccgtgagcaggaggtcgcctcgggtggtcgcagaggtgctagaggttcagggcttctgcaggtgccagttaggggaaggagcacagcctaggggggagaaagtggtccccccgcctccgacgccttcgcctggccaggtggacctgcgagacggaaagcttccccagcgcctctgcgtcaccccgggcccaccgcgcaaggcccaggccgcgtgacgcaagagcccgtccaaacccgccggacgtctggcatcccaggagctccatgttggagccagggtgtcaaaggcggccagtgacggcacgggctcaactccccgttcttccccacccgtggtcggggagagatcgggcgagatcgccgccgagaaaggaactctgacaatggttcctttcccgcccagctcccggtcagcccctgtcccgacacactctcaggcccaaggacccgttcctccctgcccccacggccggtgcccaagagtccggttcgcacgccagatctaaatcgcgcgaggagcagcgcccagggcacgctgggaattgtagttcagtagccaaaccacgcaccctggaaatgcaaatgtgtacatcagagaaagaactacaactcccaccgtgccgaagcatggaagactcgccagcctggccggcaactgggatgccggcggcggggataccccttacctgctgtcgccgccgtcgctgcggctgctcctgacccgccgccgccagcactgctaccgcggtggggagtgttccgcttcttgttcttcggcatcgtgggacgcccggtgccgcccagagtcggagcttagcgaggatcagccgatggagctgcactttttactcgtgcgtctgtgcggcgggcggctgagaggcgagtcttcggctaacaacagagtcgagaagcggcgggggtaagagtgggcggtggcggcagcagaaatccccgtgaagagctgtgatcgaaaacgatacatgtttctctctagcgcgggagctaaggcggggcaggggaggccacgacgccttaagtagcaataccgccacctgacgtcactctgtgggcggggcttgagcgcttcccaaccaatccctgcacacctccccactggacgcctccgtcgggcggggcgcggatcctacctacaaatcccatgcggccagtcttccgtccgcgcccagggagcctgtcttcgtggcctcactgaattctgggaaacgtagtaaggctggggccggggcctcctcccagccgtctcttcccaacgggcttttctgcccacttgcttttctcctggtgaccccacccctgcctcggcgcgcccccgccttggaactgggtgaggtaggcaccggcgatgcacagtggggcgagtatgccctatgacgagagtcggcttccagct

SEQ ID NO: 586570 - DNA, 4001 bp, Homo sapiens
tcccagcattgtgggaggcttaggcaggaagatccctggggacgagggactcgtgaccagcctggccaacatagaccttgtctccacaaaaaatgtaaaaaatagccaggaatggtgtcacatgcctgtagtcctagctacaggaggctgaggagggagagctgcttgagcccaggagttaagaggttgcagtgagctatgatcacaccacaccgcactccagcctgggcgacagagccagactccctctttcccttaacaaaaaaaaaaaaagtatcctcaattcacatagagcaaccagaggccacaataaattacatattttacatcttgataaagaatgaatttcatcaacatggagagcattcaaaataaagaggcacctaaaaaatgtaaaaaattgctgttttaagaatccctccctatggtcaattattaaatgtttaatacatgatcacgagtttttgagcttttttaaatgccagtttccaataacctttaacaacataaccccatatttacttttcttgtgaacaaaggcatatcattctgagtggcagccgtggcagaggggcaactgtgtccaaaaatacctgatggctaatagttccagtgtgataacgtcggagaatactccaatatttaactcctgtttaaatttctaaataaaatattacccaggttatttaatactcgatttgagtttattggggtctctcctagaagggccttccaattccaattggaatcctttttcttaaccatataataagtagaaaaccataagttcagttaagcacctactcatcccacccaggaaaagtttcaacttcgtagcgagggcacaataacctcaacttttagccaactgcaacctaagctcctcaccaccctgcctctctggggctcactgcagagaacatatagaatgcagcacaaaggagaacgcgtttcttccccccgtgagcaggaggtcgcctcgggtggtcgcagaggtgctagaggttcagggcttctgcaggtgccagttaggggaaggagcacagcctaggggggagaaagtggtccccccgcctccgacgccttcgcctggccaggtggacctgcgagacggaaagcttccccagcgcctctgcgtcaccccgggcccaccgcgcaaggcccaggccgcgtgacgcaagagcccgtccaaacccgccggacgtctggcatcccaggagctccatgttggagccagggtgtcaaaggcggccagtgacggcacgggctcaactccccgttcttccccacccgtggtcggggagagatcgggcgagatcgccgccgagaaaggaactctgacaatggttcctttcccgcccagctcccggtcagcccctgtcccgacacactctcaggcccaaggacccgttcctccctgcccccacggccggtgcccaagagtccggttcgcacgccagatctaaatcgcgcgaggagcagcgcccagggcacgctgggaattgtagttcagtagccaaaccacgcaccctggaaatgcaaatgtgtacatcagagaaagaactacaactcccaccgtgccgaagcatggaagactcgccagcctggccggcaactgggatgccggcggcggggataccccttacctgctgtcgccgccgtcgctgcggctgctcctgacccgccgccgccagcactgctaccgcggtggggagtgttccgcttcttgttcttcggcatcgtgggacgcccggtgccgcccagagtcggagcttagcgaggatcagccgatggagctgcactttttactcgtgcgtctgtgcggcgggcggctgagaggcgagtcttcggctaacaacagagtcgagaagcggcgggggtaagagtgggcggtggcggcagcagaaatccccgtgaagagctgtgatcgaaaacgatacatgtttctctctagcgcgggagctaaggcggggcaggggaggccacgacgccttaagtagcaataccgccacctgacgtcactctgtgggcggggcttgagcgcttcccaaccaatccctgcacacctccccactggacgcctccgtcgggcggggcgcggatcctacctacaaatcccatgcggccagtcttccgtccgcgcccagggagcctgtcttcgtggcctcactgaattctgggaaacgtagtaaggctggggccggggcctcctcccagccgtctcttcccaacgggcttttctgcccacttgcttttctcctggtgaccccacccctgcctcggcgcgcccccgccttggaactgggtgaggtaggcaccggcgatgcacagtggggcgagtatgccctatgacgagagtcggcttccagctggcagctatgcaatcacctttgcttctctttctccggaggctggtgttctccttaacctttcccctacttccctgcggcacctgccaggcacgcagccttacctctcctgggtaacatttccatggttttagttttaactagttccatgaactacttaagccatcatcagtactgtacctgtaattggaccgtggttcagggttatgtgccccccatccccccccccccccaaaaaaagggatgctttcgtctacttagttgtggagttcgtgtatatctcagattctagactaggaatatatgacgattcagcgttgtgggtttctatacaagaatgtgtcccttgacaatactacctgccagttctgagaatttcacagctggtaaaacaaacacaagttatacagatcaataatcgcagtgctgccttttttctcaaggcactcctagatctctgtcttccttgttaggacatttgtctagtatttagagcctgttattaggttcatatactatgcttatgacagatcaaagtccctgactcacctcaatgtaggtgagtcatccgccactccacctctcagctgagctctattctattttcaattgcctgtagcaaatttccaccagaatgttccacttgtgcctcaacccaacatctctgaaacgaatactatatttccttcttcctgtcttccctttgttcactgtactatttattatcctcccatatgttaaattccaaaactcaaattcatagtcttttttccctttgatgcaccaccccctccccacccgcaaagcaattagttttaaaatagcactcttaaattcctgtcctattctgtgatcacatgtgacctcagttcatgcctgggcattttaagcgatctcccagtcttttcatccatgtttcatgcacagtaatgctgccagatttatttgtgtgttccctattttactaatccacctgctttaatagttgctcaaaaacattccatggctcccatgactaactttaaatgccaacccttttagcctggccctgactccctttccagcctcatctttcactgcttcctcatacagttcttgttcttcagccaaacaggactgcttttcatttccaatacacggctctcttctcctacctccatttcctcattcatattctttcctgttcttgtaatgcctttcctcccatcttcaccttaagaaattttatccaccgttcaagatgtagctcatgctgccaccttcctgaagcctccagccagaagtttcttcctcctcacaactctttgacactcatcctaataatgccctaatggcacttattacctccccacacggcctactcaaagatgctatttaatgggcaacatttcagggttgcttttactttgtttaatcctgaagcagccagtaaactgcacagagcacagaaaccaaatacggaggcaggttgtgggggaggaagcagctcacactgactccttgtatctagaggcacactgcaactcagtgacagggcctatacagaatgagatgtctcacagaattgtagactcaataacttttataaccctaggctcttcaccatccagaaacaatttatactatacataa

SEQ ID NO: 586571 - DNA, 4001 bp, Homo sapiens
ttgtagagatggggtttccctatgttgcccaggctggtcttgaatgcttgagctcaagtggtctccccacctcagcctcccaaagtgctggcaggtgttagccactgtgcctggcctaagacttctacaggttttattttattttttttttagatggagtttcgctcttgttccccaggctggagtgcaatggcgcgatcttggcttattgcaacctctgcctcccggattcaagcaattctcctgcctcagactcccgagtcactgggattacaggcatgcaccaccaagcccagcgaatttttgtatttttagtacagatggggtttcaccatgttactcaggctggactcgaactcctgacctcaggtgatccacctgcattggcctcccaaagtgctgggattagaagcgtgagcctccgcatccggctgggttttttttttttaattattattagtttttgagacggagtctcgctctgtctcccaggctggagtgcagtggcgcagacttggctcactgcaagctccacctcccgggttcacgcctcagcctcccgagtagctgggactacaggcacccgccaccacgcccggctaattttttgtatttttagtagagacggggtttcaccgtgttagccaggatggtctcgatctcctgaccttgtgatatgcctgcctcggcctcccaaagtgctgggattacaggcgtgagccaccgcgcccggccttttttttttttttttttttttaaacgcatttagccttagtccatctgagctttatttctgtggatgatgtgaagtatacatgtagatgtgatccccactaccacgcccccaacacacacattaatagccaatggttccaggaccatatagtaaaacgcccaggactcgagcaaaggctcatgcctgtaatcccagaactttgagagactgaggcgggaggactgtttgagcccaagagttggagaccagcctaggtgctaggcaacatagcaagatcctgtctctacaaataattaacaaattaaggccaggcgcggtggctcatccctataatcccagcactgtgggaggccgaggctggcggatcacttgaggtcagcagagaccagcctggccaacaaggtgaaaacacacctctacaaaaaatacaaaaattagccaggggtaatggcgtgggcctgtaatctcagctactcaggaggctgaggcaggagaatcgcttgaacccgggaggcggagtttgcactgagccaagatcatgccactgcactccagcctgggtgacagggcgagactctgtctcaaaaaaacaaaacaaaacaaaaacaacaaatttagtcgggcgtggtggtgcacgcctgtagtcccaggtactcaggaggctgaggcaggaggactgcttgagcccagggaagtcgaggctgcagtgagctatgatcacaccactgcactccagcctggacgacacagcgacaacctgtctcaaacaaaagtccagacccacagacgcattcattagggggatcccgggggcaaaagaaagagtcacgaaacctaggctatggttccaatgatgccactcagtaccttgggccttcggggctcattaacaccgggctcgcctccactacctcctccgggcagtggttggaatcaaggtctgaaagcaccgagttcacggaaagggcaggggcgccagtcgggatgggcgcggtgggcccgggttcccgcctccgggagcaagccgcagatcagacgggtggggacctgcgctcgcccaggccccgaggcctgctccccgctccctctgccgcgccgggccaggacttacctcgcaaggccccacgaagaggatcttggctttcagcatagttgtccgccgcggcttagccggccggagcccacgggaggcggcgcgtcaggacggagctctacttggccgctttcgtttccatggcgacggagagaggcccgcagggccgacgggactcggccacttccggcgcgcggggcggaaagcgggcgcgtctgcgactgggagggggtcggagagaagccacaaagcccgggctgcagacgcggttctgcagggttggcctgtatttcttttagagacagggtctcactctgtcgcccaggctggagcgcagtggcgcgatctcgggtcactgcaacctccaacttttgggctcaaacgatctttctgcctcagcctcccgagtagctggcactacaggcatgtgccatcacgtccgactaatttttaaaatttttttatttgtaagactgggttttgctatgttgcccaggctgttttcgaactcctgggctgaaatgatcctcccatctccacctcccaaaattctgggactgcaggcccgttccaccagtctcggtagagacgcggaaagcaagactccaggagggggcggaatggccgtttccaaacctttgtttctcccaataatcccgagagctcagacaggccatacaagtgccaagctggccttggaaccaggccttgactcctttatcactgtggcatgatatcactgtggccgtccacctgggagccgatttatcactgccgtggcacagctcagaaaaaatcaggtgaaagtctggtttctgtaaaaggattcaccactcactatcattcgtctgacctaggagaaaccaaagagatgatgactggaatcgtttagtcagtgcaggtgtctagaaacattgctgctaaattcaatcagttaggtcagtctgaaaatacagagtcaagtcagaattttggataagccatgatattaaatgtctatgtgccgagagtgccggtacaaaatatgctagcccataaaagggctgaaatgacaaaaatttctagtcaaccccgtatcaaatctttaaccttcggtaacatagttacatagtctttgtattgaaaagaactacttggctggccgcggtggcccaggcctgtaatcccagcactttgggaggccgaggcaggtggatcacttgaggttctgcacagtcccttcgtcctggtagattctaggccagatggggagaccaccctgcagagtgccgcttgtcaagtgttttcccatgcacattcccatgcacaggtttttttttattattatttttatttttattttattttatttattttattttttgagatggagtctagctctgtcgcccaggctggagtgcagtggtgtgatctcggctcactgcaaactccacctcccgggttcaagtgattctcctgcctcagcctcctgagtagctgggattacaggcacatgccatcacatgcagctaatttttgtgtttttagtagagacggggttttgtcatgttggctgggttggtcttgaacccctgacctcaagtcctttctgatctgcccgcctcagcctctgaaagtgccggaattacaggcctgagccactgatcccacccccatgtacagtttaattttcatttgcaaatggagctattacagtaaggcgaagtgatgagtatcctaaattgatgtcagggaggaggcgggaaccatgggctttcagcagctccagttctcctttcttttctttttttctgtttttttttttttttgagatggagacttgctctgtcgcccatgctggagtgcagtggcgagatctcggctcactgcaacctctgcctcctcggttcaagtgattatcctgcctcagcctcccgagtagctgggattacaggcgcataccaccatgcctggctaatttttgtatttttagtagcaacagggcttcaccatgttggccaggctggtgtcaaactcctgacctcatggtatccgcccgccttggcctcctaaagtgctgggatcacagtgtgagccgccgcgcccagcccggttctcctttctatgtgtaaagatgccatttcccctctatgtacagtaatggttgtgcctcttgccaggtccagagtccag

SEQ ID NO: 586572 - DNA, 4001 bp, Homo sapiens
acacggcagggggtaagcaccagaggacaagaagttctcagctgagtctctccacccaataacggagtgagaacagaatcggggcaaacagaagcagcagctcacctttgcctttttgggaccgagtgctcaacttctatgggtttcccgtgcagttctattttacctgcggacacacaagaagtgagacggtcggccgagttcagcggctctccctgcccgaagacccgcacagcccaagcggcgacacaaatggcctcctgaggccctcgaagggcccccgaggcccggacgcggctccaggcggagggagaagccgaccccctcgagcggcgtgggcatttaactcgcagatggttggggagcagggtccgctggcgggcccactacttgggtatcagtccagtctccaagcctcccccacccacccctgggggccaccaacaccacgaggcccgcaagagggacgcggcccaccctctcaccgccctggacacgctccacagggcagactcggggcagggggctcccctggctttcttcaggagggggcgccctggccctgccctctgcttcagcccagacccgccgggaacactcagcggtgggcttgaggaagacagggagtggcgagaaagggtcggggacggcaggggagaccacgaacgggagaactggcagaggcgcagctcggcacaggctgaaccaggcgcgaaggacggcgaggcgcccgcaccacgtctgaattgattaaaagggaagccgaaaggcacggggctcccatggggaccccaacgcagccttccccctgggcgtcctgctccgcccggcaccgtccctcgccctggcggagccatacccggaggccgcagccccgcgccagggcccggagagcggcgggcggccggtgcgtggcggcgactcccttccaggcgaccagccgcccccgcccacctgcccctatcgctcgtcggaccaggggaggtggaacggggaaaccgggcacacactctctcctcccacagggtggggaggaagcgcggggccgcctgtgcgaggcaccagcctcgcggtctcactcggcagcacggtcgaggccactttccgttctccacggccgggggtttcggggcgcagcacagacagcgccgtaaataacgaccgaggaaagcaggaaggaacgaggcacaggcgggcattctagctcggcccccgaggcccagcgtgccggggcctggagcacgcgcctgggcccgggcggggcgccgggggagcgcgcctcccccagccccgcgccccccttagccagcgccggggctttcttgacagcgcgttcgccctcacccagcaaaccccggccggggaagcagagccgcgggccggagtgggagccggagctgaggagagccccggcccccacgcgcgtgggtgtgggcgctcaggcctcacccccgctcccccagcgcgccgggcctggggcccgcggagccacccggtgggcctgggcgggcggtgcagggctggggcgagagcccgggtggggccaggcccgggcccacctgaaagcgcctcgatggccttgagggcccagctctcgtccgggcagtccacgaacgcgtagccagtcttcaccaggaagggtcccgacaccgggatcttggcgtccttgaagatactttctaggtccgagggggcggcgttctcgctgaggtttccgatatacagtttgttcattgtgaagagtggttgtttaaaaaaaaataacgagaaaaaacgaaaaattaaaaccacccacggtgatggatggatccagctggttttgttcccctcgtcttctcgcctttaaaatacacaaacacagtaagaaccaagcacaagaacgaggagtgaaaaatcagatccgaggcttgttttttccttgtctagatgtgttttaaaagagaaagaaaagaaaaagcctagctacaacccaaacgcatccaccagtcttcctaagtcttaggaggaggcgggattagcaagagaaaggaggaggaggaggggaaaaaactactttttgtctcttccttcccaacccctttggcttcggccagcggactgtgaaaatatcacactacgtgaggcaggcgccgcctccccataaaaaacccagaagggtgactggcaggagggaggggagaggaggaggaggaggagggaggaaggcgcaggaggcggaaaaaatccgctccgagtgtccggctttttgaatgagccacgtgttcaaactacaaatcaacgtctcacgtgaggaatcccagagcctcaattagagtgggtttcggagaaaaaagcgagcgagaggaagagggggaggggaaacgagattgggagagggactctgagaagggggaggaggaagaaggaaaatgctaaaggaaccgcagccggcaccaagcggggcgctgacggtcacaactcgagtttgtaaagggttatctggtctgggcggatcctgggagggagggctggaatattgatttttttttttttaatgaggaaatgggcagaggtactaacaggcagttcctcagcgctagttaccgtagttttaatcattcgatttttcaaaataggttattaacaacaaaaccagagtcacaatcccgaactcgcctggtggctttaatggcattagaagtgtaaccccagcaaagccgcaggcacgtttctaaggctggcatggacggaaatgctgcgaggaggggtgggggagtgggtgaggggggcagggggtgggggcaagacaggcgggcgacgcgccccaccccgtgcgcccttctcgggccctgggcaccgcgcgagtgggggcggcccggccccggagtggtgggggatgggatcccgcagcgtcctgggcgggtgtctgggcgacacctcctccgcctccgcctgcgctcgcggtggctctcggcttcgcgtttgccattggttgcgcgattcagaaaaggctccaggataaatgaggccgggggcgggcttggccactggtgggggaggggagtgcaggggcggaggtttctggctaggggctggggtcgtcgggggcctgggccgctggaggagagaagtcaaagtgggaaaagtcggtaaagggaaaccctctcttcctgtagtttttaaagggggaggagtggagtaggctggtacttttatttaagtaattttagttggagaacttgagacttaaaactggaagaccgtcgtgcattacccctaggtggtattcgcatttgaaaaattgttcgagtctctttctgcctcttttctgcctggatttggccatgagagccatacataattttctctatatgtaatgagtacaatggtggttgtcgggggaggatttgggcccggtggagccttgtgggccaacaaaatgtgaactggagacgagcaatacggaaacgaaggcagtgctggggttctagtggaatctccaactgtcgtttaaagattgtgtactccactcaaaggtttcatttgcaccagatacttgtgtgtttttaacaggtatatttttaacaggtattctattgaaaagatagaaaattctaattttttaagtgaaagaaattctatataacatgaaaatatagacaagaatctttaatgacttggtactcttactggtagaaaaaaggtatcctgaatagaggaaatattatgatttacactggaaacatcttcggtaattgatacagccttgcttctctgtcaaaaccgttgttagcattttaaaatgtgtatttttcatttaaaagatgaatggtagacttaaacatgggaattgttgcatgatataaagagtatttacattttgtcttttaaagggaacttactttgtaattttgtgttaaggaaccggaaggtgtcagatcatccattttaaatgcaactgttctttcttacaggtttttctttcctgccaagcgaatccaacattttaaacgtaaacacac

SEQ ID NO: 586573 - DNA, 4001 bp, Homo sapiens
aacagcatgccagctctgttcctgacaatagtaagtttcagggcctggcaagggtgccccacgtttctgcttttaaagcagcaggggagcagagcaacaaatgcatttgctgaggttgagaacaaccctaaagaagccaggattagagttcagttcctaaccgcattagtagggagcctcgaaacctcagcttctccatccttaaaatggggattttactaatatccctgaatggatggtacagttcatctagaagtggagtctagaatgcagctctcctgacccaaactactaccctcttctattttggggcccctgccttcccacgtcctaatggacttctctgcaacaccccctccacccccatggcaagaggatcttgcagatagagtccaaaggtacatgaacagaatcagcacactggcctataagggaccccctgtggaaatccatctccttgaggatcagtgagacgactccctttcatttcctctgaagggcagagaatccgcaggaaatccctgttccctccttggaagggtcactgactctcacacactcactctaacaccctatcagggtatggaagtcctaattcctccaagaatggcacaggacaggacgtgcaagcagtccagatgaggagataggggctggagtagagaaagaggcatttcctccacttcccgctacaaacaaatgcctgcttaaatccaggaaagaacctgattgtcatgttcttagggggcaacatacacatcaaacattgtttttctatggcaatgaatggaagtgaagcttttagcctcaactctcacattatgttctgtaaacatctgggaagcacatactgtatccaggacgtatattacaaaggacattccaaacacctcctggggaggccagcaggagggattcccttcttaggccttcccggatgctccagccactggggctgcccacgtgctggcaaggagactggtgggggacccagggtggcatcccaactgcggaggcagccccaccgcctccctctactcttgctgtctgggtctctaaagatctctgggctacgagggccaagtgggagcttcctccttgagtctccactaagctatgtgtgccctggaacatcttccttcttctcccagagcacgtcctgccaagaccgtgcaatgagcgggctccactgggtgacccaagctccttccccaactacgtgctctggtttcaagctctagttgtggacaagcccctgcccggctgcagccccacccagtagttaggggagtgggggcgggaggtgccgggcgggggcgggcggcaggaggtgctggagcaggggcgggactgtggtacctgcagcatggggagcggaggcgtcagactcctgcacgcaggcgccttggccgcgggtgagggcgtgcagaggttgctgctcccccggcagcgcgcggcaactgagtccccgggcgcagcgtgcagtcgccacgccgcacgcggcgcccagaggcagggcgcacatcgggcaacagccgcagccggcggaccgggtgacctccgagcacgaggcggacaccggcgggcagagcgcgagcttctcggcggagcagggcgcgcactgccacggagcgccggctgtcacgccgacctggacagtcagcaggagcagtaccagccagacgcgagcaacggggacctctgacatctccaggcgcgagcagcagacaggggccgatgctctctgggctggtggcggcgggcggtggcccaaactctgggcaagtgatggtggagcggtggccagtgctctctgggagggtggcggcggcgcggcggcagatgctcgctggatgggatggcggtggccgatgctcgctggacacagcgcgcaccttataaagggcacaggccgcgccacttgcaccaggaggttaatgattggcagcgccgcacgctaggagctgagtgttcaaaataagtttgttttgctagtgcacccaaggccctacgcaaaccgctggtgggaggagggtaaacggttttgatttcatactgtttgtcccgttgttagggggttcaggccctcagttaaagtccagttctaacaagtgctcagctgggagggggatgacgtttgtttttgtcaaaaagacagcccaggtccagctggccaggctctttaattgacacagaaaaaagccctagagatctcctgcaaagcgtctcctgcaaaaatttaaaaatcctgggtaacaccagcccacccagcagttctcaaacgcagaaaacaatgccccaggtgaggaaaggcgagatggggttagaatccaggtctctgcgagccctagcaggttatctgtggaaaagcccggaattgcttctctttctgcaggaaaaaggctccaacctgcaacaaaacaaaacaaaaacacagttcatcctagggctctgccaagctccccaatctcactctacctccaagagcctttctcctctctggaggggcagttaagaaggtctaacaaggtcttgttagcagtggagccagaatcccagggcacccatgactttcccgcataggccagatatttatcagtagcaaatgcaaaggttttctctttagttaaaattctcatttctcggatattctctttcacaggaaagaagtcgaaagaaaaaaatccttcaaagaaagtcagaatcaggcttatctccaggagttgcaggctctccccatcactccctccatggccttccagtggagagctgtgatcagggagcgtgccatgctccaggcctgccccttggtctctcctgtgacccccaaaccccacattttcccacccacctgccaccatctttgcctcccattctaggcacaggctcagggctaccctacctccaggcctgggcctcctgttgtcccttcagatcctttaggagtggtgttgccaaactgggaaactggagatggcttgtccagccccttgctttatagaggagaacactgaggccagagaaggaaggctattgccaggtcaaagtcacagaggctataacggtggatcctgaacaagaattcacatttctgatgcccatacagtcctgtttactgtaagcaagccctaagtaaatgcctttctctgtaatctggctaaaacactctaaaacagtagagcattgctgaatcacctcaagtgacagtcattcttacattcaaggaaatgatccctgctgctcccttcagggaaggtgtaagggcaggtgaaaataataactaccctgaaattctgaagctggaggtagaatggtctgtgctaacaatgccaccctcagctgtttatcctacagatgatgagacagacgtgagagatcattttaaacttatgtgaaaaaatacgcgaaccaatccctatctggaagccatactgcaagtaacctaaatgcccatctctaggtgctggatacataaatcctggggcatccttccactggaagatagacagctatcaacaagaaagagcaactctgattttcttatagagaaaaatctctaaaagtaaagtgattcaactgaagtaaaatctcctagctaagtacaaatgagaaagtacagagtgtggtactgtttgtgtacaataaaagcaagatgaatgtatgcaactgattctacatttattgaatgttttgggaggaatacataaattgatagcaatgccttcttgtgggtggtggtgaaaaatgtgactgagggacagaccggttttccttgcataccctttcttaaccttctgaatttgtagatgtatttacactgtctgttacattatcaatctaaagaataaccaaggggccaggctcagtggctcatgcctgtaatcccaacactttgggaggccaaggtgggcggatcaccagagatcaggaattcgagaccagactgaccaacatggcaaaaccccatctctactaaaaatacaaaaattatccaggcatgg

SEQ ID NO: 586574 - DNA, 4001 bp, Homo sapiens
tggtaatcatgatgattgctaaagcccaagaatgacgatgtgtatcagtatttctaagatcactttttgaataccccaaaatgcacaataatgtacgacacttggcaaatgacataactttgccccgagagacaaatgcctccagcagctttaacagctgaccagagccagtgtatgtttcaggcatcttgcctttccatgaatccagcatttctcaggggtgaacagagccagccttgccgagccagaaaataacttcacccgggcgtggaactctacagctacataaattataaagggactgttcatcctgctagccctagatgggggcctgcccagtgacatctgtccaacgtgatcgttggggagttgggggaattaggatggggagaattctcccagccttcagctgtgcaaggcaggaactttatttctcatataactaggtgaggctggctaagaatgcttgaaagaacagctgccaaatccatttaaacaacccccgctcctttttttaagggaacaatgtgatgcccttaccagagtcgctgtctgcctgatactgatagtggctaagccaagagggtaactctgccaaatgtttgcatttttcctcttctggggctccccttaacaacatctcattcccccccccatttcagattaagaagggagacagccctaggactgattccaattcccttccgtgtcattgaaattgacttagtccacattgcccgcacccaccacgcacctggaagtttgtttgaggtcggcgcaggtgcaggggtggcccgagttgtaagaatggtatggtactgaaagtggcacgcggagttcaaacctacactctgttgtggccgctgggtaaccttaagaagttacttctttttcagcttcaggttttccaaccgcagaagatatcaaaacccgaatccactttacttgtttttggacataccgggactagacattgctttgcaaaccaaaaggctgtgcaaagtcagtattttaaaagagaggtactatttcctacaacgtgcctgcccaccttccttggtccaaatccgcctatatcccccccatccccaagcatccctgggattgcagtccgtgtgcacccccgtgcggggcgaggagaatctcctgtgtccaggatctttccaacagctaaacatcggtaccgctcccctcagctccggaaacctttaacccattttcactgaaagcgctttgcaatttacaagtactctgcacttagagaatcgagcaagtagagggccggctggggagggtccctccggcgaccgccttcacctttcccggagcgccttcagtttccccacatattatctccagtgagaagaaaagcggagtctcccgcagcggcacccagcaacccccaggcccttcggcgccagtgcgccgggtgctgcacgcagcgcacctggcgcgggcggctcacctggagctggcggcgctggcagcaggtaggcgcgcaggcggctgacggcactagcgttgacgcagagcccgcggccgtccagcagcgcctgcagcggtcgcgcctcgtcgggcgacggctggcagcgaaggccggagccacagcgctcggtgtagatgccgcacggctggccctcgctcagtgcgcacgtcaggcagcagccgcagcccggctcgcgcaccagctccgcgcacacggcgggcggaggcgcgcactgggccagtgcacgcgcgtcgcacggctcgcagcgcaccacgggacccaagcccgccgagctcgcgccagcccgcgccaccggcggcccgcggagcagcaccagcagagtcagcgcagcggcccagagcgtgggtcgcgcccgctgcatgacgcctgcaaccggggcacgctgcttggcaggctgggcgcgcagggatggggcgacagtacacggcgcgaagctgtggaatccaggcaggaagcggctgatcctcagcgcccagccgcagtgctcgcatctgggcggcccgggcgcgccggccgctatatagaagccggggtggcccaggacacgccccggaacggcgcgcccaggagtgggggttgggaggggggcgggtcggcgcaggcacggctgcgggggcccgtgcttcgccctgagcagccggggccgagctcgggggcgtgcagctcgagactcgcccgggcacctgctcctcgtgcgcacgcccggagcccgggtcaccttgtcgtctacaagaaccaaggtgtgcccggccaccccggcactccaggccacctcagcacccccggtcaccccagtcactcctggccaactcagcacccccgatctccttgaccccgccgcccttaccccttccgctctcggggtgaggtctccctgcggcgagccggtgtcggggaaactggcatacagcgctccgcattcgtgtgtacctcgtggagctttctaaaatttaattccgttggcaggcgaagtcttgggacatttctgacttacatttgggtctcagggagccaaggcactgcggggtttaatttacacccgctgggctgtttatatccccaggggcccacaaatacgcatctgaagatgcgcccggggccttcgcccctttccaggcttacttctcaacgcaagaagactctcacgtgttgctacaccgcaagtctccaattaagagtggaccggcaagcgaatgcgtccttaaggcagggcttttcaaatattttaaatgacaactgttcttcttgtcttgggtattctccctgattatgttttcaaatggagtttacacccatgacaaaagaataataaagacaataaactgggcactgctgaaacgtaattaaccaaatagtcctttaataggcaattttcattgtcattttttgaaggcgacttcgtattactgtattctcgatgcgttgggattctagcttatctctgcaatctaaacacttttcagtaaagttcgggggcgcaattgcgcgctgaggtcgctgtaactcctgtcggccttctctggcactcgagtttcttcagttttgtctgcgcaccccctcccttcggtgaccaacagaggacgctggtggtccaggattggattgaggattaaatttttcaaggcacttttccaaagagtttgtgggggtggagtgggaagcggtgagacctccgcgggaggagactttcctgaacgctgttgaaattggacgcttgccttaggaggtggataggtgacttgaaggagccctttgcagtttggagtagtaatagcaaatcaggagctcctccattcccctccagcacgaagccttgggtgaagttaatcttcattcatcatttctgtctctcctaatcgatctctcgcccagtgtctctccttgtccctctccctccctttctctctctcgtcctctccccttttccccctgtccacctcttcccccatatctatacagcttccttttatacatatatactctccttttagaatggaaagatcaatttcgttccctcttgtactaaataaataaataattggacctctacaaataaaaagagaccaaagacaagaacaatggagtgccccggggtgacgaaggcccagcaccgtcattttcttatgagctcttctcccacagtgctcaggctgtggctacactcaaccttgtttacaggaaaccgtgccataatcgtcgcttgctgtttcctttctcttgtatcacctccttctagtatctgcgttgacacccaagaacaggatctctgatttcattggaaaattgaaggaaacaaaacgaatcccccaggtttacatccgttccttaaatactcgcagagaccttgactctgaaattagagctgggttcggcatcaaatgcaattcttgaggtcccaggtctgcagttctggttagtgcaatgttgcagcagagcctggactgaccactggttagtgtagcactttttattcagctttatcatctggagagtg

SEQ ID NO: 586575 - DNA, 4001 bp, Homo sapiens
caaaggaaatggctacaaacggccacagctgatcttctctttaggagcctgtgtaaaactcttcgaaagggtcaaacctaacacatccagacttttatctgcagcccttgtggtctcctggagaccctgagggtgggtgattattgctatgatgtttctgcattaggggggtgtgtagttttccaagaggtaccactctaattagaacactgatgaattaaacaagtactggagagtttctaaactccttccttcaactctcaccgtgaaacaaaaggggaagaaaacatgaccatttagttcaataaaatgttctggtcaccagctctgattgactgtgagacttaagagtcacgttttttttcatgtaaaaaatgtatgaaatatgttcatggtgaaattggaaatcagatacattccatcaagcaagaatagtgtagtatttttaatgtgacatcattatttgtatgtgtacacattatttctttaacttgttctgcattttacaagatgccagcgtaagaaggtgaatcttcttgtcatgaatatttgcctcgtgtacattttaagccatagcccaaatgatctgatttgtcacggaaataattctgacacattctaatataaataatactgaaattgttactttttaaaattccatataaaagatgagtacaataaaactcattgaacaaacatcttcaaacaaagaaataaactcaagaggacccaggacatttctatgtgggtcccccccacccctcgactcataaccaaattgaacctggccttaaaagcatttgaatgtctatgaaagtttaaatatcatacgcagtattttcaaattccataaattttcctcttttaacagaagttgatgggactagtaaggagacatttcctcaacaccattttgtctggaattttaaaacaaggtatctcaaagctgaaatatactgcctgcggcgcagtgggaaattgtgagtgggtaacctaagcaaagcgcaccgcattgaaattcagtctgggtgggctgcagtccctagagagagggaagctgcatttgaaagctgtgcctggtcagaccctatggaatcgctacggttttcggtcattagatgcctccaaattagaaggaaaaacaagccctcacgaggttccttaggcatcagcagcgatgcttgacaaatatttaaaatacatttcaaatataaccgcaagtaacctgatgccttaatattactaagggttttcctgagaaggtttggtgacttgagcgtcaaacctgcggtcagcaaaaggactaacttttcaaagccgggataattcctctcttgcagaaattaagttcagactcgatctcatcatatttatagtataaaaagaaagctcccggctcaaatataaggaaaactctttacacacgactttataaaggctgacttccgtgggtatatgtaggtctacataaatttaaatatggttgggagctagaactcctctcctggtgacagcggggctgctcagaagtgtcccatgtcggcctggtcctgcacctgctggcacagtgcagagcaacagacgcttgacagaagtgaactctctcactgtcctcagaaaagagaggcggacctgagcgacaccagggtctaccaaccttaccgcttttctttactgtgtttttttttttttaaattcaccagttaccccaagttttcctattgaaattcaatttgaaaacactcacgtggatttgtgcgtcgcgctttggggccaagactgatcctcgggtgcgaagagcaacctcggagccggggctccctctgccctgccaggcttgcccgcctcgccgcggccgagcgtcccgcccaggctgggatgcgccgcgcggggacccagggggcttgccgcagtcaccgccccgggcgcgggccgcgcagtcacttgttagagtgtcctgctaacttggccgcggagctcttcccagctttctttcacaatgacttcctgaagttgctcactcgcattgttccccatttctccgccacactccccgcccccagccggctcagaccaggctttcgcgctcccggccgaccggctgccccgcgcgcacagcgccgcccgcgggccccgtacctggccccctccgcgccggccgcccccgccgcgcccttgcgttgccaccagctgccgcccagagcggcgggtggccagagcgcgcgccctgccaccccgcaaactttggggtgacgcacgctggcggtccctgctcgacctgccccgcagccggctcggccccgcgcgcacctctcggccgcctcccggatcgctgctccggtacagggagcggggcgcgcagaagggcgcagagcgggacacggagagggtgcgtcgtcccgtccccgccccgtcgccgagtcccccggctcgcgcggcgcgcgtctcagccgcaactccgggccagaggggccgcgcacgaaaactttgcaatcgcgccgggctccggctcagcccccaaaggccgccggggcggcggcgggtgcgggccgtacctgctggcgccgccgccggctgcagcccgctcgcccgcgccgggcccgctcggcgcgccgccgccacccccgcgcgcaccgcgcccgggccctcccctcgccgccgcgcttcctcattccagcgcagcatcgcgccgcggccccgcacgggatgcggcggccggcgctgtgtccgcgggccgggcagcccggctcggccgcggcgctgcgggacccgcgcgtaacccgtgggggcgcggcgcgggcgacacgtgcgggccgccaggagggggagggggacgcgcgccgccgggcccgccaccctgcacccggggccgctggtcggtcggggcaccctcacgctcgccccgctggcgagactggagggactcgggacatcgtaaagcactttccccagtgtctgggagcgcccgctgtacgctcagcttcacgtccctggaactggggccccttggctcccgggttcaggctccggccccaggatgcgagtgcccacccgagggggtgggaaaagttgatcctccgcaagggaggggaaggtgcaattcattttcccagacaaccaatggaatacctctcgtctctcttccctcccacctgctcacggcagaagttaggatggcgccttccatgttggcctgggtgcacacacaagtgcgtgcggaagggtggctgcaggcggaggtgacagcgaagcaatcccgcagcccgctcgacggctctttgcgtctcagacctctccctggcgtgtaagacaccgtgtgtctccgtaaaacgggaatgccacatctgacagcgcaccccttcgccctacggggagcccctcactctaattagccgggctccacccgagcaggagccagcaatgtgttcagcttgagcaggagagaaaaagtcatgaattccacaaatgcagcctgggctcccgccaggcgctaggggaggggacccagaggagtgagatgcgcctcctgcccttccagacttgtaggagccaccaggaaggcacagaataaaaatcccgggcacccctgtgaggaggagcgccctgtgaagagggccgagaacgtgctcctgcttgggcgcggtggttcgggaaggcgtgaagacccatagggagagcgatgaaagaccaagggagcctcctcagggtaggacatgcaggcgaagaaggcacaggccttccgggtggaggacacagccgggcaagggaataagcaggaaatgtcccttcagggcagttgagtgtggctggagaccatcgctgccggggaaggtcttggcctggcccaggaggcctccaagtcgggggccagggcacaccagagacaggatctgcctctgctgcctctgggagaaggccctttacccgtgaatcacaaacagcgtctatccacattctccctgagcgcatatgcagctcttactacagtactcagtgtgtcc

SEQ ID NO: 586576 - DNA, 4001 bp, Homo sapiens
tttaaaagaacgagatcatactttgcataccatccagaaccatgctattctcactttcacatgtatttggacttcttttcatactagttcattcatatcctccttatttttaagagctgtatgtggaagtacatggatgtaccatagttttaaaatactgataacaatgctgcagtgaacaaatgcttaaatgctctgtgcacttgtgagaatatacctctaaggtaagttcttcaatgcaaaattgatatttgtatttataccatttttgtttatatagataatcacaaacttttggacacattttcacttttaccaactgtaccatgaagtgcctgaataccacattctaaaagttaaaaagccacatgttctcactcacatgtggaaactaacaaatgctgctgtcatcattataagtagaaagtaggacagaggctaatagaggctggaaaggtcgggggagtggaagatagggagagatttgttaaaggagacaaaattacagctaggtaggaagaataagttctagtgttctacaccattgcaggatgactgtagtcaacaataatatatagtttcaaatagctagaaggaagatgtcgaatgttcctaatacaaagaaacgataaatgtttgagatgatgaatatgctgatttacctgatccgattactatacattgtatatatcacaacatcactatgtacccaattattttgtgtctatgtacacaattattttgtgacgattaaaaaaattaaaaattaagtgaaaatattcaatgatatacaaaaagagaattatataattctcattcatgagaattatatttaagatataaatgtgagaattacacaaagaatgtggcaattatattgtaataaatacgaagcctcactctaaaagaaaaataagctagccttttgtttgttctttgcacctgggagagtttaagtccaaaatctgaaacatgaatagagcggctgaggagtggtggagaaggaagcctgtgattggcagatctatctccagttccatggaactcagaagatcctctcctgcaccttccccagggaaaccaccaagcaggggagcagccacacataggtcctggtcttcatcaggagcaccaacttgtagaatcccatagaaacttcaaaacacgagggcgctcagccaaggcaaggtgccactgagaactttctcaaatataagtcagcctctggggctggctgtgagtctgtgaggctcaaaaatatgaaataccgaaaaccccaaagtccatgaaagctgctactggggctgacgcctctggatacagggccagatagaaagctgtcttcctatgtccatgcactggggaactgtgcggttttgttggactggctcgccgtccaccctcagtgctgccaaatggtcacagtctgtgacctacccttaggcttttcctactacagacttctccacttcctgggtctcctggatgagaagagctatatccaatacggcttgaaaagatatatggcaaaggggagcaatgttgtgtccatgcttaatgaacaaacagtcatgactgtgcccaacaattatgtttttcaagcttctctctctctctctctttaagtaccatcattggcatgtgtttgggttttaaaccaatcagccatttttccttccaacagtacaaaaatgtatttaactcttcccgtttttttttcctgaagtttaacagtaaaactaatttcatcttggaggctttctgttcagctcaaagtgagataatttgtaacaggtgaaggaaacactcaggcaaattccatcatggtcttttcttttgcagaatagcccctattcctcccccatgagcataccaagcactgtgacttccggccccagggaagcttttctcatgaacttcccacacagctatctcataaggtctcacctgaaacttgggacatgtcttgaccctcatcagcatccatggtcctcaggttatctgagaaagagaggaagggattttagtttaaagcaaaaatactaataagatatgagaaagagagagagataaagaacccctatgctatttaacaacaaggttatctagcaagaataatgcattttcctcctcacatacttgctggagtatcagactggcacagaccttgatccttttaaaaacagcattacaaagatttataaaaatatcattacaagcacaggaggaccaaatttgttatttattgttaatttcctactgcataataacccaaaatgcaaactgactgcaacaaaattaagcagaaaattaaatggccctgggtcattgtaggcacagaattcattctcttggctgatccatagttatgttctttctaatttactgagcatgcatcgatgaaccttgagtcagcttggtgacacgcgtacaatcagcaatcaaaaaacgaagcaatttgctgaagaatgtctcatttacccaggcagggctgcatatctgagcagcaactgcactacctccatcaataatgaatacacctccagcctggcagatgggcaatgcgggcgctcctgtctttgtccctcaatctttctgggcccttgcctcagccttcaccagcactcttacacggggagaagtgacgctcactacggcagcaaaacgagcccaggagacagcccgagccttcctgttttgctgacagatggctggcttctcagatcggtttaaattaaaaaaaaaaaagaaaagaaagaaacaactgggaagatgctgcccttcgatgaccatagtgaatgttccacagagtgtactacgagccacaaacaccagggagagaaccccagcatcagtggagtagaaacaaaaaggtgttctgtgttttcgcacttgggtcctggcctgccgctcggcagtctcaggtgccccaaagtggatgacagctggcagctccacagataagaaagctatggccagcagaaggtgacctcaaggaaatctgctcatttatgctctggtatatgactttcaggagagctccttcactaaccagaaaatgcagtctatttgttgactctaaaccaggttgtccccctgtccccctttttatttttggccacctctgtctctggttcagatgtgtggatctgagctgtggcctgctttcagcagagacctgaaaaactgatggatgattcagggatcttaccctctcaattaggctgaaaactgtgagggtagaagtgttatatataatatatctatcactccatatatctttaataccttttatggtacatatggaatatgtattttcaatttcaggaatatcagtattagtcatgatgaggatatacatgatagtcactttttctggatgggaggggcttttatctatttctaaaagtgacatgaattttcaaggtaggtgtgtggcttaggagtacagctagtggccactgtacagaaaaagtatttcagaaaacagagtaagcatccaccagcacacggaagccagacacactagcccagatgcaagcatgtgaccagcacaagcatttccaaaaagcaatacgtcaagagtctcaggtacctttactgtaaaaaaggggaaaagccacgattcttctgaaactgtcaaaacaatgataaagaagcaagatagactcaaatgagaaaaatctttgtaacagccgtgccacactaatataggaagttagaagttagttctctagttttctgaagatgtgtatagtattttagcgcggcctatcacacaccgggtcttaaatacctctgtattgattggtgaagcatacagaagttaaatcttgtcacagcaactataacaacacgaaatttttagaatgctgacttaaaactttttgctacataaatgatacaatcttttacaactttttttaaaggcaagaaaatgctcataatttctaccacttaggactactattttttctgtatatttatttctgtacttttta

SEQ ID NO: 586577 - DNA, 4001 bp, Homo sapiens
cctgtaacccgaatctggaagcattcttaagacactcatgccaaaaccattcatcacatcgtaaggtccatgcgaaacgtgggtatcaggccccaccaggatagtttagaccccattttgtagtcctttatttgtggcctatgatctcttcatgcaaacccagggggagggggctcatcagtaaaacctcagagagcttacaacttcctcatttgtgggggtacaaaaaatgggcatgtctttatttataacctgacagaaaatgctcctgtccataagagagcgaaatgtgggaaaattcattttaaacacagcaatcagatttttctgcagctcttaagtaagttgaaattatttatttttaatgtttcactttacatgctcctttttagcaaatttcatttctttaacaaaacattgtctgctcttaaagtgaaaattctgtaaattcaagcaaacatacacaacctcatactaaagcgggaaaacactcatactgcaaaagtactcacaacttcctaccaacttttaaaatgataattaattgccttatgtttaacaacctgagataattagcagtatggttttaatttaatgaaatagaatatacgatttatcaatatgtttttgcagtgaatctctttgaatatcagcttaattttctgccctacgcaaaactcagcacaaaggaggaggaaaaggtcactttttccggttaaaagtggggctcacactagggggttgctggctctctctagtttccattaaaagcactggaacacacttcagagtgcctcagaagtaagcttacaaaaggtcaattcctcattctcatttctcctaaagactctaaattaaacatttttcccattaggtctagggaagtatcttatgtggaattttatttgctctaggtttgccagtgaaaatctggtataacaacaaaaatttgtcaaaaactgataaatcaatattcatagtggaactcctagcttcagaacaggactctaatctaaaccacattgttcattttcaaatagtttcaaactaacagaaaatgctttaaaggtatagattttagtgtgtgatctcaaaaatggagcataaaaatctacttcaatatgtgtaaggccattcaaaaacactttacacagttcttagtgttttggcagtctgtgcaaaccccccaccaattatagaaagaaagaggggaaggaagggaagggaaggacaggaaaggcaaggcaaatggagggaagggaatgacagagaagacaagggaggaaaaaacgaagaaaggaagaccagacagacaagaccacattggatcccctctttttactgcattgctctctcaacaaacctaacctcctacccattagagttaacttttggtgtgcaatggcgggaagagagtcagatttactttagcagtgagctgattgcagaagaaaaatgaatcactgcacactcgagtgagaaaatatgaagaaagcacttttccactaattaggacccattttcagccatttgttaagccgtggccccgcgccacgagctatcaggaggtggagcatggggccatccgaaagcagagcgttcagacggagcataatgatgctctccatcacccgagacaggtggcctgcacagggatatggggagctgctctgggctcaggccacccactgtggaaacaccagcagggaagacggaagaacacaatggctattccaatccatgcaagcacacaaagaaaccgtgtggcactcaccaaccaaccgaggcctcgccaaggccaagtgagagctgccttttccacacaaatccagactttgaggacctagggctgctcggagttcccctcagacccagccacctgggagggatcttggtgcctggctacagggcctctgtgtcctcttcctcctccaaaaggttcctctgctgccttcacactccaccagggtgcagagaaaggtggaaccacttgccaaatatgcaaaaaaggagggaagaccgttttctcttaggaaaacacagacaggaagggagcctgtgcttcctgtcctaaccaaaacgagttcagaaattatgtggacgtctgatttgtcaggcttgtggtggaaaagggtgctcttttagtcaacaggaattgtgagttccccaaaggcagaaatggccatgggagaaaagaattaaggccaggcctgttaacaggcaagacaaatggcccccacacctgtgacctagggtttgcaccatttttaacagtttattaccaggtggttggctgaaggctccactggcaactacctatttattatagtcaaacatgagagggaaaaacgtcaactgaaacaatttggcagttgcctgtagattaggcctcagttgctcttcctccaggcccttctcaggagtaaccaccaaggagacaccaaaatgggcaggcccgcacttcgccacttaaaaaccttctgcaaaccttcttttgcttgctgttttatctcacttgtaatatatggcacttcataaggtttcataatgtcttaaaaaatatttgttggaatattaccaaacatttaaaaactcaaactaaagctactaaagtgacgacactgaaactttaaggacataaacatatattccaggagatgtggaaaggtaacctgagatatgaagtcatttattaaactgcaaagaaatacaagaaagccatggtccacatgaagacaccagcatgagtgttcagtcagcactacagtaaaaacagctttgttactgtcgatatcctttggttttaggtgctctgcgtccctaacaaaacctcattcctatcttgttcctcatctgaattttaagtgtgtgtgtgtgtgacagtgtgtataatgctgatcctctgaaactctacgtttctaagacctagatcaaaaatgtacatgtgccctttttgagcaaaataaaactgatctgttttcaagacgtgaaatagattaatgtttctcttcttgtaagcttcaaaggatgggtcacttgttgcttttacatcttgtgttttctcccataaaatggaatgattattcagcacaaatatgaaatggaatagagctgaagtctctgtagttatgaacatagagacaccagagagagaacaatgttcacagccaggacaggagctgcagcaactctgccgctagaagcaggcgtcacagtgcccccagagtgcttgtcagtcttagaaacagaggcatcggaagacaagcgttttcagagaacgcaaaaaggtcgtggtttaccttctgtaagctggagtggagccacttacatcaatctcccttagaatatgacaagaaccaacatttatttcatagtgaaattatttcacaagtccaaagattagaggaggaaaaaaaaaatgccacaaaacagtgatatccttgatgaattcttcgttaaccacagttacattacattaatacgtacaattatgcaacactcaaaaaacgttatttatgcctaaaattcaccattatataacatagggaaatccatcttgttttagtaaaagtttaaaaataaagggggcctttaatactcatttcaggtctgtttgatgttaaaactcttccacactgccccatgcctctcactccacgctgtgtgcatgctgtgtgtgtgcacgctctgtgtgcatatgtgcatatgcacatggaatttatttcatgtatctgttaataaatgcataatcttgaagtgtgtgtataagtacattaatatatagagagttctttcctatttcaaaatttttgacatttatattgaaaatatgctatattaaccacgcatgaaacacacacatccaaatcaagaacaaaaaatgtatccaaaccaaagaaccactgttctcaaactccaagtctctagtcaaacaaggaagacagtggcctgcagtacaacagggctttagacctcttggctaatacattcactgcgatctt

SEQ ID NO: 586578 - DNA, 4001 bp, Homo sapiens
ctgatttgtcacggaaataattctgacacattctaatataaataatactgaaattgttactttttaaaattccatataaaagatgagtacaataaaactcattgaacaaacatcttcaaacaaagaaataaactcaagaggacccaggacatttctatgtgggtcccccccacccctcgactcataaccaaattgaacctggccttaaaagcatttgaatgtctatgaaagtttaaatatcatacgcagtattttcaaattccataaattttcctcttttaacagaagttgatgggactagtaaggagacatttcctcaacaccattttgtctggaattttaaaacaaggtatctcaaagctgaaatatactgcctgcggcgcagtgggaaattgtgagtgggtaacctaagcaaagcgcaccgcattgaaattcagtctgggtgggctgcagtccctagagagagggaagctgcatttgaaagctgtgcctggtcagaccctatggaatcgctacggttttcggtcattagatgcctccaaattagaaggaaaaacaagccctcacgaggttccttaggcatcagcagcgatgcttgacaaatatttaaaatacatttcaaatataaccgcaagtaacctgatgccttaatattactaagggttttcctgagaaggtttggtgacttgagcgtcaaacctgcggtcagcaaaaggactaacttttcaaagccgggataattcctctcttgcagaaattaagttcagactcgatctcatcatatttatagtataaaaagaaagctcccggctcaaatataaggaaaactctttacacacgactttataaaggctgacttccgtgggtatatgtaggtctacataaatttaaatatggttgggagctagaactcctctcctggtgacagcggggctgctcagaagtgtcccatgtcggcctggtcctgcacctgctggcacagtgcagagcaacagacgcttgacagaagtgaactctctcactgtcctcagaaaagagaggcggacctgagcgacaccagggtctaccaaccttaccgcttttctttactgtgtttttttttttttaaattcaccagttaccccaagttttcctattgaaattcaatttgaaaacactcacgtggatttgtgcgtcgcgctttggggccaagactgatcctcgggtgcgaagagcaacctcggagccggggctccctctgccctgccaggcttgcccgcctcgccgcggccgagcgtcccgcccaggctgggatgcgccgcgcggggacccagggggcttgccgcagtcaccgccccgggcgcgggccgcgcagtcacttgttagagtgtcctgctaacttggccgcggagctcttcccagctttctttcacaatgacttcctgaagttgctcactcgcattgttccccatttctccgccacactccccgcccccagccggctcagaccaggctttcgcgctcccggccgaccggctgccccgcgcgcacagcgccgcccgcgggccccgtacctggccccctccgcgccggccgcccccgccgcgcccttgcgttgccaccagctgccgcccagagcggcgggtggccagagcgcgcgccctgccaccccgcaaactttggggtgacgcacgctggcggtccctgctcgacctgccccgcagccggctcggccccgcgcgcacctctcggccgcctcccggatcgctgctccggtacagggagcggggcgcgcagaagggcgcagagcgggacacggagagggtgcgtcgtcccgtccccgccccgtcgccgagtcccccggctcgcgcggcgcgcgtctcagccgcaactccgggccagaggggccgcgcacgaaaactttgcaatcgcgccgggctccggctcagcccccaaaggccgccggggcggcggcgggtgcgggccgtacctgctggcgccgccgccggctgcagcccgctcgcccgcgccgggcccgctcggcgcgccgccgccacccccgcgcgcaccgcgcccgggccctcccctcgccgccgcgcttcctcattccagcgcagcatcgcgccgcggccccgcacgggatgcggcggccggcgctgtgtccgcgggccgggcagcccggctcggccgcggcgctgcgggacccgcgcgtaacccgtgggggcgcggcgcgggcgacacgtgcgggccgccaggagggggagggggacgcgcgccgccgggcccgccaccctgcacccggggccgctggtcggtcggggcaccctcacgctcgccccgctggcgagactggagggactcgggacatcgtaaagcactttccccagtgtctgggagcgcccgctgtacgctcagcttcacgtccctggaactggggccccttggctcccgggttcaggctccggccccaggatgcgagtgcccacccgagggggtgggaaaagttgatcctccgcaagggaggggaaggtgcaattcattttcccagacaaccaatggaatacctctcgtctctcttccctcccacctgctcacggcagaagttaggatggcgccttccatgttggcctgggtgcacacacaagtgcgtgcggaagggtggctgcaggcggaggtgacagcgaagcaatcccgcagcccgctcgacggctctttgcgtctcagacctctccctggcgtgtaagacaccgtgtgtctccgtaaaacgggaatgccacatctgacagcgcaccccttcgccctacggggagcccctcactctaattagccgggctccacccgagcaggagccagcaatgtgttcagcttgagcaggagagaaaaagtcatgaattccacaaatgcagcctgggctcccgccaggcgctaggggaggggacccagaggagtgagatgcgcctcctgcccttccagacttgtaggagccaccaggaaggcacagaataaaaatcccgggcacccctgtgaggaggagcgccctgtgaagagggccgagaacgtgctcctgcttgggcgcggtggttcgggaaggcgtgaagacccatagggagagcgatgaaagaccaagggagcctcctcagggtaggacatgcaggcgaagaaggcacaggccttccgggtggaggacacagccgggcaagggaataagcaggaaatgtcccttcagggcagttgagtgtggctggagaccatcgctgccggggaaggtcttggcctggcccaggaggcctccaagtcgggggccagggcacaccagagacaggatctgcctctgctgcctctgggagaaggccctttacccgtgaatcacaaacagcgtctatccacattctccctgagcgcatatgcagctcttactacagtactcagtgtgtcctgaagggcattccgctgggcaagtctgagccagttaactcactgctacagcccagagaaggggaaggtagtgaaaggtccattgatttaccttctagtcctctcctccactgcgtgaccttgggcaggttatccaaactcctgagcatcatcttccttgtctataaaaagaatacatgccaccaatcctaaagactccttacctggattaaatgaggcaataaacataaggtacaaggcccagagggaggccaacaatgttgtaaaggggacacgggacacctctagttcttggatgcagaagtacctttagccgctggtacgtctctctaaacctgtgccttggtcttcaggagtggaccagtggaccgaaacataggcatctcaccaaggtgtagcccactgaggcaggagcatgtggggctaagagcccagatagtttgggcttatgaatctgactgaggtccttaatctctcaaagcctgaatttccccatctgtaaattggtggtgataatataaccctcctggtggggttgtttgtgggttaaggagatcacatatggaagaccttgccacatgcctgac

SEQ ID NO: 586579 - DNA, 4001 bp, Homo sapiens
cagggagggagggcagacctggaccctgccaggggcagccagagagggaaaaggccctgagagtacctttcccaggatgaactaattaaacctgtgggagttttaaacatttgacagttgttaaaatctcaccacagtggcaccatctctggccatacctgtccaagaataaactgcctttaaaaaagcttgaagttggcctcctcatgaaatttacataacattctttacatttacccactttttgttgctgcctggatctatatgtatacaggcactgcatgcaagagggagaagttttgcctaaggaatagtgaaaagtgagtgcgacaagttggtacctcattgaatccagattggaagcatccatctttttcagccatctttggaaggttcaggttgttttctgccagtgcctctttgctgctttcacacatgttactcttgttacatgtctgggaaagaataccagaattgttatcacctaagtgtccctaaaacaaacaccactagagggccttttcattgttcaaccacagccaggaaagtctctaagaaaaatgaagctacaactcattggcatcctggcaagcaaattccagtggagtgggggcacacttgggttcagttccaagctcacctgtgactttaggtgtgttacttaatcctgagtctcagtttccttatctccaaaaaccttccttgcaaatttgttttgaagattagacacaatatttatttaaagtgcctggcacacagtagatacttaataacagcaattttgacaataattaggagaatataattcaagccatagaatgttccagcaggaaggatctatgagatcacctagtccacgcccaattttactgatggagtccagaggtggtagggaatttacccaagatcacaaggctggtttggcagaaccagaattcgagtgtgggctcccaatctcccctcctgtgttcttttctttctaccaaacaggaccaaaataccttgcattgaaagtggggagatgctttaacctatttatgatttgccactttggtgggctctgaggtatgaatcttagctggaatggctttgaggaatcctagccattgagtttacataaccaaaaagtactgcaactgctctgagaagctgaacatgcctttcaggtggcacttttctagtccttccaaagcccgggggacaaaaaggagcttcacagacctaattttttggaaagggaaaaggaagccctgagaagcaataaccctcagctcatgccaaaggtgggcatggatttcagacccattctgcattttccagaaaggaaaggaacttcctgacaccagcaaaggataaatacagaagtcagtctagtcggccccgttggcctcaaatctacagtgctctagaacccagcaaagacctcctaatgcaggcagcccccggccacacgcaggggcaaggggaacgcatgcgcaccgggcccttcaaccccatcgccaagcctacccacctcctttctcagggctgagatgccgtcgaggatgtaccgaatttgtttgtcaattcgttctgaagaggtgagtggctgtctgtgtggggcggctacatctttggaatcttctcctgggggtactggggcagggaaggcagcaggcaacaccaggagcagccccagggagaaggcaactggaccgaaggcgcctgtgccggaggggagcgagcgcaggggtgagctgacagcacagctgggagcctgcctctgctgctggccgcccgccagccctccctgggccacacacccctccctcacacagggctcgaccgccgctggcagttccagggctaaggatttcctgcacttacttgtggagaaggagttcatagctgggctcctggaggggagatagagcttctctttcgttcccggtgggctcgagggcagaatgagcctcagacatctccagtcctatatttattgggggttgagactctaatattgagactcatgggaaaatcccacatttgataaatctttgttggagggtgagggtggggccagagcgggtggggctgattggaaaccttattaagattgtgcaatgtgacgtcctttagcatggcaagacacaactagggggaaaagtgcagcttaggtcgtcattgaggctagcgctaagaagcagaaccactcttcctttactttctttttttcttttattagtgactcagcactttggcatgtcttgacaaagagtaaagctgaagtcatgcacgaagttttacaaagagaaaaaaaataagctaaagctatgttttttgaaaaaaaaaaaattttttttcagtgaccagattaacaggctagaatttagcgttccagttaatttgtatttgtaaaaaccaaagatgttctgaactgagtttcctctgactccatcgcagccccccaagcctgggattatgaagaaggtaatactaccagtcatctgagttcttctgtgttctggctctccctgtgagcggctgttgtagaactgcctggccatcctcaaatttcgtgcagttacttcaaggcgtctccaggtggagtgtgtgactcctttttgccaccgcgtggcttctgccactttcttcacctgcttcagcccacttagaggaggttggctgctgccctgccctctcccaagtgaccccttgggaatcctcccagtgaggactttgctctctgtgccagaggtttgccttgtgctgccagtgctctccccattgccactgagtctcttcaccactgtttcactggggcacctgcatgggccccaggtctcctggagccctgaaattactgaagcccacttggttcagggcagaaagggggagaatactactcacctctttgttggggatgtcaaaggaggaccttgtggcatcttgcagagtttgtgtttatcgctccctctccctgtaagtcttgatttgaaatcaaaagaagctagaaggaaactacggacgcaggcacggctctaggctctgaatctgcttccgcgtcggcacccaagaatttcttattgggtcaagctggttcagaagccctcttccctcaggatggtgtctcttgcaggaggatccttggtctcatgcaaatgggctctagactaggttgtccctccagtctccagagacccagacagctctgagatggcttcaggctgaaaccagacccttgcacaacaccaaaacacttatttaccaaacatggtgttaccttcacaatcggtttctttgctttgctaagaagagatctcttcaagatcgataaaacagtgacctctgttgggcatttactcaagttttgtttcgtgcataacatttcaggacccgcctgttggggaaagtgaggtcatccattcttcaccgattgtctaaacagagacggtggtcctctgccgcggtgggattctttggtgtgaaaatgaaaatgggggaggatggctggatggtttcatttttagtgctctcctgtcttaagcaacgtagacactcctgaaccaagttctctttcctgcatgaaacgaagccactgctcccagctccgcagccgtgcactgtgatccgtctatgtaatgtgagcttgcttttactcaactatctattttttagaaaatacaattcaataaatttcaagtacttgaactgagtgacacaatacaacacacagatttatcttttcaataaaaagtgttttttaaataggaagttcgtgttcatgataaaatgttcaaataggacatcagggcatgcagggaaaagtgtctccttcctctcctggccccttttcccagaggtagcacctaattgcctgtattttcaaccaaatcctctgttatcctagcctgggaaaggttttctcgtcttcccagctgtttgatcctggctgttacatcaaggacctgtgcccttgtttattcacctataaaacgggggtaataatagttcttcctttc

SEQ ID NO: 586580 - DNA, 4001 bp, Homo sapiens
tcagccatccttgtaagtttattactgaaagtactagaaaggcggaataataattctgttctcccacaacactgtatagacctgcaaaccactatgatcagtagtacagggaaagtcttgtaaattaacatgtaactattgagaaaatccacaaaactggtgaaaggcctaccccaaaacagccatctccaatacaatctcatcattctcaccatcctacttttatcaaagtgctgataaaagtgcgtagcacatggtaagagagaattagctattgaatcaatgaaggaacccattatcaataaacaatcacttcctgttttccataaattatgtggtcacctatcacttgagcacaaacaaataggcacgttcaggacacaggcagccagtatcagaataggcagcctatcacagagggcaattctacttttcctgtgtaagaatccaagaatgcagttttactacattcctgcttgtagctaatctgaatttcaactaatttaaaacggttatttatatgtgacatataggatgcataatgagctcccaaccttgtgagaggagctgtgtttcatttcaccatacaggggagagggaagcagtgtattaaagaagtgatagaaaagtcccacagaagaaccaatgaaatagaccacactgaaaatcacagtaagcctcagagaacttcagtgtcctttttggcaacttttcaaaagtgaatggaatgcttgccaggaggtaccaagagtgaaagcccagagaaaaaggcccagcctggtcatctctctcccctcaaaacatcttcttctgtaagcttgagagatcccaaagaacttcaacacttgtaatcttgttactaactttatgctttggggtcctaaaggattttttcaggagtacccttttaaaatgtaaacatccctaggggggttactgttcattatcaaacaggacctggattctttagtgctatggtctcagggattagtcaaagctggctaataagataggggccggagacagacaactagagaggaccaatgttccaaggtaaaaacaggtaaaggggaagtgcagttttctgtcgggtcaaggggctaaaagggatccacatgcccaagctgttaaactctatagactgtgtgaggctgaaaacagtccggggcctggagcctgtgactttgaaggtgggtcctccagttcccgatgaaaaggtagaatctgggcccaagttccccacgagcagttctggacatctagcccttctctctctcgctcgctctcaggataaagtcctaggtccttccacccctgaccattccttacttaccctttctcccgctcttcctcggtgagaaggggtaagtggttattttgtgccctcgcccaatttggccaaaaccctaaaagtaaaaaacgacagacagacacgtgctttaaaatcatgttgttcaagcctgacgctctcccaccacctgcccaacacttccaggcagaaggcagcgcgcccccacagcgctccctcacggccagagccgggggccggactaggcccctttgtgaggactgggagagggcgcgttgttggggcgccggctcggcggggaggagcgggccagctccgggccaggtgtgccgcctgtggcgccggtttctcaacctagttagccagtggcaccaagaagaggactaggctggggtggccgccgcacgcgcctcagataaacacgcgcacgcacacatgctcgcgatcacgcaggactcgcggccgcgcacccctccgcctcccggcaacgcccgccccgccggggccggggccgactcccagggaagggtccccagcccaagagaccaccaagggtcggcggctacgcgcccgccgacccctgccagcctcacagccccccacccgccgccggacgccgggcgcccgccctccgcacccgctgcgcagctcagcccgggggaagtccccgcgcagaccccgccctccgccggcggcaagctccgccccgctgccccgtcgcgcgctggccgcccgaagctccgcccccggcggaaaactggtctctggaccgcccgcccaggtcgggctcaaaatgcggcgtggatctgaaaggatcaaacacaacactaattcagcaagctattattgagcacttgccctaagctcagcaacgtactaatgggggagactacaataaagagccgaaaagtctatgaaactgtgtcttcagctcttcctcttgttttagaagccaggaaacagagaaccctcacagttacttaagtacagggcagtagtggcaaagcacctcactagcgatctctgggcaactcttcatttcattttttcctactcatgagcactcaggaaaactattcagttttgctgcctccaggtaaaacaaagtgagtaacacaggacaggcggtttacttgagagaaacgggaatttcatactgaagcttttgccctcaaatggtacaaactctttttttttttttcctgagacggagtctcgctctgtcgccagagcgacactgcaatctccgcctcccgggttcacgccattctcctgcctcagcctccctagtagccgggactacaggcccccgccaccatgcccggctaatcttcttgtatttttagtagagatgggatttcaccgtgttagcaaagatggtctccatctcctgacctcgtgatccgctcacctaggcctcccaaagtgctaggattacaggcgtgagccactgcgcccggccgaatggtacaaactcttaactgggttattacaacctacaaagaaaccttcttatccatgttattaattatcctaattcaatgtggtttaaaatgttgatgaaagtacccaaatcatggtgctccaacaagctggatgccaaccaggtactcgtaagtacttgcaattacaggtgcgatattttcattccatatcatcccaagatgcccttccttcacgtgaagcagccagaaagatcaactaccagattccgcatgattgaggaattgataaatagaaagggaagaccgaaaccggccaaattttcccttcgaagtgaaacttgagaaacttgcgtgcattttacctgagttcctttctcagcagataaactgtcagacctcccagatagtgtcaaggaaatgcaactttccagaacactacatctggacaatgaggtgcatctgctgcctgttcacaaactcctcttccttacccctccataattccctgctatagaaagccctaactttagtctccctaagacatgtttgagactggtctccctgccagcatcacctgcattaaagcctgtcttccctggcaatactcgttgtctcagggactggttttctttgctaggagcaacccaacctaggctgaagcccaggcatttagcagcagtggcacctagaaatactgaacagacataaaatactttttttctccttttcttactcctccagttgtatcttcattatttctgtctctattctccctctagatactgccaaactactctgtgcactttcagatcacttaatactaatgtaaataacagacattctggcactcttggttcaaaatttattctaaaggtttaagaatctactcagggtcttaaatagcctgataactaaaattccaagagtttcctaaagagagcaaaattgctctcctgtgaaggggatatgtcccagtttttcttacttgtcactgaaataattactgcaaagtaagctcttttcggccagtgcttaaggacttaatttcaagagcacttaggtgacaggaccaccctcatcaaatagcagtcaagaactatttggtaccatgaccccaaattgaatggagctcctggtcactaggaactgacagtctgggatggaatgtaggtgaataaacaacaaagacaggtgtttatggcctttattgtattgggaagtcaataaacatacaaaaagagttgcta

SEQ ID NO: 586581 - DNA, 4001 bp, Homo sapiens
cttagatcttttaaatgaggctaaatgcacagaaacccatgcaagttaaaaatggtctactttcgaatttatttttctaagtacatcatcctttacactctccatgattcctaatattaggtccttcttatggaacaactacaaaagttatcctcatctaattattatactcgtacactggaaaatgactataacattattcattataggaaacaaatcatcaaggtcagccatccttgtaagtttattactgaaagtactagaaaggcggaataataattctgttctcccacaacactgtatagacctgcaaaccactatgatcagtagtacagggaaagtcttgtaaattaacatgtaactattgagaaaatccacaaaactggtgaaaggcctaccccaaaacagccatctccaatacaatctcatcattctcaccatcctacttttatcaaagtgctgataaaagtgcgtagcacatggtaagagagaattagctattgaatcaatgaaggaacccattatcaataaacaatcacttcctgttttccataaattatgtggtcacctatcacttgagcacaaacaaataggcacgttcaggacacaggcagccagtatcagaataggcagcctatcacagagggcaattctacttttcctgtgtaagaatccaagaatgcagttttactacattcctgcttgtagctaatctgaatttcaactaatttaaaacggttatttatatgtgacatataggatgcataatgagctcccaaccttgtgagaggagctgtgtttcatttcaccatacaggggagagggaagcagtgtattaaagaagtgatagaaaagtcccacagaagaaccaatgaaatagaccacactgaaaatcacagtaagcctcagagaacttcagtgtcctttttggcaacttttcaaaagtgaatggaatgcttgccaggaggtaccaagagtgaaagcccagagaaaaaggcccagcctggtcatctctctcccctcaaaacatcttcttctgtaagcttgagagatcccaaagaacttcaacacttgtaatcttgttactaactttatgctttggggtcctaaaggattttttcaggagtacccttttaaaatgtaaacatccctaggggggttactgttcattatcaaacaggacctggattctttagtgctatggtctcagggattagtcaaagctggctaataagataggggccggagacagacaactagagaggaccaatgttccaaggtaaaaacaggtaaaggggaagtgcagttttctgtcgggtcaaggggctaaaagggatccacatgcccaagctgttaaactctatagactgtgtgaggctgaaaacagtccggggcctggagcctgtgactttgaaggtgggtcctccagttcccgatgaaaaggtagaatctgggcccaagttccccacgagcagttctggacatctagcccttctctctctcgctcgctctcaggataaagtcctaggtccttccacccctgaccattccttacttaccctttctcccgctcttcctcggtgagaaggggtaagtggttattttgtgccctcgcccaatttggccaaaaccctaaaagtaaaaaacgacagacagacacgtgctttaaaatcatgttgttcaagcctgacgctctcccaccacctgcccaacacttccaggcagaaggcagcgcgcccccacagcgctccctcacggccagagccgggggccggactaggcccctttgtgaggactgggagagggcgcgttgttggggcgccggctcggcggggaggagcgggccagctccgggccaggtgtgccgcctgtggcgccggtttctcaacctagttagccagtggcaccaagaagaggactaggctggggtggccgccgcacgcgcctcagataaacacgcgcacgcacacatgctcgcgatcacgcaggactcgcggccgcgcacccctccgcctcccggcaacgcccgccccgccggggccggggccgactcccagggaagggtccccagcccaagagaccaccaagggtcggcggctacgcgcccgccgacccctgccagcctcacagccccccacccgccgccggacgccgggcgcccgccctccgcacccgctgcgcagctcagcccgggggaagtccccgcgcagaccccgccctccgccggcggcaagctccgccccgctgccccgtcgcgcgctggccgcccgaagctccgcccccggcggaaaactggtctctggaccgcccgcccaggtcgggctcaaaatgcggcgtggatctgaaaggatcaaacacaacactaattcagcaagctattattgagcacttgccctaagctcagcaacgtactaatgggggagactacaataaagagccgaaaagtctatgaaactgtgtcttcagctcttcctcttgttttagaagccaggaaacagagaaccctcacagttacttaagtacagggcagtagtggcaaagcacctcactagcgatctctgggcaactcttcatttcattttttcctactcatgagcactcaggaaaactattcagttttgctgcctccaggtaaaacaaagtgagtaacacaggacaggcggtttacttgagagaaacgggaatttcatactgaagcttttgccctcaaatggtacaaactctttttttttttttcctgagacggagtctcgctctgtcgccagagcgacactgcaatctccgcctcccgggttcacgccattctcctgcctcagcctccctagtagccgggactacaggcccccgccaccatgcccggctaatcttcttgtatttttagtagagatgggatttcaccgtgttagcaaagatggtctccatctcctgacctcgtgatccgctcacctaggcctcccaaagtgctaggattacaggcgtgagccactgcgcccggccgaatggtacaaactcttaactgggttattacaacctacaaagaaaccttcttatccatgttattaattatcctaattcaatgtggtttaaaatgttgatgaaagtacccaaatcatggtgctccaacaagctggatgccaaccaggtactcgtaagtacttgcaattacaggtgcgatattttcattccatatcatcccaagatgcccttccttcacgtgaagcagccagaaagatcaactaccagattccgcatgattgaggaattgataaatagaaagggaagaccgaaaccggccaaattttcccttcgaagtgaaacttgagaaacttgcgtgcattttacctgagttcctttctcagcagataaactgtcagacctcccagatagtgtcaaggaaatgcaactttccagaacactacatctggacaatgaggtgcatctgctgcctgttcacaaactcctcttccttacccctccataattccctgctatagaaagccctaactttagtctccctaagacatgtttgagactggtctccctgccagcatcacctgcattaaagcctgtcttccctggcaatactcgttgtctcagggactggttttctttgctaggagcaacccaacctaggctgaagcccaggcatttagcagcagtggcacctagaaatactgaacagacataaaatactttttttctccttttcttactcctccagttgtatcttcattatttctgtctctattctccctctagatactgccaaactactctgtgcactttcagatcacttaatactaatgtaaataacagacattctggcactcttggttcaaaatttattctaaaggtttaagaatctactcagggtcttaaatagcctgataactaaaattccaagagtttcctaaagagagcaaaattgctctcctgtgaaggggatatgtcccagtttttcttacttgtcactgaaataattactgcaaagtaagctcttt

SEQ ID NO: 586582 - DNA, 4001 bp, Homo sapiens
gccctgggttaggctgtgcttttccagagactccgctaatccaccctcaacccccactctcatacaccctcttcctgatcttccccagctgcttcctccatggggaggagacaccgaggcaaccagtcggcctccgaagccgaggaagggctgttgttccctgagacccccacctagcagctgtggggataggaaggcaggtccaagccccttcctcagggtagcagggcaacagtgcccagctgggtactgaggtccaggcagggaaccccgagggctctatcaggcctggggctatttgaaggaacaagatttcaaaacactcttgaggggaagatgggggaagggcagaaaaggtagtaacattagcactgttgagctgggtcgggggcatagcctgtccaagttcaagccagagagcaataacactggattcaaacccaggactgctcacagaatcctgtcctcttcccacagctccaggttggcgaaggcaggtggaggtctggccagcaggttttgaatctcactacaccacctggctggggctcaggtttacacaggctccctgagcccaagtggggggtgcgggtcggttgggggtgggggtagggatggccccttgatgcagaagtgcaatctggagaaaggatgcactcacatggctccggcctgagctctgaaacattatgtttgcaacccctactctaaccaagcactgcctctgtcaagccccaaccggctcattcagcccctgtggcccctccctatcgccctgcggcctgaaccccaggagctggatttctaggacaggagaaaggctgggagttgcctaagcctgagtcaattctagagaggcagcctgccaggacaggggggcctaactcagcagccccactgccgaggagccccttaagccgttaaaagttcttacataagcggccaacccctgggcagagctgccgggctaattcccccagaccacccccatctaacccagctgccaggtcacctccccaagctgctgaacaccagcagatgggcagagaaagaagtccaaatcctctggaccggaaggacagtgggattgcatttcaagctgcgatacaatccagagattagctgctgtctccttttcagccagtccccctggggcccagctcactaccctactcttcctccagtgtccctcattcccctacagaccccagcatgggggcctgcgtcttcggagagaccttgaggtgagctgcactggcagcctctcagatctcagtgcatggtgaggaggggagagtgtcctcacctagccctgcgaaggcgatccatctggacaccaacacctgccagtaagaccactgaagatagttctaggaggaaacagctaaggaggggtaagccaagtcagtcggacaggactccagcaagcactgtttgaaccccaggagttggagccacctgaacggggtgtcgtcgggtgtgtagcgaggtccaatctagggctaagattttagggaaggtttttacgacctgttccctctcctccgctcccccgtgcaacgaagcacctaacccttcgcacagtgcccgtctgcatcccccaaccaaagccgggagcgtggcgtttcgggaagttagaggctgaggcggtaataggggaagggtttgtggggcctgcccctcccccgcagcgtcgccgggttcccggagccgccgcgccctcctcggccgcccgccccggatgcgccccgcgcgctctgccctgggcgtcacctctcgggctcgtagccggcctgcagcagtcgggcgctgtaccgctgcgccgccgtctcgtgtcccgggtgttgccgggctccgggctccggaacagcggcggctccgcctccctgcagcggtggtggagtgagtggcccctccatgcggaggccgcagctcagggcgggcgggagcctggaggctcccggggccccggctgggcagtgagcgcagcccggtcgagtcccgaggaggggcggggccgccggggcggggcctcgtgccgggggcggggcaggggaatccgggagtcgactgggctccgccctgggctccccgctctccccggcgctgctacgcagatgcctagactcggttcgtctctcccatcccagattcagcgagggtacatcgggggatgagggggagaggtgtccctacacgggtgggactggaaagaaccccgtccccttccctgccgtccggaccttccagtgtctcctggccccttccgaggaaaaccagaagaggaaaggagctggactccagaggcagggcttctccttgcgtctcaggtccgctcctctcttgcacgccgacgatgccaggtcccctggagcgcctcatacccgcagaccgcagacctcccgcgctggggcgagagagtcgtgctcagccgactccacgttagagagcggggagagggatctccacagcctgtaatctgccagggaacgaacagaacagacaaggctgcgggctccttaaggaacaggacctagtcttgcctcgttgtggaggtactttaccttgttatgttaccccgtaacaagggagtggggcagagcagtgtactcaaacttgtttgtccacttactagaaggcgcactttttcctactgttatcattgtgaacggtgattgaacacctagcaaaaatggcaaagaaatgtaagagtccttgccctcaggcaatttatttcaggagacaaagtagatgaaaataaacagctgataattctcatgccatatacagatggtcctcgacttacaatggttgacttaagatttttcaaccttacagatggatttaccctgaggtagccccatctttaagtcgagaagaatctggaaattttattttattttattttatgttatgttatttattttttattttatttgagacggagtctcgctctgtcgcccaggctggagtgcagtggcgcgatctcggctcactgcaagctccgcctcccgggttcacgccattctcctggcgcagcctccagagtagctgggactacaggcgcccgccaccacgcccagctaattttttgtatttttagtacagacggggtttcaccgtgttagccaggatggtctcgatcttctgaccttgtgatccgcccgcctcggcctcccaaaatgctgggattacaggcgtgagccaccgcgcccggcgcatctggacttttgtctgacaagtctgagggaacaaatggtaaacactgcgtgattgaggagtgctaagatgtattaggggtcagactttcagcaacgatttcacaaaggaagctgaatttatgcaacagtaagatcttggactttatccttcatcgtgcctcttcctatgcacatacacacccactccccagaatcaggattctttttttatttaagttttttaaaatttaggttgggcgcagtggcttatgcctgtaatctcaacacttcgggaggctgaggcggtcagatcacctgaggtcaggagttccagaccagcctggccaacatggcgaaactccatgtctactaaaaaatacaaaattaggctgggcacggtggctcacacctgtaatcccagcactttgggaggctgaggctgacggatcacgaggtcaagagactgagaccatcctggccaacatggtgaaaccttgtctctactaaaaacacaaaaattagctgggcatggtggtgtgcgcctgtagtcccagcgacttgggaggctgaggcaggagaatcgcttgaacccggggggcggagattgcagtgagccgagatcgcacactgcactccagcctggtgacagagtgagactctgtctccaaaaaaaaaaaaaaattgccagctatgttggtgcacgcctgtagtcccagctactcaggaggctgaggcatgagaatagcttgaacccgggaggccgaggtttgcactgaagcgagatcgggccactgcactcta

SEQ ID NO: 586583 - DNA, 4001 bp, Homo sapiens
cgaaaggtctactggggtaccatcaaggtaataggcccaaaatatccattgcctttaagtctcagagtttgtcaagcgacacagaagttcccatatcgccacacacagcagacacagtgcctgcctttgaaaacttctcaatcttgatggggagagaaaataagtaaacattgggaacaaacctgagaacaattttgtggcgctcaacacagtatgaacatgacccagcacaggacagtccgcatgccccggtgcctgggctgctgagtcacacagggctcggaacagcatggagggaccccagggggctgagtgcagggcatgttctgacagagcagaacagaaatggccaggacgggaaaggggaggaaagaggccttagaggtgggaccaggacactgggtccccagccaaagcatggcagctaccaacactagggtgggccacggtcacagcaaactccgcaagggaagtgcaggcctgcatgggtacatctaggtgcagggtcacagctcaggggccccaacctgctaaaatcacagcaggccttgagagacacacccaaaagcaaatatcccacacttcaggaacactatgaactgagctaagcaaagcagcaggcatccctagcgcaggaaggaaaagccacagggtggaggggggtgggtcattaatctgccctaaggcctagagaaactcctaggcgttcccctagggtgttctcctagaagacttcaatgacaactgtatcaaaggtgggctttcaatctcatcaccaaagaccaccaaaaaaacaaagaatttcggctgctcccagcctttggcagcccttcttctgtatagcaaagaggccacagaagaaatgctggagtctgggcctcatagcattttctaggtgttctatacacccgtcgcctacgggcaggcaggaggagacactcctcaggagtgactgggtatcctggtgtttagggaaactgctggccaagcaggagtgcttacaagccagggcagggctggcaggagacaaggcagggatgcttttgactggccagcatccccactctgccccttctgatgctccttcctggcaggggcacagtcctgcagccaggaggcagagctagtgccaggcctgcagcacgcagggcaactggcctagggaccacggaaaaggcaaatgaagccagaggcagacgggtgggtctgtgtcctcctccaaaaccccatgtagggtgggcttaggggtagcagtcacagaataattcgcgccttgggaggggcaccaataccaacctgtgggcagggagggacacaactggaaaaagcgctggactagacagttggaaaagaagccaccccaaccacctggctgggcctctcctggggccatgcggaagcggctgcttaagcttggctccggggaccctctgccctcgtggtgaggctgggagggggcgtcctggaccagcggctgggaaaagtctccccataatgcccacatctccagttcccacacgcccgagggcccctccatgccgctgagaggaggaaggggacaggccgaacccggatctggccagaaacgggtcagggctctgagggccgcggtgtcgccgtgccacgtccgtctgctccggcgcgggcctccttccttcccgtgcccagcccccagcgcccacagcaggcactcgcaccgggcagggaacgccgggggagccgcgcacgtgcagggccggcccgggggtcgcggcgcgtggatgcgcgcacctaggggtacgagacccggcgcttacttgtaggtgaggccgtcggcgctggcgaagagctgctgcgcggtgagcccatcctcgggcacgtagccggtgccgccgctgatcaggtagtccgccatgctgccgcgagaccccgcgacccgacataaacacccgcgcggccgcccgccgctgccgccgctgctgctgctgctactgctgacgccgcgccgcggccacgctgctgccgcgggccgggcgggccgggggcgggggcgggggctgcggcagcggcagggcgggccagggcgccgccctgtcctcccgcccctcccgcccttctcgcccctcccgcggaaaccgccgcctccgcccgcgccgcacaaagggctcagccgcgccgcgcgcacgcccccagctgcctgcagcggcgctgcgaccccgcaagcccggaccgggtaggaggtgtggggctgcgggggagagtaccgggtcaggccgggacacgccccctccgccgctctacatccagccacccaggaccccccagcagaggccccacccccccacacccccacaccccccaccccccccacccccgagttctcccccagccggggccacccaccttgcccttctccccagggcacctctaacacggttctgccgttccccaatccccaatactcttccgcggaccctgatcaaggcccggagccctgagaaaccggtctgggctctcagctacccagcactaaggactttgaggttggatcgctatgccccatcccgacatcctagggagccggcattcttcataatgacactccttgacctttgggtggccttggggccctctgcagtttacaaagcatttttcataaatgagcacattaactccacaatctattaattgacaagtattgggtacccattcccttgacagaggcaaaatctatagttcggaaaggaagggaggggtactgcttctgattcatggcccagtgcttcggctcaccgccctatctccggctgagaaaatggtgttggtaccagggcttttaatctcagagagcggtttgttatttgggagggtcctgcggtgggaagatgggggaggatcataagcctggcttagacaagtgtgcatacaaataagaacaggggctagggaacttctgaaaaatccccaaagcagaagttggtggccctgggtgcccagcaagatccagatttctacatgggggcagtgactgggtacagataggttcacatggggaaaggtggggtggtaggaagtagatccccttccctcttatgggaccagaactgccagtgctcttcccagaccaagagtgggtccccccacccagactccacagcctcctccctgtgtcctcctgtggctcccacagctcacttggggagaagagaataaggtggtgtgggacacagtcccctccctggcttggtggctggctgtggccctgggaggctgggtttatttacttctcagcagtgtgatggcagctaggcccaggggaggcttggcctccaagccacgaggttccctgggatgcccagcctcccccattgatgcccccgggaccctgccaggaaaacacagactgttccatctgtgtgcagaggggaggctggggccggattgccagcgatgtgtgggaagcacctctgaaccttcagcattcttgggctcatgcagggagcccgggccacatgggggaccaggggagcgtcctgaggagcaccagcactaggacctttcactggccacgtggagcagagcagtgagaccagccacagaaagtgcctgaccattcagagctgctctggggtacctttctggccacagaagaacagagctatcatgccaactgcaggcacagagcagagattggcacacagcagagaccagcccagtggtctctctgggttactgggtcactaaaggacctgctctgggtcactgtcccctacagtatgagttaggaatggctagagtactattcaggattcaaccagagccagggcccaggagagcagctggattttaccatctcaggtgacctgactgtgacatctgccccagccttcttaggctgcctggctgaggcatggggagggtcaccttcccagtgattacagacttcatggccccactcccctctcctgctcccctacacacctcccactttaacctgtgttgggctcctcatcactctaagc

SEQ ID NO: 586584 - DNA, 4001 bp, Homo sapiens
aaaggaaaaattaataaaaaagattctgttgttatgtaagttgagaaaaatcttttcataatatacttcttttggagatttccagtccacaatagccttttaaagactctatgaagtcctatggttaattttttagaagtatgttcctttgtttaaataagcatttctgaatttatttggcacacagttctgttaatccataatacctattaactttagaaaattctagttactgtaaagaaatgcacgtttaaaaagcctgtaatatgtataatgtaagcccaaattacaagagaatttaaaattttaaacaataaaatataaaaataatttaaagtaagttaccctttatttaatgcctactttgtatcagatactagaaattctaatccatgtgtaacattttaaatccttggatgattctctttttatagacaatgtaagcccctcacaagtgataatacagtcagagtcaatgagtaaattagtaaagccctaaaacaaactcagatctgacatcaatgtctgtgctcagtcctgcagagaacactacttcagcaaatcttcagcatttcaactacactaaaattaaaatgaatttgtgagatagctggagaaccacacacacaattcatacttcatatcacaatccactgaacagaaagtggcttccatgccaccactttttattatgtgccacctgaaacttaccggaaaaatatactcataagcaaagggtatagaagtgggtgtgtggtcatgggcagagaagccaggagcagtgaaaaggacaggttcttagctgcagcaggtggtccctgagccacctatttatagtcgttgctctatgaaagagcaaagttaatttggggaaaaagtcctagagactaccaagctatcactgaaagaaaaagaaatgttcattaactgctaaaatttttagtacagcacataagaaactttacagtgaaatctaatttctgtcactcattttaaccaagaaaatgacgattctgttacaatttaaaatgtatctaatgtgtaactaagttttcaaaatttgacatttgccatggtctctaaagagctatatataacctctgcttctgtgctttccactcttgaaaaactgtgaataggatgaactttaaaataagtataaatgctgaaatctaagttcgatacgaaaaggctcaagacgacatctcaacatttattatgctgacgtccattgaaacatagataactatgtcaatgacggtagagaaatattttttgcacaatcccacattctagaaaggaatacacgtgtcccaatgcctcctgctcttgcaaaagccagaaaaaagtagcatgggagggaaggggaaggcgagattcagggctgccagttctttttgacaactccttatgcactagcggagtgagccagaggacagtgaaagagcactaggcgctagcagtgatgacaagcaagtctggcactgaacgcgcgcagcgaacaggagtagtagacgcgccgacttactctgcacctgcaggtccatctcgcgcatttccgtgaagcggtcccgcagatccataggaagctgctcaatcactgtcaaagggagagtccgtcagaggggcggggccaacggcgaaatacgcgcttacgtcactgcgcgcgtgcgtcaggggggtcgagggggccggcagcccacaacgaggctgccagttaccgtgagaaagaaacatcccccgccgccccctccctcccgccatctcgctgcccgtccactcgcgctcttgcccgcccgcacgtcccactggcggccgccgccagcgccgcgcactcactttccagatagtcttctaggtacaacatcgcggcccttagagctgagggaacaagggggtccaggggtttatttgtgtcactcgctgtcgccggagttttgtcccctccaatatggcgcctccgctagcagcacccgctcgactccggcaaaaaaaaaaaaagaaaaaaaaaaaaaccactttggcgcctgaggcgcttgcctcactgccgcccggagctgctattggttggttcaagcaatgacgtagcccggccggtgttcgcccccgtgcctctgtgggaaatgtagttttcttcctcctcagcgagggttggcgcgctggcggctcccctcgcagaaactacgaataccgggcgccattgcaaacagtgcgtaacagaatccgaaatgcggtgcctctgtttatttgttgatttttgcacagagaatggcgggagttgtatgcacctgcataacacaactaggaacaacttttcacctgttctttgatgtgattccatgccccggcgtttgtgagttatgggtttcaagaagtgccaggcaaatagcaaaggttctaaacactagaataatcagcaaagttcggggaatttggattgcttaaaatagaactctctactggaatttatcctcattattcactctaaaatataaaagagacacctggttggcttacgtgtaattttaaaatagtttatactgagactatggagtgaatatacatttcccagattaaaagatgcacaaatagtgtcagtagccacttatatattctagtttgcggtccatctaatcgtcattctaatgtaattgatctatacatacaatctgcatccgcaaataataataataataatcttcatcatcacagtgagcagccatgaattacggatgcagccttgatttctaataggctgttaatagcagtaactttatgttgagtaaatagtccatattcgaggttggttgtcttcggcgttctttagtttctacttttcgacctctcccagcaaatgttttcctgtgatatatttagtacgtccctactcagtttctttttaaattgttttttattaaaaactcttgcactcaataaatgctagatattgttattttccactcttcttaacttttcgattttctggggaaattgtcattagttcataatttattgttcattttctgtttttcaaattgcagttgaaactgtgtgtgtgtgtttcttgctttccttctccattacatactcttgtactcaaggttttcactgctcttaagcaggaaactttcctgtcgtgaatgatgaatcatgatgaatctcaacggaaccttacttcgatcctaataagaattagaattttatagtttctagttaagtttttcattacttccatcgaaaatcaagtactttcgatctttttctcccttctttttttcctcctttcttcgtttcccatccttccttcttctggctgcttttaacatctctttgacatctttttgcagttttgtagtgatctaagtctgaattccttccttattcccttttctttccttaaaattttaaaattatgcttaggatttgaggggattcctgaatttcaggattggtgccctgcaacaattctagaaaattctcagcgtttgtcttttcagtattgcttatttctcattttttccattaagactttctctctttattctcttatttatcttaatctttcttttatatgttttattttagaattttcataatttttcaggtttggaagttctattcggttctcttttcaagacatcttataatttcttatacaaattatttagtctgtatcttgtttctgttaaacctaatattgaaacatttatgggccttttagtgctatttcttcagaaatgggcacttttactcatggtggctttttcctgttgggttgcgattttggactctgaattcctgtttctgggattacaagcataaggattctttgagctggagttgaaattgagttttcatggagagcattagaatttgcttgtcagtttgtttggagacatcataaacccctaggaccagattaaattgtccccttgaggtttattgtattgcacagatagattgaatttgggcctctatcccaaatggattgttacagattc

SEQ ID NO: 586585 - DNA, 4001 bp, Homo sapiens
agtctcctggtttcaccttcttccttttttggaggggagaaaagaaaccccaaacaaacacagtgtctcaatcaatagggatgaattgattgaaaaagtgttcccaccgcccctccacccagccaagccacagccctaggtggtagaacgcccacctggccacgtggtggggcagagggtgcagggaggtccagtggacaggtagtggaggtcagggaagagggactcaggggtaacagaggattgttctggcctgatgggatccaggggagatggtcctttcccccaattcattcatatttaaatgttcaggtcatcaacactggcaggcaatctgaggagagcgcaatggaacttttgtttggggtcatataatacactccactcttcccaactgtgaaatgcagcagggcactgaaggaccagagggcaggcagcctgtcacaagcccaagttccagaagcgctttctccccgtcgcgttcagctgcccccttctgccggggacccactcactctcacacattacagcctaccaccactcgccggacttcacagataaaatgcaaaattctcttggcctttcccacatccttttataaaaagagtgcactcgtatgacttgaataactggtcctatgggaaaagactctctaaaatatattggcaaattatttttctctgtcatgtggtagttttttcagcttgccccaagcctgtcccgaccagtgcattcatagacagcctccttgactgcttctttttccctcaaaggaacagtgcagatgaaatcatcatggattttagtgtgcacagaaaaagaaaaatgtgaattttttaacaatgcctttctaaggcttaaaaaaaattcttccccctcccctctttttcattttctgtcttattgcttttatcttgcagaagaatctttaaggggtccatctgttaaagcgttccttccctctcggtttctttcccacacataagccctcttggtttctgaagatacactcagcttatatctgacacctagtgtgttcatagcattacagtcaagcaatgcagtttaggtggaaagagttaataaatatcattactacaagataagatctgagtgcaaggggaagagggcaagaaaattgtgacactaagttataattacagtttgcacaggttaacaatgctttctgaattatatatactgtccccttttccaaaacaactatttgtaagactttttctgttacaagtaacctaacacctttggggtttcagctccagaaacatcaattactccaccattattgttaaaactttgtcaacattgcctaaaaagcctcatattttttacggggatggtgaaagagaatgggggaggcaggggacatttgtgttacaatggttttataaaaaatctttgtgctataatacttaacatcatccacctatttggagtcacatatacagtacccaaaatgttttgcagttcaattaagttttacaagaaagtctgaaatacaaccaaaagtttaatggctctaaacaactcaggagtcctaatagcagcatttagataagtgcaacttatcaatatttggattctctctgcatctgagtatgtgtgtgttccctgaatttactgtttgcgaatgtaactcttaaaaatagctttctctttggcatatgtacttgtatatatgtgctgagtggcttgtataaacatataatctatttgcatgctctaggactattaaaagctgtattaacctgcctgaataatataaaaaggtacacatcacaatgcacattggaaatgccaattagttgtaaaattcctcctagctttcctatctttgaatgtgtaaagagctcagaagtaagagttaaaaagcattacctttctggtccccactcttccaccagccggctcttgtatcatgtggtaagagctgtctgagctcctcttcatggtattggcactgtgaagttttatactgtactacttatttgtacaccacacattggtaccactgaaacagaggagggctggggctttgtttgggattggttggaatcagcatgacatcagcggatgactggtttttccagtgtgagacatttcataattcattatctaatggaaagcccttcctggcttctgagacactactgggtgatgcactgagccagtgaaacctctggctaggattactctaccttttagaaaaacattggaatcaaatagatatgtctcaatgagtgtgtccaactttcaacttttactactcgcacacacgtctcgttatattcaggttcagttttatgtctttacataaaacatctgttacttcatgaagttgcttctatttacaaagtattttattgtttctttcaggaaagaaaattggtagtgttctttatagggattctaattttatatttttaaaataagctatttcattgaggaaaaaaattgggaaaatctgtataatcatatgatgatggtctcccccgaccccaaccaacttacactattattttacatcttgaaattgaatgcctgcttcataaatcaagaactttggaaatagtaattctctttaaatgaacttcataagtatccttcccaggtctttagaatctcattctaactaaccaaacacacacacacacacacacacacacaacaacaacaacaacaaaaaccctcatgcatcattcttttttaccagaacttcaactcctataatttctaaattgttacaaatataacagcagattaatgaaaagaagtgaacactccttgaaataggggtaaagctggtcaggctttttttgtgggggaggggtgttggcaagtctggtaaataacacaggaggaaggggtcctctgacaagaacggtgaagggttgtttgaaggactacagttgaagcataagcccagttctcatgacaagttggataaaatgtgcaaaattgggagctaatgagagccatatgaccagatatgttgttttgtatgcaggatttaacatgcataaaataaacttttcactgtgcccacaagcaaaatatagaggctctggcctcctgatgtgtggcttaagcaggttccattaggacaccagaagttttctgtgtaaaagggtctctcttggctagatacagagaaagtgtgggtgctgagctgcatgggggtggggggaaggagtattctaagaactgcatatgcagaaatgaagtaggaaaaaaatcattaggttgtagaggaagagagtgaatctgagtggcgaagacagaaataggattaatgatggtgaactccaaacctgcccctcagcttagcactgggtgaactcaaaccctttataagaaagaaacttctccaccctttttgctgagaattagtggagtcaatgaccttcagggcatctaaactcacccctgacccacacatgaaccctagtgtcctgaaaacatcccctccgcctccacacaaagtagtgtgtgtgtgtgtgtgtgtgtgtgtgtgtgtgtgtgtgtgtgtgtaggtgacgtggggtgggggtggggggcacaaaacaaacccagatcagatcccagttcctctgctcactcaccgtgtaaactcaggcctcagtgttcccatctataaaatgggatccatgatatgaacctgtgggggtcaagtgcagctgtcagataataataagtgatactatttctgagaagcctggtggctgttcttaaacatgggtgtcacaggaatctgcagctctctgaccagaggagccacaacacaagtgtgactctgaaactccgctggccatctgatgccaccgagtgcccacctgccaggccagcctaccagccgtgctgcaacccctctgcaaccacctgcaccacagtggcaatgcctcctccctcggtgcaaatcaaggtgggggtggtggaggaagcaggcaggttaaaatagcttctgtggaatattctagactggg

SEQ ID NO: 586586 - DNA, 4001 bp, Homo sapiens
tgatcagagtcttgcccctaaaactgctgtaatcctgaaacttgggattccatctactctatccccaccacaggacatctggtcctatacctgaaggtcctactgtcctgaaaatgtcagagacaacaaagaggccagggagacttctgagaaagaaggttgactgggaaccccctccccaacctctgcacccctacctgtttccttccagctcacaggcgaatttcaccgctggggtccagtcataggcccccggctccttcttcagccacttttccagctcctcccggttgcggtcggtaaagtcggagagagtgatgtcttggaaggaatcacaggcagcaagaacttggtagatggtaggacctgagccaatgtcaatcagcgtgtccccttggaggcctcctgtgggagggaaagactggtaatggatgggtaaaagaaacgagacccaaggcagacacagggatgaggacacacaccctggtcttacccaaggggcaaacgtgcttggtggttatcacggattggcagctccctgtaagccaagcctcatgccaaatattttatatgtgttaatttccatttacacctcaaaactaccctgtgtagtgactgctatcactattttcattttgcagattagaaaactgagtctgtaaaaggttaaacaattagcccaatacctttcagtcaagaacataagccaagagtataatatttctgggacagagaacagaggcccaagccctgctctggggaagattcgggctggagagttcagagaggacatgctggggtcagtggccctttaagtttcaggctgactgggagctggaagcctcccctggaagtccagcccttcctggatgggtttcttgttccttggaggagggaggggtgaaagcatacaggaataggaagccggggctaaggagatgatctgggaagatggccccaggagtgaatccagggtcacctggaagctggaatgaagcatgacttccaacattctgtctggagccctggcgtggggccatcacttggccttccaagcttggtcacacccagtccggctgttctctgatttctgcctcccacaccggcctgctcctccaggctcagcagccttttaaccccctcttatcccacagaccaccaggagactcacccttactgttccccagtcaagtgcctaaagtgaggacacggctgcttgagtttagaagacacaatcaaatcatggggtcaccatggggagggcagtgatcatcgggagacaggcagaagtcaccatccatcgtgcagatggctcagttgaggtccttggggtctgagccccttgctcagggttgagaccccacctagcaatccttgtcccagggcagggcttttccaggtcctcatcacagacacatctaggctgcacactccgggcacaggcgatcccgtcccactgcaaccctgctgtttgcccttggccttctgggggccccagaggcctggctgtgcaaggtcaggactgaacttgatgatgacctggagagccttttctgctccaccccaaagacctaggggctaatggagagcagtgtgggaactgcacggggctgtgctcttcagctggcacagagctcctgagccatggggagacagactcaacctccagcataacagctgcccaaagagagggggcagggccccagaagctcccccagcccatccccaaaaacccctagaggagaccagactgcccccaggacaccgtctccccatccccatccaggttccttggagagaggctcaaggggaagggccaccctctgctcaccagggccgaaggtcttgtggagacattccaagttaaacttcagcatctcggcctcgggtgaggggctgccatcgaagctgtagtaagtagccaagtagtccctgggcaggaagtgcttctggtactcatcacccccagtgaagccacccttcatggtgtccctgaaatgtgccccctccttgctatcaggtcttatgagggctccaagctctccaggctccacccccagcattccagcctcatcccatggctcctcccaagtatgcctttccttgagcttctccttctagggggatgcagaaggcagtgcatgtctcaccacctcccagccacactgacacacctgaggtttccccaaccccagagctatgacagctggggctgcagccgccctggccctgctgcctctagggaccaacccatgtccgtcaaaggcaattgatggtgcccagccctgggtgcaactctcagccctggcagccacatgctgctctgtggcctccaagtaggtgtcagacctatgtttccccacctgcgtgcccacttcactgactgtaaggaccaaagtcactcctctaagtcacaggtgttgtgacctgagtgcacagtgagatccccatcttgtcgcctggtggtcactggggcccagtggctctctctaggccaggcagtgggtgcagcttcatgcatcccccatccctgctggagaacacagttcagaccccaggaggcagagcagaatggctgacttggcatcactgtgcaggtcactgggagaagagcagaaattgtcgtcaatctccatgaatgagaacaagggcgcccggtcataaagcataaactgtcagaggggtcctggcttcctggccactgactcacctggctactccgggtaagacactcctggcctcagtcttctctttgaaatgggactgggttgtaaaatctcccacagacagaaaaaagctcagtctctgtttttggcactaggaaatggctctgacttggccacaaaccggacagaaatgaatccgctacactggaggttcaggcctcttgccctgaaagtgggaaggacaggaatgccttgttctggctttaagtaaacaaacaattctgaatccacagggcccaacagatgggtgatgccacagacgcaggaacacccagcggtcgtcagggcctggcttccaaggggcgggtgcctgggcagcctccagggaggcctgcggctgtcgtgctggcctgcaaaaggcatacagagcaggcaggaaactgcagggctcgcattacatgattggaggagtgtgcaataaaggcacggtgctaactaagttgtgggcagggtggaaggaagacatatggtacctctattagtcagggttcttcagagaaagagaacccagcttgtgtacactgagagaatcagatctattttaagtaattggcttgtataattgtggaggccagtaagtccaaactctgaagggtgggaccaggaaaagccaatgttgcagtccaagtccaaagaccagctgctgccagaattccctcttgctcggggaaggccagtcttttgttctacttgggccatcagctgattggatgagtcccgcccacattatggagggcgatcttctttactcaaagtttaaatgtgaatttcatccaaaaacacccttacacaaacagccaggatcatgactgaccacctatttgggcaccatgacctagccaagttgactcatagaaagcaccatcacagaacctgagggctagcagcatggaggagccatcatcccagtgagactgagacagagctgtgcagagagggcctcctgcagcagccaatagcaaaagagctgatatgatttggctgtgtcttcacccaaatcttatcttgaattgtagctcccacaattcccacatgttgtgggagggacccggtgggaagtaattgaaccattggggcaggtctttcccatgctgttctcatgatactgaataagtctcttgaaatctgatcattttataagggggactttccctgcacaagctctctttttgcctgctgacatccatgtaagacatgacttgctcctccttgccttcagccatgattgtgaggtctccccagccatgtggaacagtgagtccatgaaaccttttt

SEQ ID NO: 586587 - DNA, 4001 bp, Homo sapiens
cacatctataaatgaagctacacatggtattgctgtaaggaatgaacacagcaaagcatctgaagcctatggtcagcagtcagctgacaaacgtcagccacaaagcaaacaggatgctccctgcactgcactggagtcactgacatactggtttgttttccccaccagactctaagctgcttaaggataggggcttgtggtgctcacttttggattaacatttcaacagcttatagagttgaggttgcagaaagcacccgacaagctcgttaaataaacaaatgctgtgtgactacaggagcagtaagtgatctgctgagccaagatcaactcaacatttctataaaagcggttcaatgatagccaagaaagtctagtacacacacccagcagtccccgtgtccacagttcagactgactcagtgttacgttgtacagcatctatgctactgcttgggtgtacgaaaatctaaacgccgtaagggggttactcttttccttaagaacgtaatctacagagctctaacagttcagggtgtaggcggtttggcttcagaccacagtttactcagcgacccggcaaaaggaagtgctgagaagttgctcccctggcaaccgcctcctgaacccatgtgacgggtttgttttcagttatccagcagggtagcatgtttgctgccgcgaccaatggcctttcagtcccgctgctcaccagttccccaggcggccaatccggggcggctggcgcgggatgacagctggggctgtacccggacgccaggagggaagggccctcagtcagcttggcacagcacctgcttgaacagccaattatctccctgcctcatctccatcactgtgcttcctcaaacttcagagagctgtggcccgaacccgccctcgggggtgccaggtcctctctacccctccttcatttctctaaatcccaagactggagatgcacactttcaatctgtggatagttccagtttcaaatgcatgtttcttataggctgaaaagtactttcaaccgaaaagacaccctttttacttccagaagaaccaggaggggtactcaccagctgctgtcccgcagcagggagggacccaccaggcggaggaaaagatggtggcgatcacctcctcggggaagagagtgacattcctctggatctgcagcaggttgagcaccagggctaggaccaccccaaccgagaagagcacgaggctcctctgcaacaggcgatgatgccaggtgttggggtaggggctgccgggctcggggccgctcatcgcagcactgcggcccctgggcgcggggtcagcgtccggggcaccgtgggccgccagcagggagggcccggacacggaaacgttgatcatctccccaaccttggccgccagccccgcggcgctggctcgcggggggcctcggcgcctcgcgctgtgcgcacaggagcagctccagaagtggtcgtgcaatctgggcatcggtcacacgcgtccaagaggcgcttcctggaagaagggggtcatcaagttcactcagaagagacaaagagcgaggaaggccccgcgggacgcgaaccccggcacccgggccaggcggcagcgccgccccccaaggttagacccccgtgcgcccgcccggggccagcggcggacgggacccgcgctcacagcgagcagcatccccggccccagcgggacccgcgtcccaaagacccaacagggcccgcgcccgcctacctccggggaggaccggctgctgcgcgaccaaagcccgcccgcgacccctatcccagccggccgcgtacctggccgagaggcgcccgcccgccggctctccgaacggaggcggggcgggggaaaggaggagtcacggcccgggacggccgcagcgcctggcgggcgcgcgggtttatatggcgggccgcggggcccgcatcacgtgagcctgcccggcctacccaccgcccgcgcgcaccgcccaggggcgtggcctgagcttgccccgccccgcccgcgagcccgtccgcacgcggtctggtgaggcggccgcaaccaatgggaggccggcggcccatatgacgtgcgcacacgccaccgccggcccgcgcgcactcgggcgggagcctcggcacggactgcggggcgcgtggcggctgcggggcacgcgggcccgagcgggactggccggctgcgagtgggcggccgcggagctggggcctgggaggggacggtcctgccgggaggaggcggaggcaggacagggtggggttgcgggcccggcgccgcccctcccggctcctggctcccctcgcctggtgtcccgcgcctggccgggaggcggcgggtctcgatcgcgcgggcctccctggaggggcgcgggctctggcggcggggaggcccctgctcagcgcaatggcgggcttgcatccttgggtgattttttcgggccccttgtggcctttgctcacgcctagagagcaaaccacccgcaccacccaggagcagataaaatcgagaccacagcctccaagggagcgcgcctccatcctgtttgcccctcgggtcgccgtctgagggcgggcccgtgcccgctcagagcctacatccgagtcgtataaagcgctgacagcagagaaagctgcggctttgctccgtgcagatgagcaggggctgagggaggacgctgtgctctcagtagccgcgcttggcccggggaccctgcaggcttagaaacgtgagtcacgcctgcagcgtggcgaggaaacgccgttgatgtggcatcctcagcctggggttgtggctttaagccagaaggtcaaaaaaagaagtcttcctgagctgagactgccctgagtcgctttaggggcgaaattccgagcatccggttgcatttcctgaggatgacacgcgtggtgggtgtggacggcctacaggggtccatcctcagcggcccctctgcagggcagtctcgctctcactctcccagctgactcctctcaagcctgttaaccattgtacacgttcccaaggactccaagcaggttggacttcagggaacattgcagtttgggtcttggccattgtttacactccaccttgcataagtgcttgaggatcacacaaccagatacgtagatcatccgtagatcatcgcagtcacatcgaagatttgtttataataggaaaaaaaaaagctacccactgtcatgcgctgggaaactagtgagctgaaggatgacccatctgtaaatggggtgctccctaatggacagggcacctttcagaagcctgtgctgtgtctcctcgaccccactgtgagctccccgtcccgcacgctgatctaaatcaagctgctaacctcatggagaggcgtccgcacgggagccccggccctgagatgcggggcagtcacccattcaattaggaaacaccagcaagtgccagaagcttctcattagcaggtcagctttcaataactggtttatccaggtgtgtgagacccgataagcagaagggaaagctcttagcgacctatccagctgctctgcactgggctcctgacatcccagaaatcagtacatctgtcttctggggtccaagaggtatttcagtttctctggctttgtttcccgtcatttgtacctggccctgcagactaccccagtatttccatcataatacccctgtgggcaggtgcatacctcatgacaatatttaatattaatagatttatgtgttgtctccagaatggaaaggggctgtctattccttgagctagttggcttgctaaagactattgacttcattcttcttttcctatctacctaataaaccagtgttcatacaacccagcctctctgactctgtccctcctctcatctgtactgggacattatgaaccatggaagatcctggagtcatagaggcaccctgtggctctgtggctgttgcacttacaccgaccaagatgtcccgtgggaatgtgggaa

SEQ ID NO: 586588 - DNA, 4001 bp, Homo sapiens
acgggacagtggtgaagcttacattcccccgttgatgtccttactgttctgctgcttttcaactgaaaacagggaggggatcaactcttctctgttggtaaccaggagggaaggaggaaccaagtacacatcgcctccgctcaggttgagagaggaacgcaccaggatgggcaaccttgagaacagacacctggggtgtcgtcacgcccggtttacccccagggctcagacagtgcccgtcacaaagggggcgtccaacagacacatgagacaaacaactcaataagggagtgacccggttctcaaagggcagccactggcagtgcaggacgcagatgcacacacgggataagggcatctacgtgagaagcacttccaagaacaagccacaaacatccgctctcccaaaggacctcggccatacgggcagcactaggcctggagggggccttccctgaacacctgatggacggcatgagctgaggggtgttctcgggggatgtccacagactcattaccttcaattggcaccacagatggctctttaatcgacggagaaatggctcgtttttctgccactgcagcctcagccaggcgccccagggcactcagagggggtgtggaggagagtttggggcgtttggtgagaccggtgagggccgaggcactggacaacgcggccgccgcatcccgcttgcgctcagaaggcaggccggaaggggctggcttcagcagggtggacgccgttttcgattcattggcctgaccctttgagcccagagcaatgaagtctcctgggggagggtgccctgcagagaaaggagagagaaaaccgggcacatttgcaacacccaagatggaaaaagactgactctaacctcctgttatgtcagaggggattaaacaagggtcagaggaggcaaggaagaagccagagctcactcagcagcctacagcagagctgggaccagcaggatacgcacaggtgatggtggacagtcacgtagcgctaaccacaaaccaggccatctctggtctatccaaattagtgtgcttagtaacccccgccccgagtttccgcaataggtgctattactctaactttacaagagagaaagggacacagagaggttaagcgacgtgcccagcgtcacacagcaggcgagtggcaaagtccggaggatctgagccgacagttcagccgcagaccccgtgctacgctacactgtgctgcctcccgcctcctggctggggagaccttccgctactgtcggccgccttgcagctcagcctgaaacgagatcaccggggtcccgaaggaagtcgccactgtcccaagcctcccagggactctcagagccgctgaggaccgagagcagtgtttccagaccgaattcctggaaacagccgcggctgcggaacaaccaagcccaacgcaggatccgcggcagctgagatccccaaagacccccaaagacccccaaagacccccgggctgcagagcgaggagggagacgcacctgagggtttggccgcggcgctgggccggcgcaccgtggtgggcttggcccggttcatcctgccccgtccctcgcggctcccggcggctgcggcgtcacctgcggaggagccagcgtgcggtcattccttcactcattcgctcgttcgctcgctcattcgctcccttgccgcacggggcttgggcctgggacccggggacagtggtcccgcgcccgcccggcggggcgatgctgcaggagctgcagggaccccgcctcccagccgcccgggagcggctcagtcgggcggcagcaggcgacgcggacgccgggctggaggcggcagaaccagaagggacggcccagaggccgggagcggtagccgggagaaccaggcgctcgcccggcaatgaggaagcgcccaggccgcggctcacttacctctggcccatcgcgaccggagcgccgccgccgccacccggccaccccggaatcggaaaccgatctcaccgccctcgaggacccgacttccggaacaaccggaaggaaaacagtgcggcgggaagcgggcccagaaggaggcgcgagaggcccgcggcgccggcctgatgcctgcagcgccccatggcggcgggaggcgggctggccggcgccgcgcgcatgtggtccggtccaggtgggtcggcggcgcggggcaggcgctggcctctccattcacaggtggtgctggcgttgcgaagggacgcactccaggacgcacggcggggaggagtggcgtcagggatccgcggatgagtcaagtggcaggttctgcacgtcccggagagcgggggcggccggggcgcaggcactggcgagggggcgcagcccggggggctcccggggagagaccctgtctcaaataataataataataataataatagctttattgagatagaactcgtgttccacaaagttcacccttttcttttttctttttttttttggcacggagtctcgctctgtcgcccaggctggaatgcagtggcgcgacctcggcttattgcaacctccacctcccaggttcaagcgattctcctgcctcagtctcccgagtagctgggattacaggcgcccgccaccatgtctggctaatttttttgtgtttttagtagagacggggtttcaccatgttggccaggctggtctcgaactcctgacctcaggtggtccgcccgccttggcctcccaaagtgctggaattactgcgcccgccccgcccccacgcctttttttttttttttttaatggaaacactgatgggaacaaaactcaaaagacacaaaagatcatacagttgccaggtgtgatgctcatgcctgtaatctcagcactttgggagaccaaggcaggaggatcggttgagttcgagaccagcctgagcaacatagcaagacccccatctctacaaaaaaataaaaattagctgggcatggtggcatgaacctctaatcccagccctttgggaggccaaagtgggagtctgagaccagcctgggcaacatagtgagaccctatctctacaaacaaaaatcaagaataaattagccaggcatggtggtgcatgcctacggtcccagctactgaggaggctgaggtaggaggatctcttcagcttgggaggtcaaggctgcagtaagctatgatggtgccactacgctgcagccggccgacagagcgagaccctgtctaaaaaaaaataaaaataaaaggtgggggaatcatccagtcaaagggtcgaaggtctcccctgacccctgagcagctggtcccctcccctggagtcagcctgtgttctgatttgtgcctgtgttcccggcttttccgtgtgcgttcaggcagccacccgtgtgcctccctctgccttgtcaccctgcaggtagcgcacggctcctcttttctgcacctggcttttgccacttaaccacatcttggagatctgttcccagcagggcactgactcgaacgctgccccgccaccgagggagtcctgagcaccgcctgcccggtgtgtcccatctcctcatccagggaccgcaaggcagagctggtctccctgtgcccctgaagttgggtgtggccatttgactgtggcctcagtgaggctcatggccccaggctgcagcctgagaactgctgtgtgacccgccacggtctctttccactcctgtgggcaccagctgggtccccgcaggaccccaagggctccagggccctgcaccctgcgctgtgtgggcagcgagtccggaaggagacgtccgtggtgcccatgggaggagaggccggtcaggcgcggatccctgccggacgccaggcgggggctgtgcggcttcatccctctacagtttctcaatctgtccctcagggtaactctctaaggggaggggagatccgatggggtaatgcttcctcctcctgtcacctgaatgggagcaccctgcacagagcttcctctgcccc

SEQ ID NO: 586589 - DNA, 4001 bp, Homo sapiens
tttttttttttttttttgagacagagtctcactctgctgccaggctggagtgcagtggcacgatcttggctcgctgcaagctccacctcctgggttcacgccattctcctgcctcagcctcccaagtagctgggactacaggcgcccgccaccacgcccggctaattttttgtatttgtagtagagatggggtttcactgtgttagccagcatggtctcgatctcctgacctcatgatctgcccacctcagcctcccaaagtgctgggattacaggcatgagccgccgtgcccggccaagagactctgtcttaaaaaaataataaaaaataaataatatacataaattatttttataatcacaacaagcagttttgttcttaaagatgaagaagcagtaactgaaggccagtgtagacaggcaggccctccagatgagacaggacgtggtgccctggggaacaagcaggcaacttcagctgctccaagttggccagcagcaccaagcccctactgcgggtgcagctgtgctgaaccctgtggtctccttaggaggaagcaaggtgagcacagttcccttgatgtgaaaccttccaaaggcttcctctgtttctccaataaaatccaaattccctgcatggccagcaggactccccatagtcaggctcatgcccatcttctgctcagtctccttgcccgcgtcccaacgggctttctttttttttgagacagggcctcactctgttgcccaggctggagggccgtgatatgatcacagttcactgtagcctccacctcctgggctcaagcgatcctcccacctcagcctcactctgtctctcaggccttggagggccatgatcacagttcactgtagcttccacctcctgggctcaagcgatcctcccacctcagcctcctgagtagttgggactacaggcaggcaccaccacagctcggctaatgtgatggttttttgtagagatggggtcttgcgatgttgcccaggctggtctggaactcttggcctcaagcgatcctcccatctcggcttcccagagtgcagggactaccgggggactaccggcctgagccacggctcccggccatatgggcctgtttcattttctgcacagcacttctcactttctgacacgatcttaattacctgtttattaccttgtccctccgcccccccccccccccccactggaatgcagcttattcccgtgtctctaacacacagtagatatttaccgggcaaagtaactaacctaaggctcatgcaccctcgccctggggagtacatcgggccccaccctcctccaggaagcctcctctgaccaagctgggttcccagaccctggggctgcctccctcccaccccgaaggcttggggccacacgggatccgtggatcccgccttagatcgggggtgcccggaggcacttacaccgtgagctccgtcacctgcgggccgcagactcgcaggcgcccagaggcgagggcgcggcgtcccggagagcttcctggaagcggcggcctctgcgaaagcgggcgcgggcgaggctgcaggcggcgcggggcctgcagcgcgctcttgtgcggtaacaataatggcagctgtcacccggccgtgcgccccgtcctcacgccccgggccggcccctgcgcggggccccgaggctgcgggcgacggagacgagccgaggcctcgcggacgcccgcccggcgtcgccccctcgcccgttcttaccgtgtccaaggccggctccccggtgcccaggaacatggtggcggcgctgcccggccgcccctcagggttgctggctcgggcgtccgggtctgggaatccgcgggcagccctggccgcccgcagcctcggggccttccctggcgccggcccgcgaccccgctgccatggcaaccaggccgccgacctacccagccgggtaagcgacctgcgttccccctggggcgaccatgcgcgtgcgcagagtccgcgggcgccggccggccgaccaggagcgctcccggagttcccggggcggagcgcgggggctgagagggggaaaaaaaccggcccggcgcagtggctcgcgtctgtaatcccaacactatgggagcctaaggcaggagattcaattgagcccaggagtttgataccagcctgggcaatgtagcgagaccccgtctctcgaaaaataaaataaaaataaaagccaggcatgctggtgcacgcctatagtcccagctcctcgggaggctgaggtgggaggatcgcttggagcccaggaggtcgaggctgcagtgagctatgattgcaccactacagtccagcctgggcgacagagcaagaccctgtctcaatcaaacaaacacacataataaactttcgtttgctttcagggtctcacccagggcgctttgctctacgtgctccctgtgcataagtacctcttgccactctcccacccttgggcttcgcaaactttttgcccttctcttatctaattatagagccagcgcctatctacgaccttttatctgtgattctgaattccacaaacttccgaaagcccttcacaactcatttgaaggccagaccagtcctaacctcaactctccgggaggaaaactctgagctgaggctatttatagtgcttatttatcccacggggtgtacatgagtgagtttcactgaataacttcttttttttttttttttgacggagtcttgctctgtggcccaggctggagtgcagtggtgcgatctccgctcactgcaacctttgcctcctgggttcaagcgattctcctgcctcagctacccgagtagctgggactacaggtgcgtgccaccacgcccagctaatttttgtatttttagtagagacgggtttcaccaccttgacaaggatggtctcgctctcttgatctcgtgatccgcccgcctccacctcccaaagtgctgggattacaggcgtgagccactgcacccggccctgaataactattaatacgtttaattatggggtgtgtgtcacactctgctgtaatctcatatttaatgtacatgtgccatgtcacatttctaaaatctgaacagttctgaattctgaaaaaacatttgtccccaaaagtttgagataagaaattgtggacctgggccaggcacgatggtggctcacgcctgtaatcccagcactttgggagtctagggtgggtggatcacttgaggtcaggagtttgagaccagcctgaccaatatggtgaaactctgtctctactaaaaatacaaaaattagccaggggtcgtgggtgcctgtagtctcagctactcaggaggctgagacaggagaattgcttgaacctgggaggtggaggttgcagtgagctgagatcacaccactgcactccagcctggacatcagagcgagactccacctcaaaaaaaaaaaaaattgtggacctgtgcaatacaatattcaaatctggagccagactgcttgggttcaaatccaaactgtgccaatccagtagctgtaaggccttatgagttagcctctctgtgcctcattttcctcatctgatgggctggtagtggtactctcctaccgttgctgtagaatcatacaagtttacagtaagtgaagcacttagcacagtgctgttgttgagttttctttactccacaattacctaactgggtgaatgttagtatctcatttcacaatgaggaaccaaatttcagggaagataactgtgcatttcaaactttttcacacatgtagttctaaggatgtacgtgtgtgtgtgtgtgcagggggcatgcaagcgtcagggaagttgcttttccaaggttacccagcacggctgggcgcgttggctcacgctggtagtcccagcactttgggaggcctaggtgggcggatcacctaaagtcaggagttcgagaccagcctggccaacatggtgaaaccccgtctctactaaaaatac

SEQ ID NO: 586590 - DNA, 4001 bp, Homo sapiens
ttaggctgctctttgagagctttacaaatttatttaatccttacaatgactctgaggtagatcttcttgtctctgtagataggaaaactggaactgtcaagaaacttgcttaagatcacagagtgcattaggttcggatccataatcaaattggaaaaaaagaaaaacacaaagaacaattaagactccaaagccctaatgcatagtctttgtatcctatcacactgtggcattatatatataaaacaaaaaactttataataaagagaaatgtattttccaaactgtggttctccagataacaatgtgtctccgtgaggaccatatagtaaatacatcccataaaaaatgattaccaaccaaaagcttgcaattaatgttccaactaaagaaaaagactcaaagtaaaagcatcagctatcctaggtactgcttggaggcaacaccaaacacgacacataaatcattgttgaaaaaaaccgtaaaacataatgctgggtatttagttatgttgaatgctaaaactaatctttccttaactaaaggtctccgtcaaatgaaaagtgtattttagtcaagtcaggatttctgttttgcaaactcaaagtcttatattattaagcatatattcaggttatttattttcctgatcataattttcaaatcaaattaagatcaaactccactgaccgtcaggtactgtatattctcattttgataaatttcaaattaatgataaaaatgtattaacctgctggtcaattatacattttataaatatattttaaccaatgacatattatcagtaagtacagattcaacggcaagatttcattaagaaagtgtttcaagcttcagatgcccaagacttatttaatgtgtaaatcttcaccactacaataaccacatggttaaacgatcaccacttccattagcaagctcaagcctaataagtgatctcctgggacttcagcacagaggttttctaattttattcctccactcaatgtggctattctcccttatctattcacgctggcaaagcttctagttaaactggaattagtaactatttgatgataataattaacatatactgagtgcttccgatggcgcagttaattcttacagttgataaaagtgtggcacaaaaaggttaatcaagtagcagaggcaggatttgaacccaggaattctggttccagggcccggattcggagttacaaaggtgagtaaactgaaaagagtcctacttttattgtcattgctttctaataaaaattatttttttcttccaattgtttaaatctcttctcattctctatttaaatattaggcgttcatttaaatattaggcgtctaccttacagtaggacatctttaaacaacgtaaaaaaggaaagctttgtcttcaccttcacacataccggtctgcccataaattttgcaatccagttctgcctgattctaaactgcttgtctcttgaagcgaatgccttaaaaagtgacactgggatcaggatagttatctccatccatcctccctcagaaaaacaactatattcgagtaattcttgggaccactgagaacaatacacagacctttgggtaacttcaagacaaaaaaggcaaaaagtcggggagaaggtgtgggaggatgattttccccttctaaacgtaaggtataaaagggctcagaaagcggaaaaagaaccctaaaaagcaaggtgcgggacggcgtgagggaccacacattgggcgctccgcccaaggggtccggctccttctccgcggcgatggcgcgtccttgggctcagcaaccctcctgaagacacctaacctcctccttctccagcctgcccctctggggcctgcgagccccgtcccgggccgggggtcggaagccgtgccatgtaggaccccgaaaaggcccccaagcttggcgcggaaggcgccgccagtgaccggctgcggctgggggcggaggccggcagttgctcggagctccggcgggtcaggaggtgacgggaggaggaggaggcaggaggaagaaaggggggttgggaggtagcgtccggtaggtctgcgcagacagcgctgccagacctctgactcccccagtcctgccgccgccgatagccccacaaggcgacatgggaagtccgccggagcagaggggagaaaattcaaaacgagtctactcaacctcgtcttggctccgaggccccgccatgcagacccctctagttttttactattaaaaatagtgctgcaacaaacattttatacatctatctctgtatatatgtgtaagtatactgaaaatgagttcccagaattagaatggacaagtcaaagggcatacagatcttaattttgttaaattccatcaaactgttttctattatagccccaagaagttccccttgactgtttccttacatcctcatattgttttatgagtcctaataattaaatatccctttgttgtgtgttgcccttatatttcccattgtatgtttgatgttgtttttctcttactatataaaagttttagattgttaggtagtgacatttatcaatctttttgcttatgagagtttccaaatttcctgacatgcttcgaaacaccttctcacaatgaaacataaatacataaattcatccataaatgcataaatgagacagatctgtaaatattgatagaaaacaactggacacacagtcttaagtgtaaaagccaatcacagaagagtatgcacaatgttacaggtgtaactacatatttgcgtatgtctaaaacacctgtggaaggtggcctggagatggggagaaatgggtagatggaggattttcactcttcattctttttactattcgaactatttttttatgtattatctattcaaatgaaaatgtttaaatcttattgtttaaaaagcaacctctatcatgtttgcatacaaaaaagtctcccttttcacctacatttcattccctaccatttaaagcttaacacatttagaatgtagtataattagtgaggcagggatccagtattgccttctaccaaatagatctgttgaatttttaggtttgttaagaggcaaagaccaagggtggagaggaaggagtgagagtgccaggtgaggaaagtctaaaatctctcgacttaatatgagaatggtggccacggaaggctaagagtctctagtgccaggtgtgggttatacacacatcttctatgcaattaccgtgacaagcacccagggtgtgaggtgaggtgtacctcctagcttgatgctgctggttcaagtcccaaatcagagaggggaagccaaaaaaggagccgagaaagatgagatgcttcgcacggtttttaaagtaaagtcggaacattcctgaccgactaggcagccccaggcgctcaggtgggaatcactgcccagcacacagaacccagagtccagcgcggctgtcaccggctctaggctggatctaagcgtcggaccaggaggccgcagtcaaaatctgttctcctacctgtgtacgaaaccaaactattctcgtcgaagtgctttcccaggctcctaagacgcagcttccatactcgccgcgttctcagctgttggtcgtatcctagcaacggccctggcaccacctcttcctgccggagcacggcaggggtgggaaggagaggagccagaggcgggtgggggggaggagccagaagagggcagcggggaggggccgggaaggaggagcgcggcagggtagggggaggagccaaagactgggggcggggccgggaaggaggagggcggcagaagagaaggggatgagccagaggcggggaggtggggccgggaaggaggagtgcggcaggagagaagaggagtagccagaggcggaggggcggtgtcgggaaggaggagcgcggcaggaaataagggaaggagctagaggcgggctgggggccggggtctggaaggaggatcgcg

SEQ ID NO: 586591 - DNA, 4001 bp, Homo sapiens
taaaaagcaaggtgcgggacggcgtgagggaccacacattgggcgctccgcccaaggggtccggctccttctccgcggcgatggcgcgtccttgggctcagcaaccctcctgaagacacctaacctcctccttctccagcctgcccctctggggcctgcgagccccgtcccgggccgggggtcggaagccgtgccatgtaggaccccgaaaaggcccccaagcttggcgcggaaggcgccgccagtgaccggctgcggctgggggcggaggccggcagttgctcggagctccggcgggtcaggaggtgacgggaggaggaggaggcaggaggaagaaaggggggttgggaggtagcgtccggtaggtctgcgcagacagcgctgccagacctctgactcccccagtcctgccgccgccgatagccccacaaggcgacatgggaagtccgccggagcagaggggagaaaattcaaaacgagtctactcaacctcgtcttggctccgaggccccgccatgcagacccctctagttttttactattaaaaatagtgctgcaacaaacattttatacatctatctctgtatatatgtgtaagtatactgaaaatgagttcccagaattagaatggacaagtcaaagggcatacagatcttaattttgttaaattccatcaaactgttttctattatagccccaagaagttccccttgactgtttccttacatcctcatattgttttatgagtcctaataattaaatatccctttgttgtgtgttgcccttatatttcccattgtatgtttgatgttgtttttctcttactatataaaagttttagattgttaggtagtgacatttatcaatctttttgcttatgagagtttccaaatttcctgacatgcttcgaaacaccttctcacaatgaaacataaatacataaattcatccataaatgcataaatgagacagatctgtaaatattgatagaaaacaactggacacacagtcttaagtgtaaaagccaatcacagaagagtatgcacaatgttacaggtgtaactacatatttgcgtatgtctaaaacacctgtggaaggtggcctggagatggggagaaatgggtagatggaggattttcactcttcattctttttactattcgaactatttttttatgtattatctattcaaatgaaaatgtttaaatcttattgtttaaaaagcaacctctatcatgtttgcatacaaaaaagtctcccttttcacctacatttcattccctaccatttaaagcttaacacatttagaatgtagtataattagtgaggcagggatccagtattgccttctaccaaatagatctgttgaatttttaggtttgttaagaggcaaagaccaagggtggagaggaaggagtgagagtgccaggtgaggaaagtctaaaatctctcgacttaatatgagaatggtggccacggaaggctaagagtctctagtgccaggtgtgggttatacacacatcttctatgcaattaccgtgacaagcacccagggtgtgaggtgaggtgtacctcctagcttgatgctgctggttcaagtcccaaatcagagaggggaagccaaaaaaggagccgagaaagatgagatgcttcgcacggtttttaaagtaaagtcggaacattcctgaccgactaggcagccccaggcgctcaggtgggaatcactgcccagcacacagaacccagagtccagcgcggctgtcaccggctctaggctggatctaagcgtcggaccaggaggccgcagtcaaaatctgttctcctacctgtgtacgaaaccaaactattctcgtcgaagtgctttcccaggctcctaagacgcagcttccatactcgccgcgttctcagctgttggtcgtatcctagcaacggccctggcaccacctcttcctgccggagcacggcaggggtgggaaggagaggagccagaggcgggtgggggggaggagccagaagagggcagcggggaggggccgggaaggaggagcgcggcagggtagggggaggagccaaagactgggggcggggccgggaaggaggagggcggcagaagagaaggggatgagccagaggcggggaggtggggccgggaaggaggagtgcggcaggagagaagaggagtagccagaggcggaggggcggtgtcgggaaggaggagcgcggcaggaaataagggaaggagctagaggcgggctgggggccggggtctggaaggaggatcgcggtagggaagaagaggagccagaggagggggatgggggctgcaaaggaggaacgcgatagggaaaagggggaggagccagaggcgagggggcggggagaagaaacatggcaggagaaaggggaggagccagaggcgaagagacaggaagagggacgcgtcagggagaaggggaggagtcagaggcgagcgggcgtggaggagggaagcggcagggagaaggggcggggccagaggcgaaggggcggggaggagggacgcggcagggagaaggggaggagccagaggcggaggctgttaccaactggctacctagatccaagtgaatcaggacactaacttctctccaagatcttttacacttgtgaaacggcacagctctctaaaccaaacactgacagcagtttaattttacagatataaaaaaaatccgagtcagagaaatcatcacgatgaagtcagaggcgagaaactgtcaggtgcctacttgcttttgttaaactaacaacttggctctcagcttcctggcagccaaagagaaaagggagatagtagctatcaaataattctgcttagaagaacttttgttaatcactaaattagttaataaactaaattttgtctaacaacaaattcttttttttttttttttttctagtgtatacagagtcttgctctgtcgcccaggttgaagtgcagtggttcgatctcggctcaatgcaacctctacctccctggctcccgcgattctcctgcctcagcctcctgagtagctgagattacaggcgcccgccaccacccccggctaattttggtatttttagtagagatggggtttcaccatgttggccaggctgatctggaactcctagcctcaagcaatccgccttcaaaagtgttggggattacaggagtgagccaccgcgcccggcctatcaatgaataagaaaacttttaaagaaccacaggatagtattggaggtcaagtcaagtatgttcctcttggaaatttagtaacaaactacatgttgctatctcataatagcagctaacatttatgaagtattcattgtcatgaggcaccgtacatagatttctaatttaatccttacaacgattttattagggagaaactgctattagacccattttgtaaatgagaaaactaaggcacacaaagtttaatgagggaaccaggattaaacctaagcaatctaactccaggtcccagattttttaaccattacagtactgtttaatttgatttgatatgttaaaaggattaataaaattaatacaggtccattcccttattcataaatgttcattgtcttcatttatttctttatactgttctgctgaaattgcactctcatctccccaataactttgtaatatccaatgccatttttttcagtcatcccattttaaaatatatttttactagaatagtgaaatatatattcagataaaattggctttgttttaataatgatcagtaaaagtaaattcattttaatcatttccacacattcatgaaaagtaaaggggaaaaatgggcatagaggtaaccactagaattaggctttcttggatgggtagaccaggtgtggaggtgtgcagataagattttacaaacactcatacactcccatctccaaaatcataatttatcttacattctgctactaataaacattccactggttttaaacattc

SEQ ID NO: 586592 - DNA, 4001 bp, Homo sapiens
gaccctcagtccccacgatgctctagggtgcaggttagaaaagatgtgccctaggccaggcgtggtggctcatgcctgtaatcccagctactcaggaggctgaggcaggagaattgcttgaacccaggaggcagaggttgcagtgagctgagatcgtgccactgcactccagcctgggctacagagcgagactctgtcttaaaaaaaaaaaaaaaggaaaaaggtgtaccctgtgtctacgtctgcatccccttagtccgggcccggcatcagcagcagcatggtagctgggcgggtggccagcctcgaggagctgcctgtgtgcgttatgtgcgctcctcttctggggacagggtgccctggaggtccagccaacctcctccccggggcttaccttgaagatggtgttatctccgtcctggctgggaccatgccttgtggcatgcctccaggggatgcagaataatttcttttccccgttgacccattgaagccctgggtactggcagctgttcacctgggccaccagccagggcttcagccgcacgcggcggggtggggtgggagccactgggatggactggttcatggcagaggggtctgcaggagaaagccagaggggagcctcagcaggtctgcaggtggatggggacagggtactcagaggtcaagctatggaccacaaaggatggtctctccagtccatctaggtatttaaggccaattctcttttccaagcatcagctttcttgtctagtgtcatggaattttgtgtttggaggaagggaaggagagttacgagttagtgaatgctgcgggcgcggccccaggtgccctttaccgggcagaggcatccattctccaactgctaacagcagcaagcagcccgttggccagagaaccgccttccactactcacaccacaggttaggcccaccccttgctcttggggggcagcccacagccagtgactgcctgacaccaaaagcccggctgtcttgtctcaagctggctacctgggacagcgagcgctctgtgggatcagcccgaagacagcctcctgctcagtctacacccctagttcgattcttccctgcccaagttttctcaccctccatcccctgagagttccctccggagatgccctcaacaagaatctcatctggagctcccaaggacacctgccctcagaggaaagcagtttctcaatatctttagagaaatcccatcaaccaactcaacccacctccaatgacagcaggcaccaaacagatgttacctctctagggccattcatctaggttcttggtcctcccccttctcctcccactggacacgcattcgggtagcacttaggaaggccctaacgcctgccggagcctgttaggaaggctacaggaaacagaagccacagctctaactgctacctacccaggggcacgagccccgcctcccaggccacagcttcactgcctccctggagtcaggccagagggaccctgcctcctccccttcacctgcccaactccctctccagcccagaaccggaaactctccacagtcctgagtccccttctgtccctctcctccccttacccatgcccttggcccttcacttgagacccctgggtggaagacagaaaggactgggtcattacacagcacagcccatcagaagtgaatgtgtcggtcagcaagtaaggagcaaacgttcgagctgaactccctgtgtctgggcctgctttggccttgcagcatggagcctcagtttcccctgaaattccctgcccagtaccttttggggttgcacctgcctagtgccgcctctgagctgctactgtctcacattgcaggcctccctcagagcccagctctgctgccaccaacccaggagaggtaaggccggcccttgcctggcccaggggctgggacggggaggtgttcagaacgctccagccctgccctggcctcagaacacgcgggctcagttccgctttctgccccagcctccacccggccccaggggaaacgaaagtggctagaccgggacaactcagaaaccagactcactgtgggctgagggagggagccgagtgggtcccccagaccaaatttccaacctcccacccagagctgttccccgcaccccaaacttgcagacagtttttgtgcatttagtgtggtttataacatgggtgtgcacccacccatagttgtatctgtagacccctgagaggccttggccctagaatagaggggtgccagtcaccagcggcacacaattctggccgagcaagggtggacagaggaagctctgtctgcacagaatcggggagagcttccctaatgaccccctgggctgaggccgtgcaggcgctggtgccgttggggagctcagagggtccggctgcctgccccctactgtcagtccagcagtctggccctgcccaacacggctgtttaatacagagcaaggttttgaaatgataactccgacctcagtgtcagagggccgcgtccatacaggcagcttagggaggggtgtggaggaggagctcccgtgacaagcccggctgtgatgagcgagagtctgtccaccatgccacagaagggactcagcctcaaggcttttgcctgcagctaggtccacacgagctctaacccgaacagcatccatcctcctagaagctcccttctgcccagaaaagggctaggtctaattcagaccaccccaatcaaggcccatgactttggaagttcggtgtcagaacaggtctgcctgccaggctccggagtctctgggtgaaatgtatggagccctagacctaagtcaatggacctgagccccggaaggtggggaaatccaacagcctgaggaagtccctacaattgtgtgaggcagcgaagcatccagtgggcagccctagaggacctgctgaggtggggtaagcccacagctcaccccagggccatgctggagtcccaggagacagtgcccccaccaccacccaggagctgcaattcatgggcaccagggacccactaggggaggaagtgccacagcagtcctagtaagagtggccagacagcaggcgccctgctgctcccagggttggtctgggtcacatgtctccttgcaaacccacacccagctcagggagaggacaaggggttccctgtacaggccctgacccccaaatcccacccctccgggtcagctgcccacaccctgggccctgctgcccacctggtccagacaggctgaggctctggggcaaaaggtgcccagaaagaagcttctttcagcttcctcccagggtcagggtaggggaagaccagggtacaggggaaaaaccccaaagtagggcctttagataaaaaggggtgatttcccagtgcttcccttgactcttggaacccctcagccccagcaccccaggccccataactactgggggtgggggcaggaaggggaggtcttgccagagggcctcctgaggggctacagtttcctacatcgatacagccgagccctctctggttctggtcacttatccccattctgggccctcgaggagcccaggcccagcccagtcctccgcccctgctcccccctcccctccgcccccacccctcccgcgtgctccgctggggcacaccccctgggccagcccgcggagccacccccacctccagagtcggcctctggacctctcctcctgctgctggaggagcagcaccccggtcctcgccctgctgtgttcagcgtggccgcgaggctgggaaagtcccccactccagcctctgctcccaggtacccgctcccgcccctcccggggtccggagacaaccatctccccacgcatcccggccatgctagcctcacttttcctccacgtttagcctcttcattgttgccttcttaagttctgggacaggacctgaggaaaccagcccaggaactattgcgccccatccttttccgctgctcgggggacgag

SEQ ID NO: 586593 - DNA, 4001 bp, Homo sapiens
aatcaaggcccatgactttggaagttcggtgtcagaacaggtctgcctgccaggctccggagtctctgggtgaaatgtatggagccctagacctaagtcaatggacctgagccccggaaggtggggaaatccaacagcctgaggaagtccctacaattgtgtgaggcagcgaagcatccagtgggcagccctagaggacctgctgaggtggggtaagcccacagctcaccccagggccatgctggagtcccaggagacagtgcccccaccaccacccaggagctgcaattcatgggcaccagggacccactaggggaggaagtgccacagcagtcctagtaagagtggccagacagcaggcgccctgctgctcccagggttggtctgggtcacatgtctccttgcaaacccacacccagctcagggagaggacaaggggttccctgtacaggccctgacccccaaatcccacccctccgggtcagctgcccacaccctgggccctgctgcccacctggtccagacaggctgaggctctggggcaaaaggtgcccagaaagaagcttctttcagcttcctcccagggtcagggtaggggaagaccagggtacaggggaaaaaccccaaagtagggcctttagataaaaaggggtgatttcccagtgcttcccttgactcttggaacccctcagccccagcaccccaggccccataactactgggggtgggggcaggaaggggaggtcttgccagagggcctcctgaggggctacagtttcctacatcgatacagccgagccctctctggttctggtcacttatccccattctgggccctcgaggagcccaggcccagcccagtcctccgcccctgctcccccctcccctccgcccccacccctcccgcgtgctccgctggggcacaccccctgggccagcccgcggagccacccccacctccagagtcggcctctggacctctcctcctgctgctggaggagcagcaccccggtcctcgccctgctgtgttcagcgtggccgcgaggctgggaaagtcccccactccagcctctgctcccaggtacccgctcccgcccctcccggggtccggagacaaccatctccccacgcatcccggccatgctagcctcacttttcctccacgtttagcctcttcattgttgccttcttaagttctgggacaggacctgaggaaaccagcccaggaactattgcgccccatccttttccgctgctcgggggacgagagtctgccattcccggccgcgagcccagggacgcagcctctacctgacaccatcttcccccaaactcttgcacagttcctgccattggcctgaagatcccgggggatgaacgctttaacctcaacctcttttccgaaagggtgagggtggcccggtaagagcaagggcgagtgcatcgaaagtaaggatcgggcctcgctcctctgtggtccaagccagcctccagcggggctcccgggaacccccattctgggcgatggcgagggggagggagagcagcagagccggcgccccccgcagcgctgcccactccgccgcctgggtcactgggctccccgggcgccagcaccccaaaccgatcggggcgtgggaggcgctttggaagtcccaggccggccgggcgcaccctgctgtaggcacccacccgagctcgctttccaggcgcagctggacgcggaccccgccctactccagtcttcatcccgccgcccgcaggtgcctggggggcgcggggcccagtctaggcctagacttgggggcagtagccggcaccgctcccgccaccctcggggcgcgccgggcgcggacgcagagaggagagcgcggcggccgggacccacctgtctgcggtgcgcctgcgtggctgcgccagggagcaccggccgggcggcgggaccaagctgagctctgcccaggctgcgcctcccgccggtccgccaacctgccgggcacttccgcgtcttgccgcccccgcccctgggcagctgctgctgagctccgggcgcgggcagtgccccgccccgccccgcgaatccactccgggccccgcactgacctggcaactgcagatccgggctgagcctcgggccaggcccagggcctccagggagatgccagacggcgcggtgccctagactggccactggctcttttggcaatctggaatggcaaaactgtcatttgacaaccccgtacctcccgctgcagtgctcagttgggccctgggagagggtggggtgcttccccactctggtcctccggggctgcacacaaatgagggcgcagtgtggccgacccacagctccaggccctcctctcgcctgcctacacccctggcgagggtggctctcgccctagaacacagtcgctgcccccaggatccagacaccccttccagatgtgcttgcaggcgggaatcctctagtcactctgtgcctttctcatcctcaaaccctgcacctgtctcgccccagctcccctaagtcgccttccagtcatcccaggggcagcggcgtggtcgcctgtcccacctcctctcactactaccttgaccgtcgacctgtggttctgaaccgttttcgattccataaagaacctcaccccagaacctccaccttcacacacctcctgttccttctcatggaatgttcttcgcttggtaactcttgctcttcaaaatttctgtttctgaaattttcagcatcgccttctctggaaagtctgccttgacttcccctcccaggtggggttccagggtgcaaatagcttcctggttgattttgcttatgattttgttatggattgccaggggtttggtccaggtctggctgctcaccgcacagaaagcctatcactgagacagcgagtattgccagggaagactttattccggtgacatcagccagtgagctgttgagaggggagacaaacctccaatccatccctccccttgactaaagttaggggcttatatagcagggaaggaaaacaggagggacaaggaagaggaattggtcaacaggcagcaggtgtactgatgtaagtgtctcaagcttcagttctatgagcatctggctttttggaaaattcagcgggtttcaattttgatgtctgatttccactcgaatcagcttactcaggaacctccctcctgtcttttcattgttcattttattttattttattttttgatatggagtcttgctctgtcacccgggctggagtgcagcagtgcgatctcagctcactgcaacctctgcctccccagttcaagcgattctcctgcctcagcctcccaagtagagacggggtttcaccatgttggccaggctggtctcgagctcctgacctcaggcgatccacccgccttggcctcccaaagtgctgggattacaggcgggagccactgcgccaagcagagccttgtatttttaacaaataaagtagtatttgttgatgaatcagaactttgaccttccctcccctcccttctcctgggttgaactttacctttaacaagttaaaaaaagacactcatgtgttaacgttttttttttttctcttctgtatctctccctctttcctgacctttgaagccctaatatgaagtcgaaatatcattatatataagtattttattatttgtatctgctgagtatttcattatttcatatttttaaaatttaaagtatggatggggaaaatgtgaatgggtagatcgttttatatttctttctttaaaaatgaaattgctaggccaggcacggtggctcacatttgtaatcccaacactttgagaggctaaggcaggcagatcacttgagtccaagagttcgagaccagcctgggcaatatggcaaaaccttgtctctacaaaaaatacaaaaattagcctggcgtggtgacacacacctatagttccacctacttgggaggctgaggtgggagaattgc

SEQ ID NO: 586594 - DNA, 4001 bp, Homo sapiens
cggctgtttaatacagagcaaggttttgaaatgataactccgacctcagtgtcagagggccgcgtccatacaggcagcttagggaggggtgtggaggaggagctcccgtgacaagcccggctgtgatgagcgagagtctgtccaccatgccacagaagggactcagcctcaaggcttttgcctgcagctaggtccacacgagctctaacccgaacagcatccatcctcctagaagctcccttctgcccagaaaagggctaggtctaattcagaccaccccaatcaaggcccatgactttggaagttcggtgtcagaacaggtctgcctgccaggctccggagtctctgggtgaaatgtatggagccctagacctaagtcaatggacctgagccccggaaggtggggaaatccaacagcctgaggaagtccctacaattgtgtgaggcagcgaagcatccagtgggcagccctagaggacctgctgaggtggggtaagcccacagctcaccccagggccatgctggagtcccaggagacagtgcccccaccaccacccaggagctgcaattcatgggcaccagggacccactaggggaggaagtgccacagcagtcctagtaagagtggccagacagcaggcgccctgctgctcccagggttggtctgggtcacatgtctccttgcaaacccacacccagctcagggagaggacaaggggttccctgtacaggccctgacccccaaatcccacccctccgggtcagctgcccacaccctgggccctgctgcccacctggtccagacaggctgaggctctggggcaaaaggtgcccagaaagaagcttctttcagcttcctcccagggtcagggtaggggaagaccagggtacaggggaaaaaccccaaagtagggcctttagataaaaaggggtgatttcccagtgcttcccttgactcttggaacccctcagccccagcaccccaggccccataactactgggggtgggggcaggaaggggaggtcttgccagagggcctcctgaggggctacagtttcctacatcgatacagccgagccctctctggttctggtcacttatccccattctgggccctcgaggagcccaggcccagcccagtcctccgcccctgctcccccctcccctccgcccccacccctcccgcgtgctccgctggggcacaccccctgggccagcccgcggagccacccccacctccagagtcggcctctggacctctcctcctgctgctggaggagcagcaccccggtcctcgccctgctgtgttcagcgtggccgcgaggctgggaaagtcccccactccagcctctgctcccaggtacccgctcccgcccctcccggggtccggagacaaccatctccccacgcatcccggccatgctagcctcacttttcctccacgtttagcctcttcattgttgccttcttaagttctgggacaggacctgaggaaaccagcccaggaactattgcgccccatccttttccgctgctcgggggacgagagtctgccattcccggccgcgagcccagggacgcagcctctacctgacaccatcttcccccaaactcttgcacagttcctgccattggcctgaagatcccgggggatgaacgctttaacctcaacctcttttccgaaagggtgagggtggcccggtaagagcaagggcgagtgcatcgaaagtaaggatcgggcctcgctcctctgtggtccaagccagcctccagcggggctcccgggaacccccattctgggcgatggcgagggggagggagagcagcagagccggcgccccccgcagcgctgcccactccgccgcctgggtcactgggctccccgggcgccagcaccccaaaccgatcggggcgtgggaggcgctttggaagtcccaggccggccgggcgcaccctgctgtaggcacccacccgagctcgctttccaggcgcagctggacgcggaccccgccctactccagtcttcatcccgccgcccgcaggtgcctggggggcgcggggcccagtctaggcctagacttgggggcagtagccggcaccgctcccgccaccctcggggcgcgccgggcgcggacgcagagaggagagcgcggcggccgggacccacctgtctgcggtgcgcctgcgtggctgcgccagggagcaccggccgggcggcgggaccaagctgagctctgcccaggctgcgcctcccgccggtccgccaacctgccgggcacttccgcgtcttgccgcccccgcccctgggcagctgctgctgagctccgggcgcgggcagtgccccgccccgccccgcgaatccactccgggccccgcactgacctggcaactgcagatccgggctgagcctcgggccaggcccagggcctccagggagatgccagacggcgcggtgccctagactggccactggctcttttggcaatctggaatggcaaaactgtcatttgacaaccccgtacctcccgctgcagtgctcagttgggccctgggagagggtggggtgcttccccactctggtcctccggggctgcacacaaatgagggcgcagtgtggccgacccacagctccaggccctcctctcgcctgcctacacccctggcgagggtggctctcgccctagaacacagtcgctgcccccaggatccagacaccccttccagatgtgcttgcaggcgggaatcctctagtcactctgtgcctttctcatcctcaaaccctgcacctgtctcgccccagctcccctaagtcgccttccagtcatcccaggggcagcggcgtggtcgcctgtcccacctcctctcactactaccttgaccgtcgacctgtggttctgaaccgttttcgattccataaagaacctcaccccagaacctccaccttcacacacctcctgttccttctcatggaatgttcttcgcttggtaactcttgctcttcaaaatttctgtttctgaaattttcagcatcgccttctctggaaagtctgccttgacttcccctcccaggtggggttccagggtgcaaatagcttcctggttgattttgcttatgattttgttatggattgccaggggtttggtccaggtctggctgctcaccgcacagaaagcctatcactgagacagcgagtattgccagggaagactttattccggtgacatcagccagtgagctgttgagaggggagacaaacctccaatccatccctccccttgactaaagttaggggcttatatagcagggaaggaaaacaggagggacaaggaagaggaattggtcaacaggcagcaggtgtactgatgtaagtgtctcaagcttcagttctatgagcatctggctttttggaaaattcagcgggtttcaattttgatgtctgatttccactcgaatcagcttactcaggaacctccctcctgtcttttcattgttcattttattttattttattttttgatatggagtcttgctctgtcacccgggctggagtgcagcagtgcgatctcagctcactgcaacctctgcctccccagttcaagcgattctcctgcctcagcctcccaagtagagacggggtttcaccatgttggccaggctggtctcgagctcctgacctcaggcgatccacccgccttggcctcccaaagtgctgggattacaggcgggagccactgcgccaagcagagccttgtatttttaacaaataaagtagtatttgttgatgaatcagaactttgaccttccctcccctcccttctcctgggttgaactttacctttaacaagttaaaaaaagacactcatgtgttaacgttttttttttttctcttctgtatctctccctctttcctgacctttgaagccctaatatgaagtcgaaatatcattatatataagtattttattatttgtatctgctgagtatttcattatttcatat

SEQ ID NO: 586595 - DNA, 4001 bp, Homo sapiens
ctaactaactccatcttgcttctaaccattaagctcattccttggcataggccgaactaaccttgggaaggaatttagtttatggtttgactctggaacaaaattgataatagccctttcccaaaaagacccctttcttgcctggggaccagtctgccttcacaggactaacaaattagctacaagattagaaattacagtttaggggtcatgcatcctctggctgcaagagtctgaacctctccaaattgctcctggggataacatcactattgtaaaacctaagatcagtgcttgagatattttatagacccttcactccatgaatcagctgacaccacccaacccagtaatctgtctcaaccagttctgcgatcccacccagaaacagaagacaccaagaaaacctcacatagaccccctatgattccatctccaaactcatcaattcgcactccccacttcccgagcctctacccgccaaattatcttttaaaactccgatcccgaaatgctcgatttgagtaataatttttgagtaataattttttgagtaataatttgatatgagactgatttgagtaataataaaactccaatctcccgcacagccgactctgcgtgaattactctttctccattgcaattcccctgtcttgataaatccgctctgtttaggcaggggcaaggtgaacccgtggggcggttacaaaacaacttgaaccttttggcttttgaagcatgtgtgagggtttgcgtggggctcctttctggggaacgtgccacttcccttggactagaacctcactagcttggttttcaaaacctcctgcaaaggcaatgtatgctaaaggatgacatctatctggaaatgcaaacggttcgcatcaattcaaggcttcacaaactaccacagctccccactggcttcagagaagttcaaacaccttagcaaaattatgtggatatttgtaatgccgctgcttcccacccctgcaccctcgccccaagctccacctcattactcagtgctaaaagcaaagtaagttaatattataacataccccttcatttcacttcctcagctcctcacgactgttcccctagtcctccttatcccattccctgtctccttcatttccccaactagttaacttcagtgccctttctaagataaagggggtatgacctcaaattcaggcttaaagccctttccaccattgaaaggttattaaattctgctcctctcccctcctgcagcacctagtaattagcgcagcctgtctcacagaaggtgctcagtaaatgaatgaaaaaaacgaacacacgccctggaaacttcagtgtgcacgtacaactcaatccacgcatgcgcggaggcagagccccaggaccgcgagactatccgcacagcttctcctcaggccccacagctagaaccccaaatcgcctagtcccaacccatgcactctctaatcggcgccacacgacgggccttccccacaacctcatctgcttggggacgtaaagggctctgtgggggagctgcagctttcgtgcccatctgttaaaggccagaacttcccatctctgaaatgcgggagggaacagagctcaagcttgaataactgagcgcggcccggcagtcccccaagtgaaggtgctagcgctagagcagcggcagggcggggagcgggaggccgggccccagggaaccgcggggcgcgcccggcgccgcattacctctccagggcctgtagggtgtagctgatgagcggcctctccaggatggggcagaattgcttcggggtggggacccccatcctctccccgcaccccccggcaggcaacacagctgccacggcttgcgggtggcgcccgggctcggtcccggccacgctctgcagggaggcggaagccgtgtggtccgcgccgcgctgaccactcaggcaaggacccggctccgccggcctggcgctgcccggcggcccggcctccatggctgcgggcggaacggcgagccccgctagcctcgggccgatgcgaccccgcgctgctcccaccctcggccggggtcgcggggcgaagggcagaccacggagagggacgcagagcgcgcaagcagaaggcgcccccctcagccgtcggagccccgctgttgctgccccgcaggggacgatcccgacagctacggcagcagctgaggctgccgatctgccctcgcggctcggctgcggcctccgcacccggtcccagcgcctgcgggagggctgacttgcccgctctgcgcttcccccgggcaggcccagctgtcgccgcaagtggaaatgtcagaacgccctacatatctaaagatcgcagatactcaagggccatgagtatgcaggagaggtcaggcctctgtcccatccctccctgctttaaaatttcggaagagattgggattcaagtcacaggatgggacgtagggtgcgtatgcacctcgattatctgaattccattaagctctggaggcttcctggttccacctggggtaaagacagatggattagcaagtgttattgtggcacatcaataatccaaactgtggtggctctcaaacttgtctgcactttggaaccacctggggagcgtgtcctgacacgctcagagattgggatttaattggtctggtgagcaccggactttggaatgtttttaaagatcctcgggtgattctgatgagcaggcatgttttggaaccatagggtcaaagcaatactaattgctgaacaatcgatacaccttatgtcatttagtccccagaagaactcaactattgccatttccctttttacaaaggggaaaagacgttaaaatggttaatttatgtaagattgcacaactaatggcagaggagccttaaggccctcatacagaagtaggccaaagttgaagaattccaggcctaaagcatatcttaccttatttagtactcttgttgctggtgaggtttaccatgaaagtatagtgagaatttggaggagagcactattgtattaggtccctggaatgtaaactccatgcaagcagcaacatttttcttttggcttgggttgtgtgtgtgtgcccagctcctggaatgtaacacaagcttaatatgtattgaatgaattgctgattaaatagattaatgatcattaaagtgtataatcatcagtaattcagtcttaatccagtggcttatgattaataaaaaataatctttttaaacactggaaatgttatctagttgtagtattacaatttttatttttacctgttttcttgagagcatataaaaatatgttttctgcttttcctttttgtttagtcttattgaaggcattctttcacttttgttacttttattataattagcatttaggtcctgtgctagttggtttcttaactgaaaagtgggtgccataatatacttccttgtaatttttattgctatcgttcctttctaatttgatctcgaggtctctctcttacgagtggccataagccagaacagccactcttcaggagagccctggcccagagaggaaagctaggttctggtgtgcaggtgagacgccagaggaggcagcacacaaaacatgtgaaataacaggcgcattttattacttacagattcaccagagaataagcctgatggaagtctggagataacaggactcccaaccagcaggtggggtgcaagagagaggacctgtggggctgtgttaaggtccaaaggctttatcccttaggctttccagagggggttgtggattgactagtttaaagaaaacaccagcaaagggagaacttgactctggtgttgaccattgggttttatcatggttagcagctgttgggtttttggtcatggaatgaggaataagtgttctatatcacagggaggggaagttttaagtaggccacaggtgacgtgatacaactgggtttcaaacagcttatatcaggcctaaaaa

SEQ ID NO: 586596 - DNA, 4001 bp, Homo sapiens
attagcttcaggcaaaaccttgacactttaaagtataggagtaaattttaacctacaaaacaattacaactattaattaaactctccttgagcccaagaggtcagagaaaggctctaatataatttaaggacttggtgaccaaacagagaaaaagtgaaattaaaaaaaaaaaaaaagaaagtatgacaagagtcactgcattagcaaaaataaatgttgggcctatattgaaaaccattaagaactcatcctaaactcatgattcgtcctattacttagttgtgtaattttccaacaatccaatctggtataccaccttacatttgattttgtttcataaatcaaaagtcctaaaacaccttctcatatgctatttgacttgaactttcctttgtgatttagagaaggcaggtattattaataaacctcgttttacagatgaggacaatgcatttcgtaaagagttaacctctccacattaaggtagctcttacacaaatggtttgcctggacagaaagctgttaatcctggttcagagttctttctgcttctctgtctcagagattgatctcagtgagggatcaattagatagtattttttttttttaagccgaaaggatgatgacttaaagcattaatatccctccagtgtgggtaattcattcagattgagcactaatgatagcagaaacttgtatgctgtctttttctggactcaaaaattgaagactactcccattataaccaacttatctacagcctcgagttaaaggcaagttagtccttagtggacccaaatgttagaaagatagggagaacattgtgtacagacgatgcccttaagaatggaccagggcccctaaatgacttctgtaaacaggacaccctcttttccaaaattcctttctattagggcttcctcaacacctaggagtaacacagagtgtctcctctgataattagtccttgctgtcgctccagggcagaaatgcttgacacctggcctctaggccatctgtgctggaggacgctgccccgcacccgcccccttgaagttctctgatgaccgcaacttacctggccgggatgctctggccgggcagctcttcgtgccagcccaagacctttggggaagagaagaaaacaaaacaaaacaaaacaacttaccaccttggcccagtccaagaacaagtgaaaacacccaggctgcccagaggaacgaggcgggacctcgccggtcgttttgcaggcagacaaatgcagcggtaaaaaaagccagggccgagccgcacataatgcaaaacagcccgccccgcgcccgccgcctgactgccttccggacgcgggctcgcgcctcccgggcgcacctcggggcccgcgggccgagtgtcgctaggacgttttccgcaggcctagcaggcggaccccgcggctcggagcaagcggtgcaggtaagcgggcccgggcaccgctcggcatctcagggcccctgcggccctcccggctcggcacggcgggtcccgcggtctccgcgagaagcacctccttcgacggccaagggccccggcggcgactggagagagggctctgcaagggctccgcagcctgctccgggacaaagaaaagagcttttgtttctctccagccggtggggcttctgctgcataaatcagcttagcgaagagccaaacacaatcaaacccaaacaaagcccgaagctgggggggaaaccaccctaatgtacattcactgggtgatgctggatctgtgggaggggacgccggcgaggtcgaggggaaaaaagtctgtggcgcatcaatcagcgcagttgcttccacaggtgggcagggaggccaacaccattagttgcagctttgcagccccgtctgcggagcagcgggcaaagacaagtcggcagcgtcctggctggcaagggaggaagctcgggatgccagcaacagggggaggcggctctgggagcgccctagaagcacccgccgacacccgcaggcacagagcgaggcatcgccgctccctccctggcggggagtggggcctgcggctgcgagcgcaggaggggaggttccgcgaggtgccggagcccggcttcgcggggcgggggctgcgtgcccttgtccttttcgcctcagtgcgcggctcaggcgtcccgcagtccagagcccgagttgctggcgcgctctggggtgcacacggctaggatgcgagagaggcgaggccggcgatgggcgggagaggggtggtcctgctctggccccccggggggctccagacctgcgggtagccgggtgcactcagggcagagagttgctaggaaacctccccacgctaccggagcgcctcgcctcggctgcccgcaggcgcggctgcagcccgggcaggagcagcagtaacagctcggagcagcgtgggcgggacattggtgaggcatgaagtcaccgcggcccacactcgctctttgttttgctcactccagctctttcttttcccccttggctctgatagttgccattcccatcgttcacaagaactcctgaagcgtagccgcgcaacaggaatggcacgcctcgttcccttctccctcctcccccgaatccttgcaccccaacgctcgcgggggtggtgggagactcgctcagcgccagcggcagctgcgagcaaaccccaatctctcacccccgcgctgctcgccgctttgttcggagatactcactgccccgcagctgctgcatacaaagtggagtcaagggacctcccctgcccccaacgccctctactcagcactttgcttgcagttaggagctcgtcctctaccccaccacaaggctgccccggtgtccctagcctttggagagttggaccagtctgcaggggctgttcccggagcgactggccgagatttctcgctgctccttctctgctcaaaaccttaaccctggactggacagccctgtttttccccagcgtctggtggtggctctgggcttttgcaagttacagtgggtcttttgatcttaagcgtcaccttcccagtaaacggaacaaaaagttacagacagcagcaaagcggggagaggggagctaaggagagaaagtggaaggcacttctgcctgcttgcagctcagaaatttaggtgcaagtagggtgcgggtgttatgctgggcaactgcccggaagcagcgcgcctcctcgggtcctgtcattaccacgctaagtcgagggagggaactcagtcccccgcattggaaacaaggcagtgtttccagtttaacacggtgatggttctcttttccctctaggggcaggagcgattcccattcgaggagtttgacctctcattttaatacaacacccgcctcttagaggcagcagaccagtccagccaggtcaaggtgaaatatgcgggagtttccccccttcttatttaatagtttccgtctccttatttgtagttaaaaaaaaaaaaaaaaaaaaagtaggaggcgcggtctctctctttctttctgttgactgagtgaatggaaagtacctggttaataaaccacaacatcgaaactccccctttcaggtgtggaccgcacaacggggtgcacaggattagttaagcaaagcaggaacccagctggaaaattaaacgagccctggatctgcaaagcaggtcccttcgcgagaccaaagccgtgatcccaaccttagcaacataattctactggaggtgatgtactctaaataaatagaaataaatccagctccgctttaatatttatttcctttccttagttccaagtttgaacagttatagttttgttttttggttgtcttaaaggaaaggcctaaaaattagttaggatgggtgtgaggacttgaaaatttgaacacaaaaatatcatattcaatatctgattagtgactcttccattgggcagcctgggtattttccaggggttatgtcacagacctactgaatgcagccacccttg

SEQ ID NO: 586597 - DNA, 4001 bp, Homo sapiens
tattacaaggacgcctgaaaacttgaaaagtttcaaaacctggacaattactcaacagcattttcctctgaaagacattttgtagacgtttcccatgattatctcctattccggatggcccatcaaatcacattctaaacaggcattcaacacttattaagcagccactgtgtgcagagacagcactatactaagcaaaggagcatagggttctgcctcattttattcctgcataaatacacagcagtcgtgatttattctctcaactttgtagaaacgtgagctgcatccacatggctgaatccatggcattcatttggacttcctgggggcaatttacaggttctctggattagacagccccattgggacatcgctcggacccttcaccttctagcccacgcaggacaactcgctggcgtcggtcacaccttccgcaggtggttggaccgcctaagccagatgcacccggcccacctcccttagcaggggttccgaatagaagtgtgaaaatgtgtgcaatgacttctgcaaatcagaggacttgttgaaaggtccaggggtccaggcgtgaagggaaagcagccaccctgcggggcgccccctccccggcgtctcccgggcccggggcgctgcgcaggccgccgccgatcccagggcgcagccagcgcacctcgggcctagcaccattagaaaggcaaatcgcagagccggggtgcatttaaatgcccggccatgggccctgggggtgtctctccagcgggcgccgccgcaggggcctccagggcgcgtcgaccccggggcgctgggcgcggcccgcgggcgcacccaagacctcagcccgcagcgcccgggcgtccgcgccaggccggggcaggggagggcacccagagcccccgggcccgcgtccccggccccgcccgggcccctcggccgcctcccagggagagggcaagctccccggcccccgcccgcggccgccggccccggccccctcccgacgcaccacacctagcaaccggcgctgacaggacgcagtggcggcggcggcggcgggaggaggaagcggaatggctgccgcggtggagccacccccgcccccccgctccacctccccgcggctgcagccgccgccgagccctgacagctcgagccggggcggaagcgcccggcggcgtgcagcgcccgccccccgctgccctcagcgcctcgggctactccgaccacccgggccaactaactccgcgaccctgcccagcgcccagctcccgccgcccgccgcgccctccgccccgcgccccgcgcgccggcactcggccccgccgccgcaaccccgccgccccgccgcggcgctccccgctcccaccacttcgcagcccgcgtgcacgcccctgagtcccccagccgcccgcccgcccgcccgcggcacctcggggcgcccgccccctcccccacccgagcccgctccccgccccccggcacctcgcgcccccgcatcccgccacccccacctcggggctcgcacgcgccctccccgccctgccgcctccctccccgccggccacccctggccattccggggctccccgcccgggcaggagtttccgcgcgcctggcacccccgcccacccccgggccatttaccgatgtggttgtcctcgatgtgctcgatgaggtcggccagggtggggaagtggagtccgcagcccccgaatcggcaggtattggagaagaaggaggcggcggcgatgcctgtcatggtgctacatcgagagcccccctggtgtcggctctgcgagcgccgggcgggcgagggagggagggaggccgggtggggtgaggagaggaggggctgggggagggggagagaggcggggtgaggggagcggcgaggacgggacggagggagagggggcgagagagatggaaggagagcgaggagccaccgggaggcagaggggaggcggcggctgcggcggcggcgtcgggagcggcggggggagggcgggggcgggggcggggggggaaggccgccgcagctgggaggagggaccagggcgcgcggctacagctgtgcggccccaacctcagcgcgcggacccaggcctcacctgcgagccctgccaccaactttatctcgctaggcctgccctttacggcttgccatccgtgccatctgtttggagcctccttggttatgtatatgacgttcttaatacacccacatcgattaattacacctacctccctgcgaggagaactcagggagttaccctggtccctctcagggacatttttttgtactcagccacctgtctaggtgtgacacattcacaggggacccaggaaaggtaattgtgtgcaccttcttctttaaaccttctttagaaaaagtacacattctccggaggtttgtactaactaattgattttaatgaagctttccctctaggccagaaaaaaatcttagctttatttaaatttcaaaatagagtgcttggttgtcaagtgcatttgcctgtgttttacatatgtgccacgttttttatactccctgctccttctaggaaaacaaaaactaaaataatttcatcacccgaaattacagcaccctactgcacccactccaccatctcaggtctggtaattaacccatcctcgtttcagccactgcagaaaggacagtgcattggttaaggctagaaggagcggaaacaacggcaagggacatagtgactcttcatttaaaaaggaagcgatttcatcctgtgagcatttaaagcataatgttgaccaggtaaccacttaaggtgaatttagtagcttccctgaaaaccagcattttgctgagaatcaattactttcttgtccccaccccctcctccagttgcagtcatatttcttctgtaaagtgtgtattttccagtagcacttttccaggtgtctaagaaatattacacattatcagcagtttatgacccaacagtacattttttttattaatattaatatatgcatactgaatttagcatttttccttagggcaaatttcacttaccctctggtgcagatgcatggagaaatagtattcctccctccataaactctatgcatctctgtctagtgttatttctaataatgggattgtttgcttttcatgtaagtgcttagagtaaaggcacatgtaatatgtctgttgctacaggaagttttatgatctgaccatcaccggtggcattttctcttctcatctcttctgtcttgcagctcacaaggtgacaaacttgctgagatgagattcggcttgggtggggctggggcagctgtgtcttgaagttcagtttggtgccaagaatggtttcatgggcccaatgagggtgggggcagggccctggtgggcctgataatgagccagggaccgagttggcaggggactgaggccaaggccagacaagggtctaaagagcaggagttagaattctagatcttgaattagaattttggcagctgtgcagtacattcagctgcccaatctgggaaggccttcagctgagagcaggcagaatatctggcaggcacacaccacaccaaatgacatggaaatgcaatacaaaacttcagccaaaaatgatgccaaaacagccacccttagagatgaatgttaggcacccccactatgcagcatctgggagccccaaaagctttgaagaagtagcagttctgtcctccagaggaaaaattgtctacgtggagttattaactcccaagagtgtggagaggtggttcaggcaagagagttccgagatgggaagtgccagaaatgtgcaggtgaaagatgaaggaagtaaggggcctgggtttcactaatgcatggctttctactacctcctgtcagtttcactattcctaaaataaaaccttgctagaccaaattgaaaaaaatagattttttaaaaaatgaagtgagctaaaataacttccaaagtaaatcaagatattgg

SEQ ID NO: 586598 - DNA, 4001 bp, Homo sapiens
ttttaagactgcattcaagtttctaggaattcaccttgcacattcaatgttcaatgtttaggaatgaaaagctcaacatttctaccaaccagaagaaaatctatggaggagcatggacatatgtactgatacctctattccttcccatctccttacatgccctgtgaataacataagttaacattttataatgcttcttatgagagcaaaaaggggagtagagttacagcactcataaagtcttcctacaaaactgtgcaaagaaaacaccactatgtggaaacgtgtggactacagagcatgctcaacagaaaggccacagcactcccgagttactgacagaaaacaacctcttgaggattccaggccccaacctaaaagggcttcaataagcactaagccaacagaagatcaaagtgaagaagtaagcttaacattagttatcagccagatggaaagaatagcaaaattccacatcatcgagattagaaaacaaccgactggcttttcaatttactttagatcagaaaaaaaagtcggggaaaaaagtccttatcaaaggttaaccaaactaagtcattcacaattacaagagatctaagacccatactactcaaattcggcaaaaatgtacaactcagagggaagagggggaagatccctgttaattagttgcctcgataaaagaaaatatcattttggtcagtgcacagcgttgatagggtttcgtttctcaatgcctaaatgctgtgagcccgacgtacagattcaagtataaacaacacgtgaccagtcctgttgcctacgtcttcataaggctaattgacacagaagatagttcacacacacacccttttaaagttcattttgtattttgaattcttttcctattttcactggaaggggtcaccgtggtagcccgtgggatggacgctcctctaccttttgaggcaggtagagttcttagatagctaagcccaagggaaaaaaagatgttaactcaaaataaccgccccacaccaaactaagcgatttttctattccccggttgttcaatccgtagggagaaggaggtggtcgaattcaaggaagttaaagatttcacaaagtaaacacgtacacaattttccgtttcaaagggcagtttctgctttcttttttaagtcgatatagaccataacaggagctctgttcgtctagacctctcttggttagttcagatgtacgcggggggaatacagaaggaagggggtgtcctccttcggcccaccatgtcgcgaacacgtcgcgagtctttaagggaaacagctttacttcggtaagggcgggcgcgagccgaggccaaggcgccgcccgggagccccgcgggcgccgaggcgcccggtgccggggccggaaacgcccagctagcggcgtaccgggccgccccttccccgcggacctgcccggagctccgccgccctggggccgccgcggggtgcggagggcggcgccggccgcccgcgcccctcccccgcccgcggcggaagcgtctcgggtttgaaagatgccgcggccgccgcctcccacccgccgagccacaaagggccgagccccctcccgccacagccctcctccccggcccctccacaggtcgccgcgggctcccagcctgcccggcgctactgtcgcctgctcacccgcgtccctcggtccggaggtgtgggatccgctccagccggtggccccgtccacactgggcccctccggcgcggcggcgggggcgtggccctcccgccgcggcctcgcctggggtctcgcctccgcctccggccgaggaaggctggcgccgccgcctcttccttccggtttcccctcgcaccctccctcgcttggtccgtccagcgcggaaagcagcgtcctctgcgggcgccgccgcacgctcctcagggcccgaccaccgccagactcctcccccgggagccgcgccgcccgcccgcccgcgccgccttgtcagtccggggccgcgagacgccgggcccgccgcccccgccgcccccgcccccgcccccgccgcgcgctctcgcccccgcccgcggcccgggaacgcgcgcgcaatggaccgctggccagcctgccgcgcccgccctcgccacgccgccctcccgcctcgcgcgcgcgcgcgcctgtcggcaccagcggcagttttgcagtttcccgggtcctcgcgaccgtcccccgcccctcccttactctagctgcccccgcccttttcctctgccggatgccaccggaaagccaaaacaattggggccgcgcaggcgcgaaagaggaaacggaaagagcaggaagggcgggggcggcgcgaggtgacgggaagcgtaattgaagggggttcccgggaaaggtcatgggagagcccttgaggggcgcgtgcgcggcagaggggcactccgagtagccgcggcggccgaggccttgggcctagacgggcggatggagaggcccgacaagttcattgctaggaaatctagagagcaaaacaccaattgttatgctgaaggaggtgttttatcccttggaatttcccctgaaatacagatttttgcaggctggctcggaaagtgggaatgagtaggactaaacaataccagaccgggggcaggagaaagttgaggaggcgttgggcgggtcgctttgttgccgcagcacctcttctccaaaccatgccctcctctctccagagccgcttcggcttttcccaaggccaaggaagaagtcagagcagcacccaaaagggcccgcagttgggggaggttaggggaaaagggagagagagacatctgggtgcggacggcagctccagcgtctgaagccttccgttgtgtgctgcaatgcggcggctgcacgcccccaaccccccgagttccaaaagagcgccttcagcgttgcttcgcaaagcgaagcgtttgtagcagcagctaatggctgtggcccgtactgttttagttaacttggcacagcttgctggcaggcaggctgtaaatttgctaggagctattcgtggatcaaaaaattgtcagaaatgcccacacagactccacctaccttcctaacttacagtcttggcacaagcccaatctagagaatatagatgactaattataatctgaaaggccatacagtacattactgaagggagcctcttcctgtaaactaggctagatcaactgaatgcacaccaagatgcgtgttatcaggaactactgataaaggattgttttactgtagaatctggaaactacattcaacaaatcttcattgagtttccagcatgctaccactgtacttagtctaattaagtagttaagtggtatgatatcaaacaagctatacaaaagattaaagtcatttaacacacacttgagcacctactttgtgccagattgggtatgagagatgcggtctaaacatgcagacaacaacaacaaatgatacctgcggcaaggagttcgtgattcatcctgtgggcaacaaaaagccacttaagatttttaagcaggagaatatcttgataagattttagagaaaaaattctaaagcatgatagatagcagactggaagcagggatactagttaggacgctgttaatgcagtccagacatgagttggagagaaagtccaaactaacagtgtcagtgagaatggagaagcagagatacatttgaaaactagccagctatgataaataagacttgattacctagaggatgaggggaaataagaaatcaaggataactgagttttttagttagggtgattagatggtgttatcagtgactataagaggagtaatgaattgtgaggatgaaagagaggactaaagttgtccttttaatggctgtacagttaggaatgcatttgggcccacatttttttcgaaaagattccattataatagcttaaacaagacctcaaatctacaggtaggcagttacctttgttggttcaatagctcaag

SEQ ID NO: 586599 - DNA, 4001 bp, Homo sapiens
ctgcgtagaacataactgtagcgaagatgatgatagccatggtgagcgagaaaagcaagaagcccaattctgaggcacaactcttcagtgtgtaccccaggatgcgcaggccttgagagtggcgggaaaacttaaagatcctgaagacccggaagactcggagtgtgacaaaggctccgctgacgtcctcattgtctgtcatcaccagcccaatgtaataaggcaggatggccaccacgtcgatgatactcatgacactacgcacaaaacggtaacgactaggcgctgcagccaggcgaagcaaatactcaactgtgaagatcatgacgcaggccgtgtccaagcagaagaaggccacagcataccgctctccacagggcagttctttaatgtgacctgggcttgatccgcacggcactgtttccaccacattcgcgatgacagagacggcaatgaaaaaccccgtgacatagtagaacaccagggccatcgtgctggtgtgggggttctcgaaggccctccagaccctctgccttgcagtcatggtgggcaaggcgctctccccagcggtgtcggtatccgcgtcgtcctgcaggcgctcggcgttctctcgcctgcgatccttgtactcctcataacagcagtcgccgatgatttccgggatgaggccaaagaaggccagttcttcatcgtaagcagagatgcactcgtggcgaggatagtggagcttcccagtgcggtagaaattcaggatgtggcggaagatgtctgggtcacggtcaaagaaatactgctgagtttctgggtggtagaaaaagtccctctcagaactgcccagtagagtgtctgggtaacgttccagggtgtcctgccacgtctggaagcgggtgccactcacattcagcacaatgagagcatcttgggtccttttcctctcctgcctcgggggagccggcataggccccgaggccacaggcatccacccgatagccgctgcccttgcaaaaggcagccacgctgccacccccgccgccatgattacttgaagcggaaggaagaagggtaacgaggcgtctacaatgggtcaccgaagcagccaaaagtcacccacttcctccagtcaagcaaagtactagtgagaaacgtggtccagaggtgtaactcttattccaagatagggctcctggtaaagtcacagttctcagaagggcaactttccctccaagacaggtatttggaataatggcaacaaaatacaacgtcctaacaatcaccctcaacagaacccagccaaatctcttcctgcaggtgggctaggccaccctctggcacaaataagcacacaggtgcagccgtttcttcaaacaggtgtttttgatttctccccggcacagtctggataatatagggtcagtatgtggagtgtaggatagagaagacgaacgagagtcacccaatagaattctttcgacgaattagggaacccttacacctacccttctcactctttcaaaccttcctttccaagtagcccttcccgccaaaggagtctcaaaaaggcgacctgttgttgtagctcaggagatgcggtcacagccgctgccccacgtctctctttgggggtccagctgctgctgcctctactcctcgggctgtatttgcagagatggaggtgatgtgcagtggttacggtggggggcgttaatagagattctcctcccccacgtctacaaacaccctctgtgtctgccaaaagcgttcgcccaatcgccccttcactctcttttcaagttcagctcaggtgcagtgtgacagttacagagctcaggagctggcagccgccgccgccgtggcggcagcagcatctgcttccgcgcagaacgcgccgctcccgcggtacatacctggccaagtgcgcgccggggcttagttgcatagagactttctcctcgccgtgcacccggaaagggaagaggagagaaagcagctcgcgagcagccgaatccgatgcgccgagagagcataaataaagctcaagcgagctcttctttcccttcccccatccctccgtgcctccctcctccttttcaccttccaaaagccaggcgcaggcgagcagagcagcagcaacaagttcaaaaggtgcgggggaggcgagaacggaggggactcgctcctgccaacttactgcggggccactgtcgcgggagcctggccagcgcggtgcggggctgcggggcggcggggctgcggggcggccgggcgggcggcgttggcgcggtggggccggggccggggccggcacgggctctcgtccgagcgcggaggcagaaggcgctcggcagcgcgggggcgcgggagggctgctagctgcttccccgccagtgggtggtcctgcatctccccgggctccccgcgctgctctgctagtgcgatcaataaataaggagaaaataaataaataaccgcgcgcacgccccgccacgcaggttaggaaaggcgtctcctgcctttccctcggcttgacctttctccgcccccgccccctcgggctcctctcgctccaccccagccacccaccaaccccggcgcaaaatgtcaccgagggagagcatccaggtggatctgctggggagaaaagcgagcctcggatgaacaaagggaagcttcacgtgctgggctgcggtggtttggtggaggagaggagaaaggggacccgtgccttgcttctgcctctcgagtcccggttcaaggcgagcgtgggaaaatggggggaaagagagcgagagaagctgggaaggagggtgagcggagcggaatgcgcaggaattggttgtcttctgggggcgactggaaggcaagacccgcaaagctccgacgcggaatttttaagtgcatttcctctttctgtttttatttattttcaaaaccagattgttaacgttgcagggattgatatgccatctgtccaacttgccaaaaaatcagagactctcctcgatcgaggtcttgacacaactccttttcccgtcctttacgaataacagggatgtggagcccttttctaaatgtcatcgtcaaggggcgtgcgtctctgaaagtttgcgtccccttcatcctctctgcgcatcactgcgcatatttaaaatagttaaaagagttaaaggtgttcgtatgaggggttactgaggtagagagacacaggaaaattgtcgctaccaacctttttgtttttcgcgtaccccgcccccgagtcattaggaatcatccttaaaaccaaacgtaacacatacaagccactagatggcgtggatggcgagaagttaaatctgcacctaaggtttggatgctttaggaaggtgaaggatcaaaattaactggtccaacagagagtcagatcacataaacatccccaaaccccttcgctgccacccaccttttttgtgtttatgtgacatatactacttaggcttgagtctgcatttggatagttgtgggatgagatgtggagagtttccttttgaaattcctttgaaaattaaatctagattactgaatcatcatcatcatagtaattaagatctttggcaataatgaggcttcatctgtattgatgaagaatagtagcctaatttctacctaaaaattacttttcatggcttggtttgactgcccttggtttgtaaaataagtggactgtgtgttgtactttacggaaattgacttttaagccctagagattacaggcatgatgtgtcaaccttgaaaatttgaaatgggatacgtcaaagaaaatatataaactaaaaaatgagtatagaaaataaccagagaatttaaaatatccttatcatgtacaggattttctgtagagataaaagggtattttttgtttgtttatttgtttacagaatagagatttaaggaatcctgtgtcagtagtaatgaagtcagagctaatgcaccatttaagtttgaggacaaggaactgaagacacctg

SEQ ID NO: 586600 - DNA, 4001 bp, Homo sapiens
ccccagaaagttgccttttggaactggttcatcttttggccagttcccaaggccccccagacctcccaggcagccatcaattccaggagtcagggtttcctgtcacctgaaaagaccccctaactcggcctccagctctgccacagtccaaggcagtccagaggcccagccacacaccccagcttcatagaagaaaaaccaccccttgtcctctctcccaggctggggaaagaagagcaagtttcttcgaaggcatgccccaccccaccacacacccttcactgagatcctggaatacagggatgggacagaaagcctgcccctcctccacagacctggaacctgagacccaaagagggaagagtcactcaaggtcacatggcagtcagtggcaaaggtagggctagaatccagcacccccccccacatccatcccagcctcctcgtaggcccgcccacagcctccccctgggcccacccccacctctcagggaggccctcaaccagtgtcattgtctccaccccctcaggatcatcttgttcctccgcttcacacaatactgaccatcggactgacccctccttcccccaaccaccgttacaagcacgcgttgtcctgtgctcacagggtcatggacaaggaatgtcatcctctcccaactcccagggcccttggcagtcacacccactgtggctcatgcagccttagggacaggcacatgaatgctgcccacccccaggacatttgcctaatctgggacccttctagaagcctccctaccaggcaggcattaggggtgctgtactcccggtccccataagggaattaggtgacagtctccagggcaagaaaacccacaacttgggggtaccacagggagctgcttaccctcaaagcccagctctagccccaggacaccctgtctccacagagcccacaagctcgcagccttgtcaaagacacctccccaccgcccatacagggtctaactcacgggtgacacatgggctcagggttatatacacacggcacacacaagaagagattatgagctgaccctgcatccacggcttttcagtccctccggcacaacacagtcaagatctggcaagaccagtgtgcgcgctggactctcgggatcccagggtttgggtcgtacacactcttatgcccttgcacacagccccatccacgtccacgcacccagagttggggacacctgcacactccatcccacatcccttccctgcacactcagcgtgtcacacacactccgatcccaaaagcctgagctgagtttcccgccccaagccccaaccccaaaccctttggcccggtgcccacggccccggtgcaccaagccttgcccccgccgtcccctcgccaaagcctggggcccaccaggccccattgactcgcacttgccgacgcacacggcccgggcacgcccccccatccacactcggaagagctcggcccgcccccagagccccctccccgctcagccccctcccccactcactctggccctcaaacttgcggatgatggtgtccaggaaggtgttctgcggcgcgacgtggcccctccgcaccggcatcctgagcccatgggcgggccgggcgggcccccacccaccccggcccggcccggcccagcactaggcttcgggtggcccggccgggccgtggtccccgcaccccgcggccaagccgagcacgggcgcggccaagactggactgcgggcgccgggtcctcgctcggctcccggctccccgctccggaccccgggcccggcctggagccgcctgagcgcgagccgcccgccgccggcacacctgtctgccggcccccgccgagccgcggggcccgctccgccgcgtccccgcgctgcgctccgcccgcccgagccccggactcctggctcccgcctgccaccgcgccgacagccgctccagcgcccgcggctcgggcagcgcctgcggctcggcccggccgcggaagggttaatgcggcgcgcgcccctccggctccggcccccgcctcccggccccctcccgcctgccgcgcgcccgcagcaccgccctctcccccccccatcccgccccaccgcgcgcgcccgaccttcccattggctgagccgcgccgagtgctcccccaacgccagcccctcgctctgccaaggagcccctgggactcgcgcgcccagaagagggggaagggacccttaggcaggggaaaccgtgaggacaggtgccatggccggcttgtaggcggccgggatgggggaagggattccacccccaccccagattagcgactaagaaacctgatttgaagggaaacggcgggtccttatgccctggttccccaccacgccgagcactggcttggtatacacagcacgcgctcagtgcctactgtgggtgaccggggcaacgcctggaccctcgaagacgagcccggagtcaagggagaccctggaaataggaaaagcaagacaatctgaaggccccagagcagcagagctctgaaataagggagggttaaacttagaaggggcacgccccctgccccaacacacacacacacacacacacacacacacacacacacatacacacacacacacacacacacacacacacacacatacacacacacacacggagagagagagagccctctgtggggctctgcataggagctgcacagagagggacattctgacagcagttgcggcctcctagctgcaggatcaaagagaggtccctgagcgcgaggttccaaccaggggatccccgggtgcgagcggcccgccctcccccggcagcccggggccagccttgcacgcccaatcggcgggctcggggccctgcggcggcggccacggcccagcccctcggaaagccctggcctagccgcaggcccctccccccggccagctggctcgctccagctgcggctcccttatttaggcaaggaggcctagggatgctcaagggcaggcggggtgtctgccccgccgcctgctcatcgcctgcttgcgtctgagtgagggtctccgggcgcggtgtcctcggacttagcagtcaggcagggccccgggaaggccagggcggggaggcgagtgttgacagctgagtgggcgggcggggagggaggagtcgcagctgaacagccgagggtcccctccctgcagccggatcagagacctgtctagatggatggggccatgtgggggctcctgagggcttgcagctgcctctgtccttggagcaggggctgggtcttgtcaccagcgagaaccatcatggggggaggggaagaacaaagggcagggaaggaatcggagtcccgaaggaggaaggcgcagaaaactgtcgtcgtgagaccaccctacccggactctcaccttccacccaggagcacaaagatgcaaacactggggccaaatggggccactggccagcagatgacactcttttttatttgctggtgggtgggcagtgactcagggaggcagccagtgggagagaaggaggtggctccacagctgatgctaaaaaagtccagaggctcttgcctgtgcagttattcctcaggccctctccactgccagcagtttcctcactcacccccccgggggcccagggccttccacagcacaagctcctccttggtgtagcatttggcatcaggtgcatcaacacatctgggttccgggtagaacctagtccacgactggcccagcccccgccacgccccaaggccacccctggctgctgggttgcctaccatgaatccaggatgattcatgtgtgagtgaagtgtcctcctgtccaggccaggggatggagagaaagtgagcaaaggccagcagctgagaatgggcatgggagggcaagaagggaaagggacatctgtagcctccccctctctccagaccaagggagagggagagccaggccctgaagggaaggagccactcatctgagctgg

SEQ ID NO: 586601 - DNA, 4001 bp, Homo sapiens
aaggccttgcccagcccccatgaattccagaggtgctggccctgctcccagaagcactgactcccaggcccccacaccctcaggcttttgggttggggaggccatagttgatgagtcccaaagactccccttcatactcaagctgggcttgcccaagacaccttcacagatggcgctgctgggagaacatctccttagaggaaataactagaagtcaagacgggtcatagtcaaagatttgaccaccctggggtggacacagggcctccagcggtaccagatgggctgcgggagcagctgaggcctagggcagggagggaacacatggacaggctcacaggctccatttctgctctgtctgctgtctaagtgcccagctccttaaggcagagagcaaatgcccatgggtgggtggcccttcagtgatcaagtggggactgaaaaaaaaaaaagaaaacactggccaggcccctgctgataagggggcagaagaaggtagctgcccctggacagggctcttctctgtgcctgagaggtcaagcctctgggcggaggtgtcaggaccacccctaacagcagtgaccctacccctgagtctgcacacagcatgagcaacactgccccagggtacaaactcacacgtgcatggggcacacctgacaggggccagtcccagctctgcagccaccagctcacctatggccttgggccaggtctgtccccccagcctgttgtcctatagaatactgaagctggcttgcttaagccaaaccctgactcctcagctgtgggtgggaagacctacctgtacctgtcccccagctggaaagagtgtatgagccaaggcagaatgtgcagatgtggggtggtgggggcagggatgggattcccagacttagccctgagccacctcccactcctcctccactgtcggcccaagcctgccccaggctgacagaagagcggctggatggctcccaggaggtcacagagtagtgcatggcccagccaccacacctcggctgcccatgaagagatgagccaggtgcctcagcccagcgcgccctcaccacccacacagtggcttccgcacattccagcctcctcgaccccccaaaacagcacaagcctcctttgcccacagggtccaaccccagcacacagagcaaaggagccccggcgcctccatgccaggcccagctgtcgcctgccggcttctcctggtcctgcccatgggctcctttgtcccactccgcctccccaccatctctctgggcacccatctcattcctgtcatctccccactttgcattttgagctccaggactgtgggccatggcaggcacaggagcggggaagtcccagcaacggaaactctgtaagcccagcctgggagggaatgagaacaggagccaggcgcgggtgagcagggccaggccccacggctcccaaagcttcctacttcccagcagccctctccccagcctggagtcagagcccttgggccagccacctgcctcagtgtgccggccccagaaagaagaggaaggaccgggtgtcacctacctcctgggccacgaggctggagatgcgcacggcccgcctcacccggcctttctgggccctgggccgcagagcccctgtcctgctcgccttcccggctggggccgccatggaggacttggctccctgcagcctgcctgccctggggcctgagggcccggccactgcctcacctgcaccccagcagcagtcccagcccaggctgcacccccgaggctggccgactggcaaccagagcagcccctggcatgaagccagggtggttgtggctgggccccagggctggggtcaccctggcagtaagcgtgggcagcagcctgcctggctcgagctgcccatggccccgtggcgtgggccctgctgccagggtgccgtgctctgcccgcccgccagcccagcagcggccgcactcggaacctcagctcctccagccggcccctccttctaccaggtccccacccccaccccgccacactaggctcccccgccccgccggtgcccagccagcggccccctcccccgcagcccgcccaggctcctgcagcggcgctcccgcagcctgagcccctccccctccgccagcagccgggcctgtcaccgcagattaatggtctccctgacacccccgcccagccggtccagtgctgagccagccagagtcagacagagacacccagagatggagagactgctagtgactggcaggaacacacacgcctgccgacacatacaggcgcacatgcacagacccaccgcaactcacgggcacatgcagcgggcacaggagcagggcagatgccaggggctcaggtgggaaccaagagagaagcaagggaggaggaagagaggggtaggtggccagataagggcctggggtgagggggaatgctctggagtcaaggccagtgggctggagacctggcagggacccagaaagccaggcggtgggagcagggccaggagcccgccgaggtagcagggcagctcccttacatgagccaacccaggcagctgctgtggaaggggcaggagggaacagcttgggacaggagtcctccacattatcccaggcttctcactcactgcagagatctgcactcctgacccacccacccccagcccccaaaggctaggataaggtgtcgggtggatgaagccatggaggggtcgcaggtcctcttgctgccaggaggaccccaaacccaggaggggacagaagaccaggctggctaatgcccccaaggctgaggggtcttctctggcccaggattcagggacctgacccttccatatctttgtacccaccacctccctatgagaagaaaacttgcttctcccatgctttagggacatagttgggcccctcgaggccatcctggccatccccacaggactgaggcccaccctctgcctggcacatcaccttggcctggaagaattaggaccctcctgtccttgacctctgtgaccccttctcatttgaagcctcccagttggcttggcccctagtacttccttcacacaccctgcagccagacctttcatgtccctcaggccgccttccccccttgctactggccctgtcatgtccccagcctcaactgccctgtcctcaccctgtgccccgaaggcacgcaccccatccacccgacctccgctctgccattcccagccctttaccagacctctccagtcccctctccaggacttctcagactgtcccctctccccccatcgcagctctggaatagattgccaaccccaaccctcaggtctgcctccctccaagaggccctcactggctagccccctccacccggctctggatcacagcccactcccaccccctctccaagctcctccaaggtgagaggagagcccggccgctgggcgcctacctgggtgaccttctcagtgacattgtgggttcgctcctttatcttaggtgctatgatctcacggtcactggtgggcgaagccaagaaggggtcgcccttgaggtccacaaagttgagggtgatttggggaatcttgctaatggtgcggtagcgcacgaggtcggagtccgaggtggagttgagcaagccgctgcgcagtgggtgcatggcccctaggtggagaggcagcgtggtcaggccagcagcccagggccccaggccaggcaggccacccatagatcgagagtggagaccaggccctgcacagtcaggagtccatggggtcagctcaagagaccaggggagtcacaagaaacaagagaggtcagacccctgtcccactctaaggaagcagccaggagacagccctgagaccaggaagaggaagaggaaacggtctgctccaggacgctggcaggcagggggccaggtggtgttcggaggctgggcacgtctcctgcccagggcatccctgctccaggccgtcccgggacagccagc

SEQ ID NO: 586602 - DNA, 4001 bp, Homo sapiens
ccagcacaggctgaaacgcaggggaaggccacagacatgcgccaggtggagctgctttcaggggtctggggtctggctgagagtcttttcagggagaacatgagcagcccccatcccctgactctctgcacctgtcagaaaggccacaacttttggagaatgtgctcagggaaggacaactgctcccgcccccaaccctgagcacggttttccaggcttgtgacaggggttcctgggggctcccacattgggtggggtgggcttcaaaagtgggacttggctgcattttctgaagggtgtgagaaatgtgctggcaaggcccctgctaactttgaacacaccagatccagtgaagacagcctgtccctgcttctagaagacactatgtccaggaaagagggacggggcacctctgagctctggcctggggttaggggcggccactttcaccttttcactttgatccttctcctgcagcccagaaagtaaaggcaggaggggaagaggcagacataggtccctcctccaggcagggatgggcagggaagttgagggtctggagcggaggcaataggaacagagagaggaggagggagagggatgggtctttcccaccatggcagctcattagtgaggccaggcctggagtggcttaaaagggtttctcacagacactaggcctgtgagacaggggaacaatgtcacccactgtcaccatcaaaggcagaggggattctaggctaaaattgaacttgctttgtcccaagttccctggcttggttaatgccatcacacatacccagttacttaagccagaaagctggggctcagctcccctattttgttgcctgagttgtcccctaatacatcccccccttctcctctctccaccatctccattcagaaggctgaagacaaagcgtccctgcctccatctgtgccccttctctccactcgacctttctgaatcacacagccgaagtctcccaggagcaagtcccgctgggatggatcacaagcaccgcccacctttccagccccgctacttctggcttatatcagggattctaactcagttcccgcaccctgggcgaatactggccctcaaaccccaggtgccctttcccatctccgtccctctactggggatcctgtcacccggaatggcacccggtctcagtccttcccaagcacacagagggcggccacgatgggcgtctcagcatctgaaaccttctacccaatctagactcccgtggggcctcatcctgctgcccagggcccctcctcccaggccactcctccagttctgcttaagtaggcaggcaggatatgggagcccgggagaagctgaatcctctgggacccctaggtgaagctagggccagcctcgcctggagagacctgcagaaagagctccgagtggcacaaacttggctggtccccaaggaattgtcccgggttcccctcttagcctcccctggccccgtgccggcaccgagccctccattcccgcctgtcctgctccggggagggccagacacagatgcaaagtcagcttccacagcgggccccttttctccccctccttcgtcaagacaaataattaacttcagactcccagatgccagggcagccgcactctctcccgccgccggctgcaggaaccgcccccctctcctgaaccccctgctttggccgtggtcttccccaccctgctcgctcccccgacggggaggacggagctggccagggaggcgcgcgaacctcaggcagggctaagagcagagcccccagcccctctcggccccctcaggccgggctgataggagggagggggcgcacctggccggaccccaagcctcccgcacctggactcaccttccgcgcccgcggccagcgccagggccccgaggtgcaggagaagggacagcgcagcggccccgaccccggccatgctagctccgcctcgctcggctcgccgtctgtcgtcgcggctcagcaggcgctggggaaggcggggtggggacacacaggccgctcccacccaggctttgttcagggagggctcaaaccccccaccgcgcgcgcctttcccatgcacacctccacccgccccgggcccggccggtcctgaccccagagagcagctccagctcgcaggaagcccaacgggggtgtaggccttgtctccgcttaagatccaggaggagaccctgaaaagaaaataaacccaagtccacccctctcgggatcctagagagtctccctgcccttttaggttactccatcgccctagggtttccagatcgatttttcctctctctcacaagtttacagaagaagcagactgagctgggtttagatccctgctcagccaattccatgtggccttagaccactaacttctctgtgcctcaatttccctatctgtaaactggggatcaccacatctactttatagacttgcagtgagcattaagtgagattatataagtaaagaatttagagtcggtagagagatggtaaatgctcagtaaataacaaataataataataagaactcctgatctctgaaatcatggacacgaccagtgttttcctctctcccctataagtttctttcctgaactccactcaacacccctacccaccccagcagtcccaggcttggccccaaatgccaaggccgcccttcactggctggtctcagccccatttcccactcctgagctcaggcctggctgtggggtgagcctgggtagggggcagggctgggccctgggctcagcaggcagagggggccaaagggaggaagtgaggacagccgtccctgtgggcccacaggctgggaaactcctccttgaagctgggaagcagagggttgggtctcacaggcgaagctcacaggcaaaaaggaacattgagggcggagctgtgaacccttccaaagctctccctccctgtcataaagaccagaagtcggaagccacccctccccctagaccaggcagggactgaggtctccccagcccactctccaccaagcttaaagcttcagtaaggagacggcagcttctctgccccagagtctgggcccatagtggacctgagcctttgccacagggggcagggaggctgcaatgccacgctaagacctggcctcagtgcctggagctgaggtcacagaggaaagccagggccagccagccagaagaggaacaaggaagcggcagcactattcctggcaggtttaaggaaggtggctttcattgaccgggtgcctctggaaagcaagtcctctgaggggctgggtagtgggacggttcagagcacagattctggcagggttgccagggcgcatcctggagctcttgctttctgctctggggcctctggctggtcacttcacttttggtggctgatttttctgaactgtgactggagctctaacagcacccacctcatggagtgtttgtaaggattagtaatgcatggtgcttggcacagaggtatgagcaatttttacttcccttatgaagaatgggggcacctccatccccattttacagaaagaatcagagagaatcagggtgagcagctctaaaccacactgggaggatgcacagggcttccctcgccccacagtccccttccagtcccttgtgtcttagcctctgccactgagcctggccccagtcggccctcatatcacattcccagggagggacactgtcctgacacagaaaaggtcctccaacccctggggtgcggtggggtggggaggctgggccttcacttcacccccaaggcaggtgtttgtagtgtctgattctgtgtgtgtgtgtctgggtgtggcacatttgtgtgtgtgtgtgtgtgtatgtaatgtgtgtttggctggaggtgggggctgaggctggggaggcacttttgggactcaagggaccttgactttgaaggggcttccagggacactttcgtcaccccacttgacgata

SEQ ID NO: 586603 - DNA, 4001 bp, Homo sapiens
ttgaagcagagaggacaaaagccatcggaaacagttttggagctcacatggggcaatgtcatcagtggggggaactggtggtggggccctggtctgcaatctgtggtcttgtgctctttccctcaaaccatatcattttcccaatgacagtgcacaaaaaaatagcaccactgtgactaatgacttttttccaattgcagagattacttctagatttttgctcattttcccatggcattgtgtgtatggggcttgcaatcccagcacaacactatctgcttcccaagagcatcacctagcccagcctgttgagggcctcaattgttgagggcctccattgtcctgggactccgcataccacatgctcctggatctggcactaccttagtccctgcctcctagaagccatcttcggtgtccagtaatgcttcaccttccctcctctttattttttatttgtagagatggagtctgtgttgcccaagctggtcccagactcctggcctcaaaccatcctcctgccttgacctcccaaagtgctgggattacaagtgtaagccaccacacctggcatcgtttcccttctcttgctttttttgtttttgtttgtttgtaggtacggtcttactctatcacacccaggctggagtacagtggcacaattacagctcactgcagcctcaacctccagggctcaagcaatcctcccaactcaccttcctgagcacctgggactacaggcacacaccaccaagcctggctaattttcatttttgtagaggcagggtctcactgttgccctgactagtctctaactgctgggatcaagcaatcctcccacctcagcatcccaaactgctgagattacagatgtgagccaccatgcctggtatcttctcccgtctcttgagtgtcatttcaggtgttgacatgatagtatcacacacattaagtaagacccgtggaagcccctgtgcaccagagcacagcagcctgtgagtgaaagccatgggatgccaggtgaccgtgcctacatctatgaactggcctgccccttatgtgcagacagctccttgccttgttccttaggtagctggagactaggtgtgggcaaccactacagcatcctgttggattctctagaagacatctttttcttttcttttttttattcatccaacccaaaatgcctttgtttttccagtcgtagtagggacggggcctcgctatgttgcccaggctggcctccaactcctgccctcaagcgatcctccctcccaatgtgttgggattacaggctcgagctacggtgcctggtcagacacaccatcagctctcggggctccagggtccccctcccacggcccaccctccctcctgtcttcggtaaaagtgggacatggcgatgggagtaaatcaccccagtgactactgggcggagggtgtagggggtggggaagcacacctagtgggtgtaattgacaggggttgaaggtgggtgggtaggggtgcaggtgggcgggggagttgcaggtgggcgggggaggggcgcaagtccgcgggccccgcccccaaccccggccccgcccacccgccgaggaccgctatgccccgcgcccgcttctcccccgcgcccctccccacgccccgcggcccgccgcccgcccgggtacctcctgtggcagcaggggcagcgcgtgccccgcctgcgtggccgtcggcgtggccggctccagaaagtcgtcttcggcgtcagagctggacatggcaccgtcctgacgacggctgtctggctcccgccccgtgactaccaccatccctctggctctgggcagtgggcgcggcttcgggcgggcggaggcggcggccccgggcactccctaccgccgagcagcgcctggcatgacgcggccggctgcgggctggccggaggggggcgagaggcagtgcgcaggcgggagggcggtggctccctcaacgccgacccgctcgcgcccagctggggcctgacccgaccgcctcccgctactggccgacgccgcgctggttccgccctgattggcaggaagctcgcccagtcgaagagcaggcagcgccagcggccggcgcctgagtggtccctgggttggggggggggggggggggcggcctgcgagcctgccgtgcactgattggtcctctggccagcgggcgcgccctctccgagagacccggcggtggtgcgccgctacgctctcataactgggcgtcggagtctgccgtgaagagggttctcacccgcgtcagggtagacgccttatcccttcacacagggggtcacgacttactcgtgtgtctggccccagagcagcgggtccttgtctcctcaatggaaggcctgagcagcctttcctggaggatgtggcgggaggagggctgaggtggctgcggacacgccaccgcggctggccccgccccgagccgcagggcaccgcccgggtgtccagttcttcctcactcgctcgcgcagaaatccgaacgagaaaacccaaaataggagcgcttgagttcaatgaataatgacagtgactccccaccgtgaccgtttttccaccgggacacacagatggagacaggcccttccccaagatgctcccggctccctgggaggcggagtccagccctagaggctctatcagcgcagggagtctcctgggggtcaaggttcttagcccgttcaagccattttctcctttctttaaaagacaaagtctcactctgttacccaggctgaagtgcagtggcgcaatcatagctcattgcaacccctgggctcaagcaatcctcccgccccagcctcccgagtagctgggaccacagacgcgcaccaccacactcagctgattttttaaaattttggccgggcgcagtggctcacgcctgtaatcctggctctttggtaagcgatgcgggtggatcacctgaggtcaggaagttgagaccagcctggccaacatggtgaaacctcatctctactaaaaatacaaaattagccaggcatggtggcacacctgcaatcccagctactagggaggctgaggcaggagaatcgcttgaacccaggagatggagattgcagtgaggcgagatcacggccactatactccaacctgggcaacaagagcgaaactccgtctcaaaaaagaaaaaaaaatttttttttttttttttttttaagaaatggggtcttgtcatgttgcccaggctggtctcaaactccttgcctcaagctgtcctccctcgtcagcctcccaaagtgctgggatcgcaggcgtgtgcaaccatgcttctccttttcaaaccgttttcacacccagttcctcatctcattctcacagtgtagtgacagaaaagaaaactgagtcgtagattagacagctccaggatggcaaagatgagctggtggcatagcacttcctctgttagaccatcgcactcccagctgcaggagtgtcctaggtctgtgttttctccaacttcagttgcatcaaaatccctggagggagaccttgtttaaacacagatgaaaaggaatgaaatcacgtcatctgcagcaacgtggatggacgtcattatgttaagtgaaataagccaggcacagaaagacataaatattgcatgttcttatctgtggcagctaaaacaaatcgatctcataaatttagagagtagaaagaaaccagaggctgggaacggttgggtgagaaatgaagagatttaggttaatgaaggacatacagttagataaaaaggtttatgttctatggttcaaaagcagagtagtgactataattaacaacaatggattgtatatttcaaaatagctggaagacactttgggaagccaaggcgggaggataccttgagcccaggaggtcaagaccagcctggacaacgtagttagaccctgcctctacaaaaaataaaatatatatatagctgagtgtggtggctcacatctg

SEQ ID NO: 586604 - DNA, 4001 bp, Homo sapiens
gaactcctgacctcaggtgatccacctgcctcggcctcccaaagtgctgtgattacaggcatgagccatcgcggccggccctcctaaggttattttaatgactacctgggataagccatataaagcactcggctgactacttgatatacagcaagtgcctaaacatcacttacccaaactgcagcagttatttgctgtcactggaaatcatacagttgaacctctcagaactatgtatcaactgagagataacctccaagtcaaacacactggcacatggactttgtaacacccatcttaactgttcaaaggtctttttggttttgcttacttcccggatctcagttatgttccaaggagacaggcgaggcctgcagacagcagattcagagatgtaagtgtgactttagacgccaaaatttttagaaataaatcaggtaaatagagtctctgcacccagataattcaggatcatcttttactgcctctgaaaaaattaagttcttgagttcaacaaaaattattttgccgagcatcaaaaataagtttaagggatttttaagaaagttaaagcctgggcaacatggtgaaaccttgtgtctacaaaaaatagcaaaaaaaaaaaaaaaaaaaaaagttagccaggcatggtggtgcacgcatggagtcccagctattcaggagtctgaggcaggaggattacctgagccaggggaggtagaggctgcagtgagcagtgatcacacactgcactcaagcctgggtgacagagcgagaccctgcctccaaaaaaaaaaaaataagttaaaaactctcaattattatacctttaaaattaacgaaatgtaaaagtccaaaactattatctgggaaagactcgtttcactgccgcctagcagtgcctgcatgaaatctgtactcttgatcagggaaccagccagctcactggtgacgtggagcaacgaattgcaggagcccataggaggcctcggcggtccccgggcgccgcagttttaagagaacccattattagatggaggcacttaaaaaccagatcgtttcccaaagcagcattaattacgccaagaaaatcactgacgacctctcggcaagcccctccccagcggtgtgatcctggacccaagggcttgggtgatgcccacacaacacttaaggacaggtctgacccgaccccactacaccacacctagagcccggtcttgcacgggcagggtggggagccgagtgacctctcccggcgcccgccccacctcccgagctggctgggctgccacgtcaggcgcagccggccacgatcctgcccatcctcctcccgcccgtcccattgattcgcgggtttcctgcaaccccgggacccccacgggagatcccggccggagaagcgcccccattcaagcccagagaggggccacgcctgtcggaccccccgtcccacgccaacttttcagacacagcagggccccgcgcagccgggtgcgctccgacagctcaagttcacgcggggaccgactgcagagcggggtcccgcgctgcgacacccggcccggagcccaccccgagggcccgcaggccgctgccccccgggtccgggcacccgttaggccggccgagggggtgtgtcgggccggcgcaggccccgcgagccgtggggtggccgaggtcggcgggtcctcggcgagacccggcccccacgcccgagcctctccgggccttcccccgccgctcaccggcgcaggagcgcgtcttccagatcttcagcagcaggatgacgatggccgccaggtgggacaggtccccagtcagccggaaaatgttcatggcggcggcggcggtggcggtcggcgcagcgcggcggccccggggctgggcggctcaggaggcggcggcccctgagaggaagcggcgaagatggcgagatcgcccgcgacgtggccagggacgtggccgaactgccggcgcgcgcgcgcgcggggcaccctgggagagcggggccaggccccgccccttaaagggggcgcgccccagcgcaggctcagcaggtcagctcgcagggactcccttgcaagaagaccccggactctgccaaattttccctgccgggtttccggcttctcctcgggtgccagcagtttcctttacttttttgaaataacactccctggggatcttttctttcctcccacatatcaaaagagctctacaggcctattgtatgaaaaagtgtaagagaaggccgggtgcggtggctcatgcctgaaattctagcagtttgagaggccgaaacaggaggatcctttgagcctaggagttcgagaccagcctgggcaacctaatgagagttcctccaccccccgtctctacaaaaattttttaaaaaattagccaggcctgatggtgggtgcctgtagtaccagctattttaaaggctaaggcaggaggattgcttgagcccaggacatcgaggctgcggtgaaccatgattgtaccactgtattccagcctggacgactgagtgagaccctgtctcaaacaaaacaaaacaaaacaaaacaaaaaaaagtacaagaggaaaaaaattgatttctgattgcctcactcaagataaggtcaacattgaaggtggaggtggaagatgcagtttatgtaggggtctgaagattttaccattctggggactgtctttaagaaagagaatccaaaattaggtagaaaagtgaacgtctgaccgggcgcggtggctcatccctgtaatcccagcacttaaggagtacgagacgggaggatcacgaggtcaagagatcgacagcatgctggccaacgtggtgaaaccccgtctctactgaaaatacaaaaattagccgggcgtggtggcacgcacctgtaatcccagctactcgggaggctgaggcagggagaatcgcttgaacctgggaggagaaggttgcagtgagctgagatggtgccactgcactccagcctggcgacagagcaagactccatctcaaaaaaaaaaaaaaaaaaaaaaaagaaaaaaaagaaacttgaatatttctacgggatggggacgtcacaagaaattgcaaacaaaaaaagctgacaaacaggatctgctacataatttgcgggacggagtgcaaaacaaaaacgcacagttcgcagttcaaaaagcagggcgggggcgaggacctggtgcggtggctcatgcctgtagtcccaacactttcggaggccgaggagggaggatcgcttaagctcaggagttcaaaaccagcctgggcaatatggcaagaccctgtctctgctaaaaatacaaaaaaaaaaaaaaaaagaaaaaaagaaagaaaaatagccaggcatggtgatgcgcacctgtgctcccagctactcaggaggctgaagtgggaggattgcttgggcccaggggccaaaggttgcattgagcggagattccaccactgcactccagcctaggcaacagagtgagaccctgtctcaaaaaaaaaaaaaaaaaaaaaaaaaaaaaaagctggccagctgccttggctcacgcctgtaatcccggcacttttggcaggtcaaggctcgcggatcaacaggttaagagatccagaacagctgggcgcggtggctcacacctgtaatcccagcactttgggaggctgaggcgggtagatcacgaggtcaggaaatcgagaccatcctggctagcacggtgaaaccccgtctccactaaaaatacaaaaaaaattagccgggcgttgtggcggacgcctgtagtcccagctactcctaaggctgaggcaggagaatggcgtgaacccgggaggcggagcttgcagtgagccgacatcgtgccactgcactccagcctgggctacaaagcgagactccgtctcaaaagaaaaaaaaaaaaaacaaaaacatcccgaccatcctggccaacatggtgaaactccatctctactaaaaatacaaaaatt

SEQ ID NO: 586605 - DNA, 4001 bp, Homo sapiens
cctcaaatttcaaaaaatagttctttgaaaaaaaataagcatttacataatcaccagggattctgattttattctatatagaacctaaatgttcggataatctttattctagttgcgtagaatatgttatggaaacaggatgtggaaatagaattggatatacaagactgctaaagattatacgaaacgaggacgctgcctttcttttaaagtgataatttactgtgtcttgttttctgttgtgagaatcggctagcctgaaaactgattaagtaaaactgtacttgaaaattaagtaaaacttaactacacctagcactaaacactgcaaagaacattgtgatttacatggttttctctccctggaccagtagagggagactaagacatctggcctggtcttgtagtgtttctgtaaaattggggagggggggagcggaggctgtatttaaatgtcctgctgtcaatcaaaagacacttcctacaatcacagtcaccatatctgctattactcgtgagcgtgctctcgccaagagacaacaccaaacggggcccgggaaaccggcttcaactaaaggtgaccgcaggctttgccacaacacccaaataaggactttgggagcccaaccccaactagtttctttgtttaaatgcctgtgaatccctcccacgccggagtcaagaggctgtggcgccgccctttattagcctcacactttgattacaaaacacacgagtcggcggcctggctgcggaggcggcccgagctctcaaacgtcaaacccggagcgcggcggcggctgaatcagagggcagcgtccgccgccgccgccagccggccccgcagcgtccgcccggccgactcaagttcgccggcaccggcgcccgggcacagccgcaggcggtcccggtgtcgccagcttcgagcgatggcaactgcactctttgtaaagtttaagccgcggcgcgagggcaacgcagggggtccggagaagcgttcccttcgggccgccgcaacccactccatctgccccagtcccggcgacccgggtgtgtgcgggggcccaggaccgcgacccgggtcaacctgccgcccgccgggggcccggccccaacttccccggcacctttcaagtccccgagagcgagtgcctcatctgttgctctgtttactccgcggagccccgccgagctggctggcgcggtcgcctctccggcccgccgctgcccccgtcccactggcccaggaagtttgataaagacggggaagggggcgcgacagggacccgcggcgcggaggagacgcggggccggggcgaccccatcgccgcccggaaggaaggcaggcgcgtcggccggccgggcagagcggcggggcggccggcgactccggccggagccccgggcgcggcggggcggggcggggcggcggcggcccgggctggcgaggggctgcggacccggccggcgctccgcccgacgcccccgccgcgcccgcccggccgcgtcccctcgccccaggctccccctgccaacttatccgccggccctctttgttcgtgtttgttgtggcgactcttcgcccgggccaggcgagcccaccggctcccctctggagcccgcccggcgaacccggggcaccgcgcgccccactgcccggccggggggctaggcaccggggccccctgaaagctgggcgcggcgcggcggcccggcccgagggaggcgcgggcggccggcggcggcggcggttggtcggtggccggcggtggcggctgcggggctggagggggtttatttacctgccgtggaaccagtccttgcagatatcgcactcgatcatgaagcggttcacgtcgtacggctgccggcacacacagtacacgggcgggggcggcggaggcgccgaggcccggccgggagccgccaccgacacggctgccgcggcggctccagctgctgctcccgcggccaccgccgccgccgctccggccatctttaaaaaacacacacacgctcgctcgctactccgctcgccgactggagcgagcgcagccgccagccagcgccgcctcctgcagcagccgcggcggcggcggcgcctcagtgcgcgcgcgcgaggccgcggcggctggcggagggggaggaggcgcgcgcgacgcgcgaggcccagactcggctgcttccggcgctcggcgcggggccgtgcgtctcgcgcacgtctctggcgccggcgcgcgctccccgctcctctccgcgacggccgggcggagggagctgttgaagggcacgcaggcggctgcgggggcggagggagctgaggccccgtgaggacacgcgcggtggtggcggtggcggcgggcgcgcggccgcagccggaggaggacggcgggagcgtgcgaggagctggctcggttatttcggagcgagagccgaggccgggggaagttcctgcggagtgctcaagggcagaagaggtgccgcgtcccgaagaggggaagcggagaagtttgctgctgcccgggtcgcctcgcgacgctgagagaatcgcccagccctccgcagccgcccagcgagaaccggagctgcggccccgcaccggcgtgagtccagctgagctgacacgccgagccggttgtgcctttccgagggaggaatgtgccgtggaatccaaactttggaaaacgtcccacccgaattcccagcgagcagcaaggagaccagagcgtcgatggagccaccgttagttgcgggagggctgtccccaagaggaattcatcactgtcgtccgctgggagggaccaaccttgaaatggggttggtggagagagggatagagaagagccggcgtgcttataaataacaaaacttagctatgaacccttccgattcccaagtggggaagatggggtaaaattctaagtgacttctcgctccgaagagggataccacaaaaagcggagcgcagggtacttggcgtataataagccatcaataatttatgggtgaaattgagagccaaatataagatgataaactgaagaataaaaacagctgacaaatactgtatagaaaagattgcgttggaatcataactgtggattggaagtgatgttaaggattattggattgagtatttgtagctgaatttctgctggcatttctatcagtggggaaagccctcacagctccataggtaatttttgttaggggaggaagaagtgttgttctgtcacccacccccaggcaaagagtcgctgatctaattctccatttctttctttctttcctttctttccttccttccttccttccttccttccttccttccttccttccttccctccctccctttcctttcctttcctttcctttctttcctttctttctttgaaacggagtttcgttcttgttgcccgcgctggagtgcagtgcagtgctgtgatctcggctcattgcaacttccacctcccgggttcgagggatcctcctgcctcagcctcccaagtagctgggattacaggcgcacgccaccgcacccgggtaattttgtatttttaatagagacggggtttcaccatgttggccaggctgtttgaactcctgacctcaagtgatccgcccgcctcggcctctcaaagtgctgggattacaggcgtgagccaccaagtcctgcctaatctcctttttatagttgaggaaagctagtaacttgactgaagtctcatatattagagctgtaactgaagtttttaagtgtctcaattctgcaactattcgtttttctatcacatcactgtttggcatatatatagcgggaaaaggaaaggctggaaattagttgaccacacactgattaagcttgaaacatatttctactggagaaaaaaaggtactgtaattttggcataggcatcacatattgctggagtggaaagacccatgcactcaggtcctgctttctataatctgtgacctcgggccagtcactccatttctcc

SEQ ID NO: 586606 - DNA, 4001 bp, Homo sapiens
tgttgacaaggagtcattgggagactgaggttttggaggttagagaatgagagtgatggacaaaagaattgaaatgcaggagatgctgaagagatgcttgtggaggaaaacaccatgcataggatagaaactgaacatttggaggaagcaacaaagatggagcttgctaaaagggacaagttggagagaatggagtaattatggatacatggagaagcaaagaagatggaaattagataaagaaaaaaatgcagaaagggaccaagagaaacggaagaagggtacccaaggcaaggcaacaggaaacagtgagagatgagcaaacccaggcagctcccgccatcctgcctcttttactcccccatcatctccaatcatccacccgtataatcccacctgggatggtgcaaatcagttgttccacaactacacagggtttggagcagtcatggtcattttaggcacagagtcacccacttgcacagagcatcttccaccctgctttcctcacccagtattctccgaagtcggtttttgttctttgtggcaagctcctgaaaagaattattggtctctttggcccttccacaggcaaagctgaagaagtcggtgcagggggccacacttgtgttcccagaggccaggtaatgatcccggagatccaaacacacagatgtctcacaggggcctgtggggaaaagctcagagctgggaaagaagaggcaaaaagacaagggctcccccaaggggctaggcaaagaacatcaggtgagtaactaagtggggagctgatgaaaaagaaatggttaggatgcagggaggaagaagaaccatggggaccccaagggtcagggtgggcagaagccccaggagcagggactgggcctgggccccagggctgggggagggctgactaggttagggggtctgggatcttgcttacgagggccacagttctggaagttgtagaacaaaagcacagaaaaacaaaggagcaggcccaaaatcaggatagctgtcagcacccgcctggccactgcccatggcctgctcccttccacgggcagcctctcttctggagtgctctgtgggaggaaccaagaggtgaaagatacaagatgggggttgagagacagggatgggaagaagaggagagagaatgaatctgttggtgctacagtccctttatacagaaataattatcccaattcttcctaaacccagccctactttaactcctgggagatgagaaaacaaggaatgtcaactgttttgggtgaggatgaagcagacagttagtagatgagtgtttgtgggattttagagccgagagtgacaacatcagtgtattccagacccaggagaggaggccacttacctcttggctccagagagttcccattccacctgcctggctgcgttccctcggctcttcctcactttggtccccaccttcctgaagtgagtggagggagaaggaggagagagaagctggttcaggaaatggtgcattgaagagagttttatcaggccattttgataccctcgctgcctgccctgcccccacacacatatttttatctcggagcagtgttcccagatgggcttcagaacgaacctgtcccctgaatgtgccatttctcgatccctctcccattacctccctctctccccacctttctactctgtaagccttacattccctcccctccagtgggggcaggacttttgcacacagccaccctcacccctccccgctaagcctctgactccaaaaggggacttaccatctgtctatcttctgtggctccagaatccttcctggttccactctaggagctgattcggaggactggggtccaggaaacaccccccgccccagttccttgatcctggagaaggggcacttctgctgctctttcgccttgtccccagacacacaggactggcctctgggtggagcctgcttatcagtggggggcacccaggcttctcctccccctttatctcagcttctcaggggagaagagggagggagtcttcactccccaagcaatcttgcccttggtctgctccttttgtcttgcactgtgactctgcccatgaagttcctttatttctaaaatattcttccttctctcatttcttctgtattaaaaaaaatatgaggcacagtaaaattttaaagagtttatttaagtaagaagcaattcatgaattggggagcaccagaccgacaaaggtttagtgttgcgatgacaaaatgtcagaggcaagcatttattgggaagttatagaagcaaaatgaaacattatttgcttagtttgcagttacataattgcattttttaggtaactttttggaaagtccctagtcacataatcatatgttagttggctgcttatcattggctggggttaagttttatttgttgtaagcatttatcagaaattgacccaagttaagtttaatttatgtttgtagttttagcaagaatatggctatttttaaggtctttggctttgtttgcctgggaatttttcaggcccagtctccattttaattttgttttcacacctctctgattggcttttctgggattcatcaattcccaggtcaaatgccacctttcccaggaggcctcccagctccatgcccattcacactgttcccaagcatgcttaattgtttctctcggtgtttcatagctctgctggctgctggcaaagtcatgcattcaaaagatcacccagctaggagaccctaatctgctaattattagctctgtgacaataaacaagccacttaaactctgaggcaggtaagcaagttttgtcatctggaaaatgagggtaatacttgcctatgcctacctcataggatctcatgccttctacaaaagaataaggctttactgagcccctctttctttcattctgctttctgttacactgatagcttgcctcttcatctccttagtgattgaaaactatgtcatagcatgtacagtgtctggttttcattcctgcccacccaagatgctttctaaatgttaatagaaatgaattgcattccaagccagaaatcctctttctcacatcatattaagcccttacctgtggtctgagagaggcaagcacatttctgggggaaggtgtttcaactctgtccttgtttcctcatcccaggaaaaaaataatgtaatttattaggttagtcttgcaaatgatcccctggcgatatttccagattccatcagcactgtgctagggccatggtgcacttgccaggatgagggtgggtgtggagaagtggagtaaagccattgtgccccctggggccagctggtcgggtatcatgaaagtcataaagaaaagtcagaacttcatacattagaaaagaaagcattgggaaaaataaggcttttgaggaaaggtgtggcaagatacaataatatctaagaaacgccggtgtggtattggggatctggactgattggataaaagacaagaaacagagtggttagtttggtgttgcaggagtgatgaagggagggcccggcccaaggggatggcagaggggagggaagtgcgtagaaagaaaaattgtatggaataaagtcatggcaatggattgaatggaggaggggtttatgatagagccacagaggagctccaagttgcatttctgcatgactaggggaatagtgatgccagcgaacaatggaattttgattaaggggggagtaggaatcagagtgaggggaaaaagctgactcaggattctagaggtgtttggtctgtgtgggtacaccctgatggtgcctcctcttcaaacttcccttccacagaaagtccaatactctccccatgggcttttagcttccttcacacatattcccttcctcactccttttctatcaatcaaagcccctgagctgatgtttccctaggaagatgataatggagaccacttagatttgataagagaaagttgaaga

SEQ ID NO: 586607 - DNA, 4001 bp, Homo sapiens
gttacacagataagtaaactaaaatacaaacaggctaaatcagaagttcttgtcctggtgtccatgaacttcacaaaatcctgttaaatagtttatgattaaatggtcatttttctaggtagagggtcagttttaacatatttccaaaggagtccatgactccccacaaaggttaaaaaaaaaaaaaacccatgggttaaccgatttggctaactgggtggagccctgaccccaagcaatatttcccttacctcttgccgtgatttcagtcacgtacaatttatcatacaaaaattcaaattaaaaatattagtaaattctttttgtaatgttgattgactgctaagatggacatattattaaacatattgaaaccactcagttgggaggaatagttctgttttgttcagctcatggacagtcactcttaacttttcagatgaacaaatcaagaactgtcatctttacctgcacagacttgttatagaagaaatgaatctgatacagaaattatgtaacctatcttacaatttggagtactctacaaagaataagcaggagacacagccttagctagtgtggaaaacgggtcatgagctgagaacagggttttcatttctttggaccagtttctttaacgttttcgggtgtcccttctctcggcagtaaaaggaaggattgaactagatagagggcttgtcagaattcctcccgctctaacactgtacacagttggatggaatttaaaataaaaaattgtgcatgaacgcttcacacagtctgttaattttagctttatttcattggcttagagtgtcggggacccaccggaactggcttttctgagggccaggcctgcagtcccccttttggggactaggagttgggtgtgacctaggaaacaaagctactgaaggccaacgggctagcagcacctgaaacacaagggctctttgtctggctctgtagcccaggctggaatgcagtggtgtgatctctgctcactgcaacctccacctcccgggtcccagttcaagcaattctcctgcctcagcctcccgagtagctgggattagaggcacgcgccaccatgcctatctaatttttttgtatttttagtagagacggggtttcaccatgttggcaaggctggtcttgaactcctgacctcgtgatctgcccgcctcggcctcccacagtgctgggattatgtcctgccaacacaagggctcttaatcctttttttttcttttttgaggcagggtctcactctgccgcccaggctggagtgcagtagtgagatcgcagctcactgcagccatgacctcctgggctcaagcgatcctccagcctcagcctccccaaatgctgggattataagcatgcgccactactcccggccttaatactttatttaggaatgaaggaaggcgggaacacccaaacgcggttggtgtgaagcaatcgccttaaagctgaggggaatgtgtggttgttgggggtggagccaggaacccgacgccgttggagagcaggaagcgccccgctgcccgcctccaccccgcggcgagggctgggagggggccgggaaggaggcggggccgcccctgggaaccacccggcccggcgcggccacgtgaccgagcgcaggggcggggagagggcgccccggctccgcccagcgcgcatgctcgcggctcggcgctgaaattcaaatttgaacggctgcagaggccgagtccgtcactggaagccgagaggagaggacagctggttgtgggagagttcccccgcctcagactcctggttttttccaggagacacactgagctgagactcacttttctcttcctgaatttgaaccaccgtttccatcgtctcgtagtccgacgcctggggcgatggatccgtttacggaggtgagtgagtttgcgggtgcagccagccatgacccaccgctctaggcccccacccaccttcctctgtcaacctctgggcgaacccccaccgggcggagggcgcgtgtgtgcgcgcgtgcgcagtgtgtgcgggccggggtcgccgcggctgcggcctgctgtggttggtgggttcctctgagattttgttgtttcggtcctacagataaaactcagggaggaaggctttgagtctgtcctaaaaggctgttgcgagaggtctttcagcccccgtttttaccatgtccctctgcagtcctggcgcagcaagagtgaggcgcaggcctgcggaacgggtcctgctggaagcagctggaatgccctgcagggcggggtccggggccggtgactcagtgcggctgccgccgggaaaggcagtaggatgtgtgatttgcggagttcacgcagcccgcaggggagatgctaatgaaatgacagcaaaacgttaaaataagcaggtgctagaaaccactgcattcgttcataaaaagccagtagttccttgagatcccattgttcagctaactaacgaagaagttcatacccgggactgaccattttaattgaaacaatgcaagtgtaccgagcaaaactatcagctcacgattttagagcaaagaaataaacttttcggtgtttctggggcatatcattacagtacttatttcatcttttgttcctttgagattgcatatgggttacatggttattgtgtcgatttctctagttttagcttttgtggagaatgtgcgttgtcacattcaggagtgttttgttgccagttgtccactctcttttattccaggacagttcctctttctttaggctgttgtgcaaatttcaaactgttagtttttgagtgttgcaaagtggacctaaaactgtttacactgattcaaaaacttaaatgctgtgaagagtggtaattctttcggggagatgtaattataattctataagttatgtatgagatattaattacagatttcagcaattagagtttacttatattcaagcatgacataatctatttttctgtttcaaattcttaatcatcttgggacaaatacatcaatttttttcaccttccttaaaggttctaatagaaaaatctagagcctatttttgtattagccttaaaatagggctggtcatgcaccaagtatctttcacttacactgaggtcgaaaagcgtgtatttattttatctaaactagaatacgattccttaaaacattagccctatgtgtcttcctaagtaacagacaggaacaaagcatttttaagttggctgaaaattgcacttcattttacttaaaaatgtcattctgaaggtagtacaaatctcaactgaaagaaactttacctgtttagatcgttttaggatgtgctcagaaatatgtatggtttatattatgaaaagttagatcacttgcagttggaaaaacagcttagacgtcttttccttaataggtaatgaatgaactacttgaattgattccaactcttgggtgcttaattatagcattcataacatttgcacagtgaaatgagctactggtacagttgtctatcaactgaaagtcagtataaaatgactctctcaaccagggtttcctctcagaaccatggtacacaggaaaattgagagactattttctcaattctcccaaggataattcaatgccaccctacaaacataggaaataagtctatcatattaacgccagcgtattagggcttaattattttggtaactccagttgagaaaggttacaatcatggtaaactctcttttcctcaaacaagactgttctgcattggtcttcctccctgtggtcgctgatactgttctggcactctttttttttttaagacggagtctcgcagtgtcgcccaggtgacaaaaccataaactcactactcataacgtcaagagtttgaagctctactcacaggtgatagtcatcccagtacaagaatactacaaagaaacccagagtgaagtgtaccaatccagaactttctttataaaaaccttaa

SEQ ID NO: 586608 - DNA, 4001 bp, Homo sapiens
aaataatgtgcactgtgacagaatctatatttttcttcaaggcattgattctcatggagaaggagatgttgccctacccctcacccctgcccaattgtgatttttagttgtcacaattatgggggcggggcagagaacagcatcccacaaggaagaactatcttgtccaaagttaacagtgctaggctgggcacagtggttcatgcctataatcccagcactttgggaggcggaggtgtgaggatcacctgaggtcaggagttccagaccagcctggccaacatggtgaaaccctgtctctattaaaaatacaaaaatccggcgggcgtggtagcatgcgtctgtaatcccagctactcggaggctgaggcaggagaatcgcttgaacctgggaggtggagattgcagtgagcagagacagcgccactgcactccaccctgggcgacagagcgagactccgtctcaaaaacaacaacaacaacaaagttaatggtgcggaggttgagaaaccttgctccatatttaggaggtatggtacttttaagtaacttttgacattttaattgtgttttaagatgaaagtagcatctacatcaaatcacatttttaaaaattctaatgccaattaaagttgccttttcgatctcagatcctggaactatgtttcctgtcaacataaatgatatacatcgtggcaacgtcatgatttgtgactgcacaaatctactccgtataacactgaacgtgaaataaaacagtataaaattaaaatcataaatattttcactggaaagaggtttggtttttcagttagaatgctcacagaaaaatagtctggtaggtactgcattgctctaaaatgtaaaattccggctttattttggcactagtttgaggagtatttccctttactccgttgttcttcgtcataattctgaactgccaaaaccctgcttgcagaaatgtttgcgtacagaatcaaatgctgggaaaatggcctagaaaattactctaatattatgtaaggttttttttaatagctaacacgcatagcgatttacaaataataagagtcaagttctgtgctcccagagattgaactgaatttaaaaaaatgcaggtaaacttccagactttctgacctggggtctgtttaaagacccatgttttacacttggtataatccgtactgtaaaatggcctattaataatatcaactcaaaacgttctcactgtttaagaataaaagcatacacacacaaatatacacagtataaataatgaaatatacagatgtgttctttcgcttagcttattttttctgaacattctagaaaattatgaagcttaatcacacacctagcgtgttttgaaataggatttaacaatctttggattgtacctttgtaagaccagcaaccggtctaatattacaatcttttccacgagattccacagcaggtacttactgataataagtgacgaaaggataaggggccgatttctctcttccctccacaggtttttcgcgagcgcctcctgcgcgccccgaaggggtcggggcgcagggtggagtcccgagcggcgcgcccagccggtggctaccattacctgagccccgggcggcgggaccccggtccgccccgcacccccgccgcggccagcccttcccggcactcacccgtcacgcgaatggactccagcatcgtcgccccgaggcccggggcggcgggctccgcgggctcaggggaaagggccgcgcaggggcgggcggcctctagcctctgacccgggcctcggtggcgggggcgcggcgggaggcggctctccgctacctggagcaggataaggagggtaagggcggacgaagacgtaccgacactgactgtgagcagcgcttccaccagcccgtagctactggaaggtacacacggcggccttacggtgcccagcagcgcttagaacctgccaccgtgacgtagccgctccgccggttgctaggaaactgcccccggggtccgcgcgcgctgcgcttcacggagcctgcgcgccgctgggggcgctcgtgcgacgaaggcccgcgggcggcgagagagagtgggaggaactacaactcccggcgtgcacagcgcgggccagtgcctccggggcttgtggctgtgcccgcgagcgcgctggggtctccagccagtgggtaacgcatattgactgatctttcagagacgtttgtacccgttcaaaggtgacttaactccatggtgcgctgtgacactcggccctagctgcaaatagcaaagccagtctacccgtccttccccttacgaggtgcggggaagctaaaacacgtttaggatgagctagtaagagtggaaagtgcaggaggctcaatgaccacttgacggtacctcagcatactatccttaatgctgaaattcacattttagcttgtgattgtgcaattgataggggctgaatgttattttcagtttattattcattttcacattagcaagtatgaaaatttaatcttttacaataaccatgggaggcgggccacggtggctcatgcctgtaatcctcgcactttgggagaccaaggcgggtggatcgcttgaggccaggagttggagaccagcctgggccacatggcgaaaacccatctctactaaaaacacaaaaagtgaacaaatcgtggtggcacacttctgtagtcccagctactcgggaggccgaggtgggaggattgcttgagtccgagaggtgagaatgtagtgagccatgatcgcgccactgcactccagcctgggtgacaaagtgagactaaaaaaaaaaaaaaagtacggtgggaatgggaaatgtagactaaaccattcaacaaacattttttgagaccctaacgtgtgcaaggttctgaggcaggctttgaggatatcaagggaaatgaaataagcctagcggagcttacagtttaggaggagctgagatagtgctggcaactgtcagtcttcagacagttaaattttctcttcatcctcaaggctaagacatggaaataattggggtgtgttttcaaactcaggaacaaaagaaagttgaatatcaggaccgtcacaccctgagaatgacaggcaacttgtgagaaattgtgtctttttcatcacttaggagagaacaatggaaatgtaactatatcacaaaaactggataacctcacttcatattctgtcttcaaatcctgtgactactgttttcgaaatacatccagaatctagccacttgctaccactctggttcaagccaccaccacctcttgtctggattatggcagtcttctagacagtctctgtattcccaccctaccctctttcacactgttctcaaaactcattggccagagtgaacctgtgaaaaaatcagatcatgtcactctgttcaaaatcttcagtggcttcctttcctgtgaagtcctttatgacctagcctcctgtcacctctttgatctcatccccaactacttcctccccgatggatacactggcctctttgatattcctcaattccaggcactatttcacctcaaggcctttgcaacttggaatcctccctgcgtggaatgttcttccctcagatatccgcaggactagctcccttacttcctcaggacttaatccaaatgtcacctcttcgtgagcccttccctggccactctatttaaaattctactccttcatatttcctatagcccttctctgctttattttttttacttagcacttaacattatctaatttattatatattttattgatttatcatgactgttgtctgtctccatccctagaataaaatttccacaagtgcagtgatttttgtttgttcactgctatattcccacaccaagaagagtggctggcatgtagtaggtccttaataaatatttgtgaattaatgaataagtagacaacagaaagtgtgtgcattttcaatgataactaaaata

SEQ ID NO: 586609 - DNA, 4001 bp, Homo sapiens
atctctacaatgattgttatggtttgggaaaataattttaatctatgtgatttctcaatgaaataatgtgcactgtgacagaatctatatttttcttcaaggcattgattctcatggagaaggagatgttgccctacccctcacccctgcccaattgtgatttttagttgtcacaattatgggggcggggcagagaacagcatcccacaaggaagaactatcttgtccaaagttaacagtgctaggctgggcacagtggttcatgcctataatcccagcactttgggaggcggaggtgtgaggatcacctgaggtcaggagttccagaccagcctggccaacatggtgaaaccctgtctctattaaaaatacaaaaatccggcgggcgtggtagcatgcgtctgtaatcccagctactcggaggctgaggcaggagaatcgcttgaacctgggaggtggagattgcagtgagcagagacagcgccactgcactccaccctgggcgacagagcgagactccgtctcaaaaacaacaacaacaacaaagttaatggtgcggaggttgagaaaccttgctccatatttaggaggtatggtacttttaagtaacttttgacattttaattgtgttttaagatgaaagtagcatctacatcaaatcacatttttaaaaattctaatgccaattaaagttgccttttcgatctcagatcctggaactatgtttcctgtcaacataaatgatatacatcgtggcaacgtcatgatttgtgactgcacaaatctactccgtataacactgaacgtgaaataaaacagtataaaattaaaatcataaatattttcactggaaagaggtttggtttttcagttagaatgctcacagaaaaatagtctggtaggtactgcattgctctaaaatgtaaaattccggctttattttggcactagtttgaggagtatttccctttactccgttgttcttcgtcataattctgaactgccaaaaccctgcttgcagaaatgtttgcgtacagaatcaaatgctgggaaaatggcctagaaaattactctaatattatgtaaggttttttttaatagctaacacgcatagcgatttacaaataataagagtcaagttctgtgctcccagagattgaactgaatttaaaaaaatgcaggtaaacttccagactttctgacctggggtctgtttaaagacccatgttttacacttggtataatccgtactgtaaaatggcctattaataatatcaactcaaaacgttctcactgtttaagaataaaagcatacacacacaaatatacacagtataaataatgaaatatacagatgtgttctttcgcttagcttattttttctgaacattctagaaaattatgaagcttaatcacacacctagcgtgttttgaaataggatttaacaatctttggattgtacctttgtaagaccagcaaccggtctaatattacaatcttttccacgagattccacagcaggtacttactgataataagtgacgaaaggataaggggccgatttctctcttccctccacaggtttttcgcgagcgcctcctgcgcgccccgaaggggtcggggcgcagggtggagtcccgagcggcgcgcccagccggtggctaccattacctgagccccgggcggcgggaccccggtccgccccgcacccccgccgcggccagcccttcccggcactcacccgtcacgcgaatggactccagcatcgtcgccccgaggcccggggcggcgggctccgcgggctcaggggaaagggccgcgcaggggcgggcggcctctagcctctgacccgggcctcggtggcgggggcgcggcgggaggcggctctccgctacctggagcaggataaggagggtaagggcggacgaagacgtaccgacactgactgtgagcagcgcttccaccagcccgtagctactggaaggtacacacggcggccttacggtgcccagcagcgcttagaacctgccaccgtgacgtagccgctccgccggttgctaggaaactgcccccggggtccgcgcgcgctgcgcttcacggagcctgcgcgccgctgggggcgctcgtgcgacgaaggcccgcgggcggcgagagagagtgggaggaactacaactcccggcgtgcacagcgcgggccagtgcctccggggcttgtggctgtgcccgcgagcgcgctggggtctccagccagtgggtaacgcatattgactgatctttcagagacgtttgtacccgttcaaaggtgacttaactccatggtgcgctgtgacactcggccctagctgcaaatagcaaagccagtctacccgtccttccccttacgaggtgcggggaagctaaaacacgtttaggatgagctagtaagagtggaaagtgcaggaggctcaatgaccacttgacggtacctcagcatactatccttaatgctgaaattcacattttagcttgtgattgtgcaattgataggggctgaatgttattttcagtttattattcattttcacattagcaagtatgaaaatttaatcttttacaataaccatgggaggcgggccacggtggctcatgcctgtaatcctcgcactttgggagaccaaggcgggtggatcgcttgaggccaggagttggagaccagcctgggccacatggcgaaaacccatctctactaaaaacacaaaaagtgaacaaatcgtggtggcacacttctgtagtcccagctactcgggaggccgaggtgggaggattgcttgagtccgagaggtgagaatgtagtgagccatgatcgcgccactgcactccagcctgggtgacaaagtgagactaaaaaaaaaaaaaaagtacggtgggaatgggaaatgtagactaaaccattcaacaaacattttttgagaccctaacgtgtgcaaggttctgaggcaggctttgaggatatcaagggaaatgaaataagcctagcggagcttacagtttaggaggagctgagatagtgctggcaactgtcagtcttcagacagttaaattttctcttcatcctcaaggctaagacatggaaataattggggtgtgttttcaaactcaggaacaaaagaaagttgaatatcaggaccgtcacaccctgagaatgacaggcaacttgtgagaaattgtgtctttttcatcacttaggagagaacaatggaaatgtaactatatcacaaaaactggataacctcacttcatattctgtcttcaaatcctgtgactactgttttcgaaatacatccagaatctagccacttgctaccactctggttcaagccaccaccacctcttgtctggattatggcagtcttctagacagtctctgtattcccaccctaccctctttcacactgttctcaaaactcattggccagagtgaacctgtgaaaaaatcagatcatgtcactctgttcaaaatcttcagtggcttcctttcctgtgaagtcctttatgacctagcctcctgtcacctctttgatctcatccccaactacttcctccccgatggatacactggcctctttgatattcctcaattccaggcactatttcacctcaaggcctttgcaacttggaatcctccctgcgtggaatgttcttccctcagatatccgcaggactagctcccttacttcctcaggacttaatccaaatgtcacctcttcgtgagcccttccctggccactctatttaaaattctactccttcatatttcctatagcccttctctgctttattttttttacttagcacttaacattatctaatttattatatattttattgatttatcatgactgttgtctgtctccatccctagaataaaatttccacaagtgcagtgatttttgtttgttcactgctatattcccacaccaagaagagtggctggcatgtagtaggtccttaataaatattt

SEQ ID NO: 586610 - DNA, 4001 bp, Homo sapiens
tcaaggcattgattctcatggagaaggagatgttgccctacccctcacccctgcccaattgtgatttttagttgtcacaattatgggggcggggcagagaacagcatcccacaaggaagaactatcttgtccaaagttaacagtgctaggctgggcacagtggttcatgcctataatcccagcactttgggaggcggaggtgtgaggatcacctgaggtcaggagttccagaccagcctggccaacatggtgaaaccctgtctctattaaaaatacaaaaatccggcgggcgtggtagcatgcgtctgtaatcccagctactcggaggctgaggcaggagaatcgcttgaacctgggaggtggagattgcagtgagcagagacagcgccactgcactccaccctgggcgacagagcgagactccgtctcaaaaacaacaacaacaacaaagttaatggtgcggaggttgagaaaccttgctccatatttaggaggtatggtacttttaagtaacttttgacattttaattgtgttttaagatgaaagtagcatctacatcaaatcacatttttaaaaattctaatgccaattaaagttgccttttcgatctcagatcctggaactatgtttcctgtcaacataaatgatatacatcgtggcaacgtcatgatttgtgactgcacaaatctactccgtataacactgaacgtgaaataaaacagtataaaattaaaatcataaatattttcactggaaagaggtttggtttttcagttagaatgctcacagaaaaatagtctggtaggtactgcattgctctaaaatgtaaaattccggctttattttggcactagtttgaggagtatttccctttactccgttgttcttcgtcataattctgaactgccaaaaccctgcttgcagaaatgtttgcgtacagaatcaaatgctgggaaaatggcctagaaaattactctaatattatgtaaggttttttttaatagctaacacgcatagcgatttacaaataataagagtcaagttctgtgctcccagagattgaactgaatttaaaaaaatgcaggtaaacttccagactttctgacctggggtctgtttaaagacccatgttttacacttggtataatccgtactgtaaaatggcctattaataatatcaactcaaaacgttctcactgtttaagaataaaagcatacacacacaaatatacacagtataaataatgaaatatacagatgtgttctttcgcttagcttattttttctgaacattctagaaaattatgaagcttaatcacacacctagcgtgttttgaaataggatttaacaatctttggattgtacctttgtaagaccagcaaccggtctaatattacaatcttttccacgagattccacagcaggtacttactgataataagtgacgaaaggataaggggccgatttctctcttccctccacaggtttttcgcgagcgcctcctgcgcgccccgaaggggtcggggcgcagggtggagtcccgagcggcgcgcccagccggtggctaccattacctgagccccgggcggcgggaccccggtccgccccgcacccccgccgcggccagcccttcccggcactcacccgtcacgcgaatggactccagcatcgtcgccccgaggcccggggcggcgggctccgcgggctcaggggaaagggccgcgcaggggcgggcggcctctagcctctgacccgggcctcggtggcgggggcgcggcgggaggcggctctccgctacctggagcaggataaggagggtaagggcggacgaagacgtaccgacactgactgtgagcagcgcttccaccagcccgtagctactggaaggtacacacggcggccttacggtgcccagcagcgcttagaacctgccaccgtgacgtagccgctccgccggttgctaggaaactgcccccggggtccgcgcgcgctgcgcttcacggagcctgcgcgccgctgggggcgctcgtgcgacgaaggcccgcgggcggcgagagagagtgggaggaactacaactcccggcgtgcacagcgcgggccagtgcctccggggcttgtggctgtgcccgcgagcgcgctggggtctccagccagtgggtaacgcatattgactgatctttcagagacgtttgtacccgttcaaaggtgacttaactccatggtgcgctgtgacactcggccctagctgcaaatagcaaagccagtctacccgtccttccccttacgaggtgcggggaagctaaaacacgtttaggatgagctagtaagagtggaaagtgcaggaggctcaatgaccacttgacggtacctcagcatactatccttaatgctgaaattcacattttagcttgtgattgtgcaattgataggggctgaatgttattttcagtttattattcattttcacattagcaagtatgaaaatttaatcttttacaataaccatgggaggcgggccacggtggctcatgcctgtaatcctcgcactttgggagaccaaggcgggtggatcgcttgaggccaggagttggagaccagcctgggccacatggcgaaaacccatctctactaaaaacacaaaaagtgaacaaatcgtggtggcacacttctgtagtcccagctactcgggaggccgaggtgggaggattgcttgagtccgagaggtgagaatgtagtgagccatgatcgcgccactgcactccagcctgggtgacaaagtgagactaaaaaaaaaaaaaaagtacggtgggaatgggaaatgtagactaaaccattcaacaaacattttttgagaccctaacgtgtgcaaggttctgaggcaggctttgaggatatcaagggaaatgaaataagcctagcggagcttacagtttaggaggagctgagatagtgctggcaactgtcagtcttcagacagttaaattttctcttcatcctcaaggctaagacatggaaataattggggtgtgttttcaaactcaggaacaaaagaaagttgaatatcaggaccgtcacaccctgagaatgacaggcaacttgtgagaaattgtgtctttttcatcacttaggagagaacaatggaaatgtaactatatcacaaaaactggataacctcacttcatattctgtcttcaaatcctgtgactactgttttcgaaatacatccagaatctagccacttgctaccactctggttcaagccaccaccacctcttgtctggattatggcagtcttctagacagtctctgtattcccaccctaccctctttcacactgttctcaaaactcattggccagagtgaacctgtgaaaaaatcagatcatgtcactctgttcaaaatcttcagtggcttcctttcctgtgaagtcctttatgacctagcctcctgtcacctctttgatctcatccccaactacttcctccccgatggatacactggcctctttgatattcctcaattccaggcactatttcacctcaaggcctttgcaacttggaatcctccctgcgtggaatgttcttccctcagatatccgcaggactagctcccttacttcctcaggacttaatccaaatgtcacctcttcgtgagcccttccctggccactctatttaaaattctactccttcatatttcctatagcccttctctgctttattttttttacttagcacttaacattatctaatttattatatattttattgatttatcatgactgttgtctgtctccatccctagaataaaatttccacaagtgcagtgatttttgtttgttcactgctatattcccacaccaagaagagtggctggcatgtagtaggtccttaataaatatttgtgaattaatgaataagtagacaacagaaagtgtgtgcattttcaatgataactaaaataatatagaattatatcaaatggaccaatagacgaaga

SEQ ID NO: 586611 - DNA, 4001 bp, Homo sapiens
tgcactgtgacagaatctatatttttcttcaaggcattgattctcatggagaaggagatgttgccctacccctcacccctgcccaattgtgatttttagttgtcacaattatgggggcggggcagagaacagcatcccacaaggaagaactatcttgtccaaagttaacagtgctaggctgggcacagtggttcatgcctataatcccagcactttgggaggcggaggtgtgaggatcacctgaggtcaggagttccagaccagcctggccaacatggtgaaaccctgtctctattaaaaatacaaaaatccggcgggcgtggtagcatgcgtctgtaatcccagctactcggaggctgaggcaggagaatcgcttgaacctgggaggtggagattgcagtgagcagagacagcgccactgcactccaccctgggcgacagagcgagactccgtctcaaaaacaacaacaacaacaaagttaatggtgcggaggttgagaaaccttgctccatatttaggaggtatggtacttttaagtaacttttgacattttaattgtgttttaagatgaaagtagcatctacatcaaatcacatttttaaaaattctaatgccaattaaagttgccttttcgatctcagatcctggaactatgtttcctgtcaacataaatgatatacatcgtggcaacgtcatgatttgtgactgcacaaatctactccgtataacactgaacgtgaaataaaacagtataaaattaaaatcataaatattttcactggaaagaggtttggtttttcagttagaatgctcacagaaaaatagtctggtaggtactgcattgctctaaaatgtaaaattccggctttattttggcactagtttgaggagtatttccctttactccgttgttcttcgtcataattctgaactgccaaaaccctgcttgcagaaatgtttgcgtacagaatcaaatgctgggaaaatggcctagaaaattactctaatattatgtaaggttttttttaatagctaacacgcatagcgatttacaaataataagagtcaagttctgtgctcccagagattgaactgaatttaaaaaaatgcaggtaaacttccagactttctgacctggggtctgtttaaagacccatgttttacacttggtataatccgtactgtaaaatggcctattaataatatcaactcaaaacgttctcactgtttaagaataaaagcatacacacacaaatatacacagtataaataatgaaatatacagatgtgttctttcgcttagcttattttttctgaacattctagaaaattatgaagcttaatcacacacctagcgtgttttgaaataggatttaacaatctttggattgtacctttgtaagaccagcaaccggtctaatattacaatcttttccacgagattccacagcaggtacttactgataataagtgacgaaaggataaggggccgatttctctcttccctccacaggtttttcgcgagcgcctcctgcgcgccccgaaggggtcggggcgcagggtggagtcccgagcggcgcgcccagccggtggctaccattacctgagccccgggcggcgggaccccggtccgccccgcacccccgccgcggccagcccttcccggcactcacccgtcacgcgaatggactccagcatcgtcgccccgaggcccggggcggcgggctccgcgggctcaggggaaagggccgcgcaggggcgggcggcctctagcctctgacccgggcctcggtggcgggggcgcggcgggaggcggctctccgctacctggagcaggataaggagggtaagggcggacgaagacgtaccgacactgactgtgagcagcgcttccaccagcccgtagctactggaaggtacacacggcggccttacggtgcccagcagcgcttagaacctgccaccgtgacgtagccgctccgccggttgctaggaaactgcccccggggtccgcgcgcgctgcgcttcacggagcctgcgcgccgctgggggcgctcgtgcgacgaaggcccgcgggcggcgagagagagtgggaggaactacaactcccggcgtgcacagcgcgggccagtgcctccggggcttgtggctgtgcccgcgagcgcgctggggtctccagccagtgggtaacgcatattgactgatctttcagagacgtttgtacccgttcaaaggtgacttaactccatggtgcgctgtgacactcggccctagctgcaaatagcaaagccagtctacccgtccttccccttacgaggtgcggggaagctaaaacacgtttaggatgagctagtaagagtggaaagtgcaggaggctcaatgaccacttgacggtacctcagcatactatccttaatgctgaaattcacattttagcttgtgattgtgcaattgataggggctgaatgttattttcagtttattattcattttcacattagcaagtatgaaaatttaatcttttacaataaccatgggaggcgggccacggtggctcatgcctgtaatcctcgcactttgggagaccaaggcgggtggatcgcttgaggccaggagttggagaccagcctgggccacatggcgaaaacccatctctactaaaaacacaaaaagtgaacaaatcgtggtggcacacttctgtagtcccagctactcgggaggccgaggtgggaggattgcttgagtccgagaggtgagaatgtagtgagccatgatcgcgccactgcactccagcctgggtgacaaagtgagactaaaaaaaaaaaaaaagtacggtgggaatgggaaatgtagactaaaccattcaacaaacattttttgagaccctaacgtgtgcaaggttctgaggcaggctttgaggatatcaagggaaatgaaataagcctagcggagcttacagtttaggaggagctgagatagtgctggcaactgtcagtcttcagacagttaaattttctcttcatcctcaaggctaagacatggaaataattggggtgtgttttcaaactcaggaacaaaagaaagttgaatatcaggaccgtcacaccctgagaatgacaggcaacttgtgagaaattgtgtctttttcatcacttaggagagaacaatggaaatgtaactatatcacaaaaactggataacctcacttcatattctgtcttcaaatcctgtgactactgttttcgaaatacatccagaatctagccacttgctaccactctggttcaagccaccaccacctcttgtctggattatggcagtcttctagacagtctctgtattcccaccctaccctctttcacactgttctcaaaactcattggccagagtgaacctgtgaaaaaatcagatcatgtcactctgttcaaaatcttcagtggcttcctttcctgtgaagtcctttatgacctagcctcctgtcacctctttgatctcatccccaactacttcctccccgatggatacactggcctctttgatattcctcaattccaggcactatttcacctcaaggcctttgcaacttggaatcctccctgcgtggaatgttcttccctcagatatccgcaggactagctcccttacttcctcaggacttaatccaaatgtcacctcttcgtgagcccttccctggccactctatttaaaattctactccttcatatttcctatagcccttctctgctttattttttttacttagcacttaacattatctaatttattatatattttattgatttatcatgactgttgtctgtctccatccctagaataaaatttccacaagtgcagtgatttttgtttgttcactgctatattcccacaccaagaagagtggctggcatgtagtaggtccttaataaatatttgtgaattaatgaataagtagacaacagaaagtgtgtgcattttcaatgataactaaaataatatagaa

SEQ ID NO: 586612 - DNA, 4001 bp, Homo sapiens
agctaccaatactaaatcagaccgtgtgaatgtgccctttctattccttctagttactctgaaatatttcccaggataagtcaaatgctggtagctgtttacctgtaaatgatggggtacagtataagcaatatgattagttacaaagtattggtttttgtctagcattacgggtaactttggtcaaaaaagaccaatacttttcaaactactggtatctaggaatctcaaatgcgagtcaaccagcatgtgtgatgaacacttaaaaaaaagagaaaagagccactgcattccagcctaggcgacagagtgagacactgtctgaaaaaaaaaaaaaagagagagaaaaaagaatgcattacatgtagaaggagtcagcactacttcatgaaatgtctatttcagttacataagtactgtacgtgtatgtgagcatattggttgtgatgtaaaattaacttcacatgatagatcagtcaaaagagtttgaaagccatggaatgtggcaaagaaacaagcagaagtcacaaaggcctgaattgtccccacaaactctgtccctgcaaatggagctccacagtgaatcccacattcttcctgtgtcctacagctgagaaccccaaaattaccggcctggaacccatcatcagctgccataccagattccccttctccagatcctaacccctttttttctccactccatcccacctcatcccagaaagcagccaatattttcccgcacgaacaggcactccacactccagcagctgccctggagacattgacagtcacacctgggtttccttaagccctgacaccacgactcctgcgatgacacctccttcccccaaccccgaacagcagagccactctcagagtcagaagtccctagctgaccctccaaggcttcctgggcgcgcagggtcgttcttccaccttctgtcccccgtggactctcacctggaaaacgcacacccccctgccgggtggttaggctaagattatgtgggataagactttaattctccaagcatctccgaaagacagcctatccggggaggcttctcctttaatcagccttcagctgaatccctcagccccatcccttaatgctcccggcgttaattcctcaaaataatgcagtcagagaaagtgaacttggccgctaggaaagttaccccagaggaagcgacggggagctagggcgagcggggagcgggggacggggtggggggcgagcggggagcgggggacggggtggggggcgagcggggagcgggggacgggatggggggcgagcggggagctcagggcgctcgcccggggggtttcctccgcacaacgtgaaaaatcttctagcccccaagaaaagaaaacaaaacccaacgtggccacaaaccggatgccctgtcactgaagtgcgaacaccactgtggggctgggactcagaggagaggaggggaggggagaggaggtcggcggggctggaacaaagccctcggggccgctccgagaggccgcgcgccagcacccagctgcgccccgagggagagagctgaggactggccgacccccgcccttccccaagcccgggagcccggggccggccctggtgcggggtgcggggccgggagggcaggtgcgcgcgcagcgagcccctcccccgcgcccccaaagctcgggggcaccccgaccctccccacgcgcctggccccggcgcggccctcacccgagcgggggtcgaaggtgaccacgaacacggccaccacctggtcctcctccacgtcgcccagctccaggcgcccgggctgcagcagcacctccggggcggccggctcctcgggctcccgcctccggggcggctccgcggccggccgggcgcccccgccgccgccccggccccagcctcccgcctgcggctgcggggcctgcggcagggagacggcggggccctcggcccagcgcagcagcggcgccgcgtctccctgctccaccatggctaggcgaggcggagccgcgggcgcgaggggcggggcgggcgggctgcgggaacccccctcgcctggccgcgccaacgccgccgccgcccgccgggtctggcgctgcccggggccccgccgcggaggcgcctttcccacggagccagagcaggcgtccgcggagccggcttcgggaaccgcgagcctattcggaggcgcccgtgtgcacgtccgtgtgtgggacgcgtgcggccggaacgttcatccttgcgtccatacacctgtgtgcgggtggaggtgccttctcacctagggttccgtggtatagctaccactgtgagtttttatgtcaccattattttttaaagtccgctggtcctgtggaccgtgacagatatgtattacataatcctggatgtgtggcagaagctgcttctaagcagaggagtgaagcagaggtgctctggctacccaggtgtttgcaatatactcatcaataaacactgaaaaggccatagggttaaagtttgggaattttgttcttccttttatattacaaactgattaggatggagattatgagtttatttcctggtatatatacaacttgagggtattaaattaggaggtgctggagcatttgtgggacgagggatattccctcagaagatcaggaaaaggaagttgctcaggggagaaagaggaaagtcagctctaaagctgatggctttggaaatggattaggggttttctgtgaacccccattttatatttaaaaataaattttacatgcctcaatccttgaggtaaatctagcagctaagtaactctttaagaggagatgtgtataaaaataggaatagctattaaaatagaaagaaggaggtggcaagagaaggaggtacacagttcatccagggttcagcaaggctccatggtttgcctgttcgcaaaaggacccagtagagctatgtgctgggtgctactccacgggatgtttatgaacctccgtgtcctacacgtcagcactgcaatgataatgtgatttaacccctatccctaagaagataatcaatgactgccctaggctgccacttctaatctaaaatctatgatataacaataaagaatgtacttatgcagcattttacccccaagaacagggtctactttcattatttacatatttagttcagcctttcctgaaaggtaaaacttcagcataggaatctcttgattggatcagaaggatgaagaagtagctgtggatgtttgaccaagttactgatgacctccagagctcatcccttggagcactgacagcaaataagtcaagacggagcacagtagagatccatctctgagaatgtctcctccatacctgctcatttcttcccagtgaggcactgtgtgtgtgtgtgtgtgtgtgtgtatgtatgtatgtgatgtgggagaggcagaaacagacatacacacatacatacacacacagagacagacagagagagagagagatcttatttctgtggccgggggcggtggggctggccttggtgcaggtcacacaggtgacccattacctgttctaatcttagggactccgggaatgaccacagcccaactgtgactaacagagaaaaggtcagactagtgggtctgtaccatcgttttaaaatgtctgctccttaaagtatcggtaggatatcatcaatctctaaattactgggacatcaaatcagagatctattcctattctaagtatgctatgtgttgtgtgtgtagacaagtggtatgtttctactgtcacagctattttgatgaataatctctagttctagcaaatgggaaactttggcaagagaagcaatttgttaaaatctgtttgatttattcatcagatagatttatagtagatttcaaattaatagaataacctaggggtttttattaatggcactaaagtatccatgggtaaaatatgttgtcactgatttgcttcacaataccccagcactcacc

SEQ ID NO: 586613 - DNA, 4001 bp, Homo sapiens
ttctaggtatacatgtgtaggacatgtgttcatctaaaagattagtctagttgtagagaccaaaggcatcacttctattgaccctgaccttcgcctacttcaagcagattttcattactaagaatcgatgttatcagaagcttaagacttttcagtttagaaaaatatattctgcatattagaagttgggggctggaggataaagtttatcttgtcacaactgttcaatctgagatgtccaagaagcagctttctgtggaaacctggaataatggattattcccaggtgatatgtaaagttgtagaatatagattaagctcattatactaaaaagccctaaaattaaacacagctgtttgttgagctcttgccctgatttccccaattacaacattgctgtgtgttcgcacacaagcctttgatccgattctctttcatttcagtctgtcctgggacctgtactgtaggagagaaagacgaaaatccatagatgatggatgatgtgtagaacacagatactctgtaattcaagtctcggtaaaattcagaagttagagcaacatacacaaacaagagggtctggcctttcttcccagaggggctattggctaacctatttttgctacattaattaaaacgacccatcgccctgattcctaacaatcttcctaaaaacagtatctattccatatatcctcccaacacaatcaaagtaggtcagaaatgttgcttccttcccctcattgattttcattaagaggatgcactttctgaacactaaatggaaagataaacacccaatacaagaaccaatgacaccccctgtaaatttttggcacactgtctcgttcttctaaaagccagataaaaatctcatctcccatagtttatcctttttggctgtaaaacaacaatgattacaagctataaaatacaccgcggcaatacttcagccaggtgataaagcacctcccaaaagaagcatattcactgtcttttctaattttctccatcatcaacctgcatcttctctaccaagtacatactccttttttttcccccccaaattcaaatccacattttgtcagaaggatgctaagtgacaccatacattggcttagcaaacccacagggccttaatcaggaagctgagggcaggggagtaggacgaaggcgtttgcagagacaggggagtggagacagggggaggaggagcgggaaatcctctggtgtctgtgtctggctctctggaaaagctgtgatgagatggttcttcaaatcccactggtggggcttccccagtctcctccccttcctgaaatctttccctcgaccccaggtcctcaaacctggctgtccaaaaaggacgccgcaaagtcctgcagagcccccaaaagacacaagcgcggacagaaaagcatcccccgagagacagcgaagccacacaccctctccgggccagctaccagggcgggcaacttcacccctcgaagcaaacgaaagcccctgttctccaagcaaaggaaaaggggatggcaaacagaaataaacaggaaccgctctcagccttcatcttccgcgccctcccccagcaaactccaggtagaggaccaggtgctgctcacctcctggcaaggaggaagcgggcggctggaggaggagggcaggtccccagcccaggccgcctggcagccggcgagcgcccagcagcaaatccaggcggggctccagggcggcgagcgcccgcggcggggagcctccgccggccgcccccagcccctgccccgtaccggcccccgggcgcggaacagcatcttcgtccggccgcggtcggcgggccggcggcaaggcagccttcccggggtgcggcggcagctccggctcccgggccgcgactgctgtgcgctcgtctcgccgctccgtcacccgctgcccgtccgcccgctgacagctctgctgcgctcgcggcccgggcagccagcgccgatgctcccgtcacgccggagggagggaccgcggggcgcgggcgcggcgcgggggcgggacgcggggcggggacgctggagctggggagcaggtggcgcgggcgggggctgcggcccagcccggcgggtccccaggggctgcgcggcgctcgcctcgcgctagagggcgagagaggctggggaccccgtggagtagcctgtctcaggtccccgtggcccactgggaggggcgctcccgggatgaagccagagtaaatacaggacatcaggacattgttttctggcggtgggtctttaaaaagctcgccactttcctcattgcacacaaacacgcagatgtgccctcggaacatcccttgtaaggatccatgctggctagcgtcagatcgaatttctagttagggtgtgcatgaaatggcggggaagaaagaggactgaggtgtagacgtggtgtgtgactcagttttctcacctatttaatgaaaataatacccaccacgtaggattattatgaggattaagtaagttgatgtacataaagcacttggaagagtgcctggcacacagtaggtgacatgtgttggtagtagtagccataattattgctgctattggtgttattttgtggagatgtgtaacattgggcattaagccctgtgttttctggaggaaacagtttctccatctgtgcgatgattgaggtgctcttcgttttttctttcattcaaaaacatactgaactaggtgatggtgaacaagatggacataaggccttcctcagtggcaaggatctcaagatcccttcttgatctcagattctgtaaatgggtgagttattgtgtttttcaaaagaagcatccaaatttctgattattgaatatctggacaaatccacgtggcccactcattataagttggcctgtggcacatttgtttgtggcattatctctaatatccttttaacaaaatttccacatgaaagtctctgtatatgtgtgtttgtgtgtatgtatacacatatagatttgtgtatcacacctatattctgattataacaatatatgttatttgtaaacattttggaaaatattgaaaagtatcaggaagaatataaaaataactagagatcctaccacccagagataacattgttaatggtattaacatgttgaggaatttccttgcttttttttttttaactctgtgtgtactgcaaaactggaataataatttgtaacctgcttttatttttattcttaataacataaatattttctcaagtcattaaagtctccaacaacacaactttaataattgtaaaatattttctactctttagatacatgtaatttactattagatattaggcattgtttaaggattcagtgttattaataattctggaaagaatgcccttggaacataatctgtgtgcatctttaaatattttatgataactttctagaagtgaaaacattggatcacatgatatgtgtatttttaaagtttttgacgaatagtgtacaaattccttccaaaaaatttgtagcaattgttaccagcagtttatgagtatttatttcacatcaccctagattataatacttcagatatttatcattttggtagaagagacaaaagctattatttttaaaatgtatttttatcattggtgacatcgagtgattttttatatatatctactagctatttgcatttttccttctcatgtcagggtgtgagaatttttcactggcacactttagccattttattgaagttccattttttattgattcgttagcaatcttcataagctttgtgtatgtttatcatatatcttacaaatacttttttgtagtcttttaaatttacttctgatagcttttctggcagaagcttgtcatctttaggtattcaaatgtagcaacattttcttttgtgatttcttccttttttatatctagaagtacacgtatctctgcaaaatcatacagatgcctatgttttcttat

SEQ ID NO: 586614 - DNA, 4001 bp, Homo sapiens
tattatgtaccaaacattctttttggaaattaagatgtattacagtttgatatgttaagggaggtaattccatatacctttttagggactaaataattgctttctctggatattacatatctcaaaacacacagataagaaaaagtctagggaaatatatattatccttattatactaaaagcttgtatacataacgatgcaaacacctaaataggaaatctcacaaaaagtgaaatacaaaaagctaagtgacacgaaaaatattgaccttcatgagtgattaaagaaatgcacatgttaggtcacaaaataagtcttaatacattcaaaagactgaaacaatatcaagcagcttctctggccacagtggaataaaactagaaattaataataagagcaattttggaaactatacaaatacatgaaaattaaacaatatgctcctgaatgaccagtgggtcaatgaagaaattgagaagaaaattgaaaaattccttgaaacaaatggtaatggaaacacaacataccaaaacttatgggatacaacaaaagcagtattaagagggaagtttatagctataagtgtctacatcaaaaaagaaaaaaaactttaaataaacaatctaatgatgtatcttaatgaaccagaaaagcaagagcaaaccaaacccaaaattaatagaaaataataaaaatcacagaaataaatgaaatgaagaaaatacaaacgatcaatgaaacaaaaagttagttttttgaaaagttaaacaaaattgacaaaactttagctagactaagaaaaaaagaagatacaaataaataaaatcagaaatgaaaaagaagacattacaactgatactgcagaaatgcaaaggatcattagaggctactatgagtaactatacgccaaccaactggaaaacctaaaagaagtggactaattcctagactcatacaacctaccgagactaaaccaggaagaagtccaaaacctgaacagaccaataccaatgaaatcaaagccacaataaaaagtctcccagtaaagaaaagcctgggacccaatggcttcactgctgaatcctaccaaacatttcaagaagaactaatctcggtccaactcaagctattctgaaaacccaagaggagagaatacttccaaactcattctacaaggctaatattaccctgataccaaaaccagacaaagacacataataaaaaaaactacaggccaatatctctgacgaatactgatgtaaaaatcctcaacaaaatactagcaaaatgaattcaacaacacattagaaggatcattcatcatgaccaagtgagatttatccctgggatgcaaggataattcaacatacgcaaataaatcaatgtgatacattggatcaacagaatgaaggataaaagctacaagatcatttcaattgatgctgaaaaagcatttaataaatttcaacatccctttatgataaaaaaaaatttaaaaactaggtatagaaggaacataccgagggaggagccaagatggccgaataggaacagctctggtctacagctcccagcgtgagcgacgcagaagacgggtgatttctgcatttccatctgaggtaccgggttcatctcactagggagtgccagacagagggcgcaggtcagtgggtgcgcgcaccgtgcacgagccaaagcagggtgaggcattgcctcactcgggaagcgcaaggggtcagggagttccctttcctagtcaaagaaaggggtgacggacggcacctggaaaatcgggtcactcccactcgaatactgcgcttttccgacgggcttaaaacacggcgcaccacaagattatatcccgcacctggctcggagggtcctacgcccacggagtctcgctgattgctagcacagcagtctgagatcaaactgcaaggcggcagcgaggctgggggagaggcgcccgccattgcccaggcttgcttaggtaaacaaagcagccggaaagctcgaactgggtggagcccaccacagctcaaggaggcctgcctgcctctgcaggctccacctctgggggcagggcacagacaaacaaaaagacagcagtaacctctgcagacttaaatgtccctgtctgacagctttgaagagagcagtggttctcccagcacgcagctggagatctgagaatgggcagactgcctcctcaagtgggtccctgacccccgagcaacctaactgggaggcaccccccagcaggggcacactgacacctcacactgcagggtattccaacagacctgcagctgagggtcctgtctgttagaaggaaaactaacaaacagaaaggacatccacaccaaaaacccatctgtacatcaccatcatcaaagaccaaaagtagataaaaccacaaagaggggaaaaaacagaacagaacagctggaaactctaaaaagcagagcgcctctcctcctccaaaggaacgcagttcctcaccagcaacggaacaaagctggatggagaatgactttgacgagttgagagaagaaggcttcagacaatcaaattactctgagctacgggaggacattcaaaccaaaggcaaagaagttgaaaactttgaaaaaaatttagaagaatgtataactagaataaccaatacagagaagtgcttaaaggagctgatggagctgaaaaccaaggctcaagaactacgtgaagaatggagaagcctcaggagccgatgcgatcaactggaagaaagggtatcagcgatggaagatgaaatgaatgaaatgaagggagaagggaagtttagagaaaaaagaataaaaagaaatgagcaaagcctccaagaaatatgggattatgtgaaaagaccaaatctatgtctgattggtgtacctgaaagggatgggcagaatggaaccaagttggaaaacacgttgcaggatgttatccaggagaacttccccaatctagcaaggcaggccaacgttcagattcaggaaatacagagaacgccacaaagatactcctcgagaagagcaactccaagacacataattgtcagattcaccaaagttgaaatgaaggaaaaaatgttaagggcagccagagagaaaggtctggttacccttaaagggaagcccatcagactaacagcggatctctcggcataaaccctacgagccagaagagagtgggggccaatattcaacattcttaaagaaaagaattttcaacccagaatttcatatccagccaaactacttcataagcgaaggagaaataaaatactttacagacaagcaaatgctgagagattttgtaaccaccaggcctgccctaaaagagctcctgaaggaagcactaaatatgaaaaggaacaactggtaccagccgctgcaaaatcatgccaaaatgtaaagaccatcgagactaggaagaaactgcatcaactaacgagcaaaataaccagctaacatcatcatgacaggatcaaattcacacataacaatattaactttaaacgtaaatggactaaatgctctaattaaaagacacagactggcaaactggataaagagtcaagacccatcagtgtgctgtattcaggaaacccatctcacgtgcagagacacacataggctcaaaataaaaggatggaggaagatctaccaagcaaatggaagacaaaaatggcaggggttgcaatcctagtctctgataaaacagactttaaaccaacaaagatcaaaagagacaaagaaggccattacataatggtaaagggatcaattcaacaagaagagctaactatcctaaatatatatgcacccaatacaggagcaccaagattcataaagcaagtcctgagtgacctacaaagagacttagactcccacacattaataatgggagactttaacaccccactgtcaacattagacagatcaatgagacagaaagtcaacaaggatacccaggaatt

SEQ ID NO: 586615 - DNA, 4001 bp, Homo sapiens
agtttcccttttatcagtaaatccaccaattatgctaaaactcctccagctagtgacagaggaatgctctctatgaatagaaagagattagttatccagttaagaatttgcttgcctgatctttcatttggaaacagaaaaactaagcttttaggaataccacttggaagactgcaggaaaacccaaatacactccctctcttttatttccagcttcaaactttagtctaccctctcgactattttgctgcaggaacccctaactcactaaattaactaaattaacgattttaaaaagtaaagttttaagtgaaaataaatttacatttacatttatttcatatttctctgttattttataatgttgtacttcaaacctcccaaaagacaagctgttgaatgtgatatccagcaattctataatctctctgtaggttatactaaaaaaaattaagttatttctatggctaaaaaaaatatccattgcaagatgaaagatttctgtggatggattgtggtaatgatagtaaacaatatgaatatatttaatgcccctgaactagacacttagaaatggtgacgatggtaaattttaagttatgtgtatttcaacagaatttaacatttttaaaataagaaaaaatccattaaaaagaaactttgccactctgccctcccatggtttcaaataagaaaatagattttaaaaaaaaataataacattctttaatattgcctttgtctcattacagacttgagatataaggacatctagtgatgagaaaggctgcatttattctgctggttatcaatgccatatgctcatttttgtaaggtctcctacattcattataattaacatctagggctaatatgaagaggtaattgtttaatcaagaaaacaaatggtcaaaatgacaaaacatactgcattctttgcctctcactgggtcaggcaggccagagcagtccactgcagaatttggaatggcaactctccacctggagccactgctatcacattccgtatattcaaagtgataatctttctgcaaacaatcacaaaaacaagcctttgttagagccagttctaacgggacaactgtgctttctctatcaccccaagcccctgtttccaagctgtaccctctccttgattcttatccctcccccatcccacccacaccaagcagcttattgatcaaagaggtatggtgctagacacagagtaggtgctgaggagatgatgcaggacaggacagtcaacgctgtcaggttgtgaccattatcctttcatctcacccatccagaaaagctacagcacacttccctatctcttgcaggctttttaagctctaaataactgatagatgtgagtaggagaaagagcaaaataacactaggaatttgactactgtcattgtcccatgtgtttcaaagaaagaaacaagagaactacttccattgacctaattctcactctgtttaaaatttaacagaaggtgtaaaaattaatcatcaaatactaataaaagactacaagtttttaaagcagctctcccaggcttaccacacatgtaccacagcaggctgccatcaattacggactattaaaattgaccattaattacaactgccaaattaaaaccaacccccaacccacttgtctccagcctttgattgttttgaaattctcacaatgacctcccttggtcagagcacattacacataagtgatatttaaactgagaagaacccaaacaaaatattattggagcattttaagaatgtgagaaattccaaatctaccccaaattgttttcagttcaataccttacttattcagttcaaaatcctggttgtggttattctgctgcatccacactgttttgcctccctcactgtgtcaatgacaagtgagaatagaaacatcaagccacatcaccatgcggacatcaggaatgagaaggccattgtctttgaccttctctgcatagcacactttgctaacaatgactgtcctaattttaacattttttgcaatctagataagctgagatttcccaaatcatcaagtctgggttcccgtttatttaacagttcttccctcaatgtatcttgcttctctcataattactataagcaacaagaagaacccaggccattccttcagcactttgcttggaaatctgctcagctaaatatccaagctcatcttacaagttttgctttccacacaaacataggaccacaattctgctaagctttctaccactatattaaaggggtcacctttcctccaatttcctggaggaaacattggaataaatatttatttatttatgagatattcctcttttctttcggggccctcactagtatcactttcaatatttttaaaaatattctgcttatgacaatttacatattctttaagatgatacagacattttctgccatgcttctcacttccttctgagccttcacaggcagtctctaaaatccacatttctaccaacagtctgttcaaggccatctagactttactagcatgcacctcaaaattctcccagcctctgcccattatccagttctaaagccacattcccgcttttaggtgtttgttacaacaacacttcccttcaaggtaccaaaatctgtattcgtttcccataacagccgtaataaattagcagaaacttagcaacttaaaacaacagaaatatattctctcacagttctggaggctggaagttcaaaagctgtattacaaggctgatcaaggtatcgccaggccacactcccttaggcagcttgaggagagaatccactccttgacccttccaggttctggcggctgccaccatttattgccctgtggcttcatcactccagtctctgcctctgtggtaccattgccttctcctcctcttgtgatagcatttagggcccatcccagtaacctcactttctcaagattctcactttaaatcttcaaagtcctattttgtcatataaaaataatatttacaggttctggggattaggacttggattttttggacgacaggggcagtaggaaggagtatgattcagcctaccacaccctcccatggtagaatagccttggcctgccatgtatttgcataattgctttcttgtttctcttgttccttgttatttgtattagaatgtatgtcttggctaggagctgtgcctcagccctgtaatcccagcactttgggatgccaaggtgggcagatcacttgaggtcaggagtttgagaccagcctggtcaacatggcgaaaccctgtctctactaaaagtacaaaaattagccgggcgtggtggtgtgcgcttcccagctacttgtgaggctggggcatgagaatcacttgaatgctggaggcagaggttgcagtgagctgagattgaaccactgtactccatccagcctgggcaatggaacgagactccatctcaaaaataaaataaaataatgtctgtcttatttccatgttccactgaaaagattctggcccctatatataaaatttaggtgatttcttatcatcctagcaaaataatgatactgtgaagtcatatgaatttcaaataaagcaaggcctctgaataaaacaggtaagctccaaaaaactttcctccatcactgcctctgttattcagcctgccagttatgagatgagaacagcaatcagaacatggaaaaggtattgtgttttctggctgtaatgttggatgtcatgtgccaattaattttcctaagactcctttatcctatctgccttctctagattactcaaggactctaattagaaagctacagctactattgttaccaaactcttaggagttcagcaggaagctttaatttatttctttacaatttaaaaatactgaaatgcaaacctatttcatgcagagggcagaccttggggtcagggatttagatagtagcccaaatcaaatgggttttatt

SEQ ID NO: 586616 - DNA, 4001 bp, Homo sapiens
aaagttaccagaagcacttatattctccacaacctctgcagtacacccagatggccacattcatatggggaagccatcaggcacagaaaggaagcatgtcatagagtctgaagccaaaccaacctaaactcaaagccttagtttcctcatctgtaaaatggggataactatgcctaactcacaacgtgattggatcgtgtatataaaattcaacatctggcacacaaaaagcactcaggagatggaaaccatttatctgctgtgtcttatgacagatgaatccacgagtatcagatgggctctctttgttgactaaagccaagagacccttgacaatgatctcttctcctctggacacacagggctggaactcgcaggagcaggactgagacgggaggtcctaggttagagtaaggtgtttgcactagctgtatactgcctaaaagagactcattctgtcaccccaaccctggttccacccagctatgggaaatctctgcagaggcttcaggtgtggatatgtctatgggccaagagcgggggtgggaggcagggaaagtgatgactgtgaccttgagcaaggcacttctctgccttagtttcctctttggtaagcagagtggacctgttccatgatccctgaagtcctccctgtgcttctattgtaccatcccctctagggcactggttataattctcacaggtccaagggacaccttcaaatgtgttccaattcctcccagccactgagtagccctttggccctgctcccacgagaaaggaggattcggagcagcgttcacggctttctggtttttgttctgtgtgcagcagctctccacccctagctgctccttccacctttccttttccgcctcaaagtggtcaagtgcctgtgcaggggcaatcgctggcctgcagtgtcagctcagagacggtttccagaccatcctgtgtacaggctcagggtggacaaataaacattttggagaagcaataggaattaaatcatttcttccacaacaaaacccttatgcttcttcataaatcatgcctcttcattccatactgatgaacagtcactaaattgcatctgttataaaaacagcccttactcctttcatgcccagacacttaagaatcaaaatattttcacactccattgtactaataatgccttgcagaagtaataccaatagctatttccctggaaagatccgtggccagggcgctttccaagaggttttctttgaatgttctttgtgtcctgctgtacggggggacacggccggcctgcccgcatctgggggacgctgggcttgtcccggtaatgcaatactcttttaaagcacacctcgaatccacctcttcgccccgacaataaagtatctcaaaacattcgatatgccacatcatacagccttgacaaaaaagcacgccggtgcctgcattctgcaggaaaaaccaggcacattctgagatgaagccaccagacccgcttcgggttccatggacaagagaacagctttgcagaccccttagcaagaccggccagaagccgctcgcttgttcgttttaattatttatttcccccgtgcctttatttgttgggccccagaagaatggcaaagcatcttccagaaaggacggcgagggagctggagaataaaagaggatgggcggggaaagccggggttttgaaaacagcagcgataaaggcaggcggggtcgcggccgcgttccgagggtctcggcggagcttacctggggcgcacgaggccggccgggccagcagcagcagccagaggccaggaagcagcagccccgggcggcggcggcgggcgcagcgggcggaaggccgtcggccgctcggccccggggccagcgcgaccccggcgcggggcttcccctccatggccgcgcctcggcgtcggcgccgcgcccccggcattcccggccggcgccccggcccggcctcgcggctcagcggctctcgggtccgggaggggcggccgctgcggctgcggctgggacggggcgccgcgcaccggcgcggagggaggccggagaggcgggggcgggccgggccggaaccgaggacaggggcgccagccgcacgcccgccttgccgctccgcccccttcggagcctcggagccgctgcccggcaacgcgcgggcccgggcgcgggacggcgagcaccccctcccggccggccggacgcctgcctgcctgcctgcctgcctgcctgcggggcggccggggcagcgtgcgcggggctcggcgcggcagaggcggcaagggcggcgaggcggcgcggcccagccctcccccaggacccgccttccggagggagcgcgaggggctcggggggcctgggccgggcggtgccgccccgacccgcacccaaccccgggtcccgccgcgcgttccccggggcgcccggatcagggtaggccggcaagccgggggaggggtcctctcgcctccctcgctcctcctctcccgccgactccttgcgggcagcaggtgtgtggggcgccgcgctctcaggacagcctcggggccgcggaggggacaaagccagacaaagtcgggctcctgcgctagagctcagcgtgcaaggcaggggcgagcagagcgcacgcagctctcccccgccttcctgccttaagaaggtgcggccacctctgcgggtcttcgggaagcgaccctgcgctcagggcctgggaggcccgcgggaccctgcacttagcaggccttgagcaggcggctgctgaagcgaatgggcgtggagctggggagacccgcaaggccaggccgttttagggaaagtggcgctcctgagaggtggagagaatgcccagagagcgtttgagggttggagtccgcggggggaatgaggaacgggaagaagggagttgacatctgtcaagtacctactgtgtgccaggcacgtcactctgaagacgccccgtggcttcagggtctagggaggaggaattggaagttttgaatcgttgcatcccactggcattgttgcatcaagcagatattaacggtgtgtgtgggggacactatctcgtgcagaaaaactatggcagacagcggaaaaggtgaatcattacactggcagagggatcctcgcggctattcagtcgggttcccctgccaggcccagcccttgaaggggctgcccagccttgcagctccaactcttctggactccttgcccttggcgaatagttcttcctaagaataggacaggggcactcttctgtaggtacacacctggtccttacaggtgggtacttgaaacctggtagtttcaaggaaaatgagaataaaggttaaaaaaagcttttgttgatgttcctggtgtttttacacgttattgtaaccccccatcatacagcccctatgtttattacagtaactgctcctgtctcccaaagagggttctgcgtgcacacccaggtaagtacctaagagaaactgcccagatatgtctggtcccaggacaccatggccatagatctgggacctcttattcacacacttatctttattctctgaactctctataacagcacatttgaccacaaaccactgccttcgtgcaactcttgaatggtcttgtcctgttgtgttgttttatcttttatgaatttatgctttgcacacacagcccccaccccacctccaataaattaatatgaaattcaaatatggtgctatcctgcttaggatttctcatagccccagtaagccctcagtagacaatcgttggtttgagccagagcatgcattccgcccgtgaagaggttccatcttcagatttggcctcagcctcctgcaagctgccatctacactagacccgttggtgtcagagaaaaaagcctccctcggccatgcgcggtggctcacgcctataatcccagcactttgggaggccaaggcaggcagatcacctgaggtcaggagttcaagaccagcctggc

SEQ ID NO: 586617 - DNA, 4001 bp, Homo sapiens
gaaataaccccctagttagccattaggaaattaacagaatctaccactcctgagattacataaggtggggcagctgtgtccacacgcctctatttccctgaaagttatcaatggttatgagcggtcttgtttcgggccccgcccaaacttaaggtcgcttgagttttctctctgagtgaagggggaactagtctggaccacccttttcttgctggtgcctttacggtagttttcaaattgtttaaccaatctcagcgtgagagtgagccaggaagttaccatcctcaagtaggaatccaaatggggagaagggctacgacgcaagcgcagggttccaaatcatgcaacaggacctgcaaacagactcacaccccagacatcaagaagtatctcccagccacacatctacatggagcttatgtggcctctcctagcagaggtagctggggcaattgggggattggagggcataagcctcccatcaacctgggatccctatttaaaagatgctaaaaataaattagtaaacattgctgtttacagaaatagaaatcatttctgtttccaaaggcctctcaccatcccagtcctggacatttccaagactgccacccctgacaccctctccaaggtccgccctggtggatgggtgagacaccagagtcctttgagactgggagctcctcaggcatctgagaattccagtttcacatccctggttccagggaggggagaatcttcagtactctggagagtacgggagttcatcccttcttatcagttcctgggggctgtcttgaggcaacccccacttttaggatgatatacacgttgcaagaattcccgctattttccggcccccagtacctccccagagtccacatgtctgcctggacccaccctcagagcagaggaaccagtctgtgccttggtgtaatgactctgggaaagaaggatgggcagagagaaagcagggacaacggcctgggggatcatccttgagggtaagactgacagcaatgactgtcctacaggcaggtggtgaagctgggcgccgggccgggaccggagccggaggcggagctttccacctcgctggtgagtggcgggtcgatgcggggagttcgacgacgtccccggtactcgatcatatctggatgataggttgggtggcggcgagcatgcttggtcaggtggtcgctccgggagaactgcttggggcagagggggcaggagaagcgcttctcgcccgtgtgcgtcctgtagtggcgggccagctcgtcggaacgcgtaaacttcttgtcgcagtcgagccagtcgcaggagaaagggcgctcacccgtgtgggtgcgctggtgggacttgaggtgcgacgacttgtaataggctttggtgcagcccgggaaggggcattggtggcgcttggcagcaggtgtgacagacctcctccggggcgcctgatccgcggcgggggcggggcctgcccctagggcccctccagagaacccaccagaggctgctggtgcgcccggggcagcaggcgcgcttgggacggcgggcgcatcggaggagctctcgggagcgcagaccgccgcggcgccggaggcgggagccagctcggagcacggggtctggacggagcacgggatcgggtcggagaagccggacgaggcgcgtggagcttcccccgagttctcccaggagccctcgccagagctgccgcgcaagtccgcccagacgcttgcagccagcaggtggggcgcggcgccgcccgcgccggggctgggggcggggacctgcgggagctgggggaccgacgcgggccccggtggccccggacccggcagagcggactccggcggcgccgcacccacctccgagccagcggctccacccgcgccctcggggtccggcgggcggcggtgaaccacggcgcccgcggacatggacaccaggcactcggcggcgaagtagtccaggcacgccacggcggccgacatgctgggaccgcccggccgccggcgagcgccgtccgaacgcggccggccgcgggcgacggagttcccgggagcgtccgtcccgcagcctcggagcgagaagcaggaggccgggtgctcgccgcctgccgcctgctgccgccgccgccgccgcagccgccgctgccgccgccgcccgcgcggagcccgccccgcctgacgcgcccctgacgcaccggagcccgcgggggcggcagagacccgccccggcccgcaggacaccccctcggaacgcgcggcccccggctaagtcatgtttaacagcctcagaaattatcttgtctccgcgttctttcttctgccggcgagccaggtaatggtaacagagcgaaactccccagtcggaacttctgggttgcagcagcctcgccccccctccccgcagcccgccgcccgctggtccgtcgccagctgggtgtcccgcggagtcccagaaagttttttttttttttaaggaaaaaaattgctaatacctgacatgtctttcggttcataattgcgattgttagcgaagtggtctcgaattccatttcactccccgttcgccgctctcagactaaattgcaaatatccccaagtctgtagcaaaaaaagttttctcattgagcaggtcaactgtgaacccggggccgggagcagttccctaaatagatccgctacgtagccattaattaatagcatctcgaaccagaaacagttttaaccttggaaaagcaaagaatcctctcccggttgaaattgaaacttaaaatcctttgagtaacgatttaactattcagccaacgaaagaaaaatgcatgtttaaactgcattaacctgtcactggcatccaaacaaatttaaacgctgagatataaattatagtctagcggcgagataaacacattaaaatggactcccaccattttaataatagaaagtcacgtttccaattaggcattatcttgtaatttgcttttgacgaaagttaaatgtaaggaaatgcagcacatgatatagaatgctcatatggtgttttgtgattgtggaggtttgccttttttataatcaaatgcatgtacggtttcttttacgtgtcttcattgctctcattttttccctcgtttttctttttaaaaatgtaaaactacatagaaaaacaaacaggataatttctaaaaatagtcatatcttagtttttgatgtatacaagcttttatatgagtgaattgtgtgcattttatttgtagttcttcagtactttttcttttgaaaattaatacgtatgtatcaagaataacatacgttcatgtatttactgcctagggtaatcaaatgtgaaatttttgttatagttgtttcatgtttttatttatattaaacattacagatagagttgaatgtcactttgtttccctccccagttccattcacctttctccctcttcacttttctaggtaattagtattataaagtggctatttaatctgcatttgttttgatacccgtattacctaattatacatgtaaatatatgtatatctccatgcttatttattaaaatttttaagtaaatggttcactagtatacatatcattttgcaacttctttccctcaatatgattttgacagctatccaggttgacacctatagaatctactttattcatttcagcagtttttaaataatattgtcagtgttattatttttaaggcgattccattgcaaaacagttaatttttctgaagttcctctagacgattaactcttcgttaatctacacattaaaatctatcagatagaataatttactagctgttttaattttattatttagaaaaaatgtgaagatatttaaaatgcagagagaacattacaagcacccatatacctgtctcatataatgaatatgttaacattttgttatatctccctcagatctattaagtattcaacatttctgataaaattgaaggtcccctt

SEQ ID NO: 586618 - DNA, 4001 bp, Homo sapiens
agaaaagggaagcagaaaaaagagactgatgaccccgctttacaaattttcacagtttagacacgtttatctttacctccggataaatggctgttcttggtcttgtgtgctaagggaatgcagaaatagctctacactgaagccccttagcagaaatcatggcttccactgccatcacgtggttgaagtgaggaagtgcaccaagcaggttctaggaacctaggaatgcctacttgaagcccatggtataattaatccgtgatcaaagacctaaagattgcggtagtagagggcaaactggtgacagtgtttgctaagagattcatcttctaagctgccaatacacaaaaatctaagtttttattattaattgggagtaagaaaaaagattgctccttttttctttttcatgttaaagatcgtatatttagcaattctaggatgcccagtctgatattaacgtctcaaacccaacttctggtatattatatgactacttacaaatgcctcgatttaatgcatataaatggggtaatgtacatttctagcacacatcaacaacctcatcacgaacataagcaattgtctcattaaatgtgctaaattccctttgtcatcttcaatttaatcaaataataatttttgactagaagtataaggtacagtcttaagcacaattcataaaaaccaattcatcatgttctcaaaactcatcagctaaacaaatatatcactaatataatcaatattattcacaaaaaacacgatgaataattaacacatcattcctgatagttcttttcatagtaaaaataagcttgcccagtgggatatttgacgttctctgcattatttaattccctaccttccttctactagattgaatattcaattacaaacatacctctttaaaattgtctacacatacatatccacttgattttattttgttttcaaaagcatctgaactcaaggctagggcactgtagaccaaaatgtcaaataattgtattgggtacatttttccaattctcagttgtttttatattgtaaacacagcataattgtgtcactaagtatatttttgatcttcactttctccccttaaaacctagacaccattatcctgtctctgaacattccaaaatattaataatccaactagttttccctaatcctctaggttctctttcccatacactccccagccaacactcccccacccctttcttccgtttcagaatgcctcttacacacacgccccgtgtagtttttacaaaatcactccttggaatgcgtttccttcttctctccttaacttggcaccctttttgaaataatttcccacagctaggcgccaatgtctttcatttacaagatcaaactgcggaaggggaagagattgggaatcgagtaaccgaaacatttggaaatgtcaatgagacagtggcctctcctttgaaaagaaaacacaactctcagcacagagctttcaacagagcacagatacttttcttcgctgtgctcctgttccctccctgacctcaaagacaccttcccttttctctgatccccagtccctctgctatgcgtggggcctgcctttcctcctcccaaggaaaagcaagccagggagaaaaagaaaaggtagcagtcaccttcccgcccgcaagcggtcaggaccctgtcccacgactcacctggcaggtgcggccgcccggagagttgcacgaagcggttgagctggccagtcccccgacccccgctgcccccactgcccccgccggccccgctacctccgccaccagcgccggcggcgcctcctcccctccggcggttcctgtcccagccctgggcggccgacatgacccgctaacgattgccgcagcccggtcccgtcagcgcctgacccagcggaaccagcggagcctccttcctgggctcctccagagacccaggagacaggggaagggggcagcgcccggtcccaccagagaccaatgacttaccgccttggtgaaaggcagccaatggtcagtcgttttcttggtaggtggcgggaggcggagagaaacgtggtaaccatagctatggctaaaaaaaaaaaagtagggggagagaaaggcagaagcagccactcctagctctcatcgtccgctctgggctggccggcgtcaccccgactcctgcggggccaggcgggccaatcgaagaccgagtgtcagaggccgcgcctgcggaaagactcccggggacggccagtgcctcagtcttggttaggattcaggaactttttcccataaacattgcaatcagacactggatatacgcataatacacatatttgggggcaagacggtattctgccagcttttcagattgagatcccattcactgatggttgacacacacaaagggcttgcttggggtccgggtaggtgaggggacccaggggcggagtcaaagctaaaatgtaagaaccagatattcctgggtttcatttgtctttcagtcggcttagctgcatttgtccctgtataagccacgtcccaatcaaacagttttaaacctggttaacaaatatgggaaaatgttcactctcacctgtaatcttagaaatacaaaataaaaccccaatgagaaaccatttctggtttattacatcagtaaagacttttcaaataacacctggcagtgtgtggaatgccaagaaaaaggtattctcatagatggctgatggctctgtaaatatttttgttcgctcaaactccttttggctagtagaaaattttaatcagcttggaagatatataatcaagaggaaatgtaaaattaaataaaaggcagcaacgggtatggaagatcaagatcaaagaaaatttttaatgtgccgatcaggagtttctattgttccaaaattaaacagaaattttggcttgaaacttactgggcgcaatgcagactgggaaaacatactatacactgatgtttctgaatgataaggaaaaagcatatcaaattcctcaagggaaacaaaacttttcaaggtccttagatgtgacagatttttttttcttttgcattagaagaaccttacatggttgcagagaaaaaaaagaaactctgctggagctgaggacaaataccctttgtacctggtgtgcaaatttctggtcgccactggcactgcctccttgttttcctacttccagtccctgtaggcagaaatgttttagtcactagcaccatagcacgctgcttatgaaaatgtttgagacttgaaaaaaaaaaaagcctatggttctaaaatataaaaaccaaaattaatatatgttaactgtttttttttttttttgagacggagtcttactctgtcgccgagactggagtgcagaggcatgatctcggttcactgcaacctctgcctcccaggttcaaacaattctcctgcctcagcctcccaagtagctgggattacaggcatgtgccaccacgctctgctaattatatttttagtagagatgggttttcaccatgttggtcaggctggtctccaactccccatctcaggtaatccacctgccttggcctcccaaagtgatgggattacaggtgtgagctgctgcgtctggccagttttttatgtatataggcaaaatgcagtcttacacattttacatgtttaacctgtctaatcctcacagaaatcctatgaaatgctgttttcccaatttgcaaagcaaatttgtagagatagggcagtgtgtggggatgagggggtggttttgccttgttgctccggctagtctagaactcctggcctcaagccatcctcctgccttggccttctaaagcattgggttataggcatgagcaccacgcccagccaaagtagattcttaagtaacactttttaattaatcaactgggagagatgaaataagaaaataacatataaagttttggttgggcgcgatggctcatgtctgtaatcctaacac

SEQ ID NO: 586619 - DNA, 4001 bp, Homo sapiens
tggttgttcaccaggtaaccattttttccttcctactcagtaacagaaccctgatttttcagtaattgtacttctattgtaacggtaaataagtgatgttaatatactccaaagctaagaaatgtgagtcactttttaaatccaaagagctaaacggacagtctcagataatcctctgctcctcaagtaaatatttgctgctgcaatccagtttcaccctatttagggattaaggcaatgctttacaatgctatgatccacgaatgaaaacatatattcgagggagtgggagggaacctaatgagtcttcaacgagtttaagccctggttaactatgttcaactaccattacaggcaggcaatagctaaatgcaccagcaatttgaagtctgtggtattgtagatacaaaaaggtttacatgaaaggaacatgaatttgaaaatagatacatgaaagtcagttacataaattaacgaattcaggcattcacagtacttcagcacaaaggccaggccaggaaagatttaaaagcattcccacagactgcactggtgcactgtagcaggagctggtgaacaaagacaaaatcccagcagtcagcgtttgcttatagaaaccagaagttaatatcttcataaaaatcttaaattcctctactgttgcccatattcccagcagaaccaccagacaaagcaaactaggttttgcagttacacataactcacatcctgctttgtccccttgaaacaggatcccagtcaacaaaacccaaacattcccacaaatctacttagatgtgtattatctataaataaagcttacagaaaggaaaaagtgactttctatgcttatcggtgtagatgttatggaattaaaaaaaaaaaaagcctctttgtttcaccttcgccagcgttaaaatccgttcttttcataacccacctttcgccgatgtgctgcagaatttcacgaatgcaccacacaccaaggacagaacaaagagctcctcttaataacagaggcgcacagtgcccttagaagatggcatggtatttatcgatggctgcttctgctctaaattagcacgaacaggaggactcctcttcaactagctccaccggggaacacaggagggggcggggatccttatttaagagcagctgatgtcaggccagcaactctcctccctttgggggcttcggtttgggctatgccaacgggtttcttcacacaagatctcacggcaccttaaaacggctcgccaatggaaggatcctcgccccacaaagagataactagggcagagctgttacacaaccgatacccgacggcgaaagccagcctgaggagtcccccaggagtctgacttgggagctacatcctcggcagacgagaagcacttttgctcgagaattgttttacgcgcccctctaccaactgcggaatcgctcgcctgcgaaaacggaaggaggggcgaggacagagaaagaggggcgcgatccacagggcgcggggttccaccccgggaaccaggggcccgagccccggaccacctcccaccgtcgtccgtcactcccacagaggcggtacctgtttccgcatgttattcatgacgcccatgaaacccgccaacaatttagcttcttcccgagcagcaagtttcttctcggtcttcttcttgctgctcttctccaccccagaggctgccatcctccctcagctcggttcacgcccggggctcgccgggccgggcgaggggtcgcactctctgggcacactggggattctatcgaccaaacacggcgatcggcagtgcagctgcagcgcccagctctggaacgcgcggcaggcggcggtggctcggccactgccgaaagacaaggccgggcggcccccttagaaacgctcagggagcgacgctaccaactgggctgcgtccccgggcagaacccgagccctgcccaggagcctgcgcacttcgcgcaaggaggcgggggcactatgaggagagtcaggggcggggcctgacacgtcacagtggcgcgccgttccgagcaatgagactgcaggcacaggtgcggccggattccctgtcgctgtcccgcgctgagtgaattttgcctcggagctggtccgaggtcgcgcctgctcttttgtgtgcccaaggcagatttccaggtttcggttacgtgattatcttttttttttttttttttttgataattgggttgtggaacatgcaaaggtgtctcccatcagtgtaaggcttcatgggacagggtcggtgttcagtgcagtatctgagcctggtgtatggtaggcgctcaataaatattaaatgatgaaaggatattactgcaagttaaagtcatgttacacggagcacaagatttattttcgtgggattcataacgcaagagcacacagtcccgttggtgtctccttggcgtgcaatgaatgtctgcctaactaggctggcttactgtgtgtttacaactgaaatcagttgtcagtcggttctagaaatcttcagttaggcttctctaagtgttttacgggaacacggaactcaatcacagccctcatggaaatgttttttgtaaccatattctttctactgtatagtaatatacaggattatttgaaattgtacattatttaacattatgaaaactttatatctcattggttttcctcctcggtctatataggactatacagagacattttatgtaaaataatttacaccattgaggcttttttttttttttttggaggcagggtctcggccctgtcgcccaggctgggggtgcggtgcagtggctaatcatagctcactgaagcctcagcactcctgggctcaagcaatcctcccatctcagcctcccaagtagctgaaactacaggcgtgcaacaccactctgggctaagttttaatttttaaatttttttggtggtggtggtggtggtggtggtggtggtgaagaggtcacactatgttgcccaggcttgtctcgaactcctggtgttatgcaatcctcccgcctaggcctcccaaagtgctgggattacaggaatgagcggccaggcctggcccacagtatacttttcttgttgaggacaaaccatatagcataatccagatgaaagagcaagctatatatacgcctcaatttttacaaaagagtaagatacttatgtctctgtactctttatctttcttctattaatctagaggttctcagatgtgcctctattttaactagttgatttggggatttcaggtgaaccctggcaataggaataatttattgttaataaaattataaatgagaaaatttttcattcactttattaaatgacccaggacactgaagaaaaacggaataaatttttttcttttttttttaattgaaaagaagtagaaatctgtcttctaactctaaggccttgggagatgaaggatccgtgattcaaaggcagaaatgtaagtgatgaaaaagaatgctgtcctgtaataaggcaaaaaagaaacgaggaacagcatccttagtccttgatgttagaacagtctttttacatattgctgaatataaaacatcaaagttcatggaagagccataggattcagagctcaaagaggccacagagattatatagtacagggattaagcatgagactttgcctggatgcaaagtcaaacatctcaactttctagttgtgcaactttgggcaaattgattaacttctgttatgcctcagtctccttatctgtgaaagtagaacctactacatggaactggcgtaaggtttataaaaatgcttagaggggtgccagcacaagacacttaaaattactttactgagttaataatacacacatacttcagagatattttgggttctgttccagaccaccacataaagtaaatatcgcagtaaagtgaatcacacaaattttttggtttcccaaaacatatgcaagttatgtttacactatac

SEQ ID NO: 586620 - DNA, 4001 bp, Homo sapiens
tactacagagagatggaatgacccaaatcatgttatctaaaataacaaaatgaaataatgagagagcaggattggaactgaggtatgctaatctcacaatgttctcaaattcttgaaggaatgtttctggatgtttacagaggggtccttgtcatctaggcactcattatcctgatccttaaagcaatgagattgtaaagggatgtaaaagtagtcataacacaaaaatatttactaaagaacaagagcacttataaagttggtcctcactcaaacattcctactctggctcagaccagccactgtttctgccaattcccatcaactgcccttgtcagtcattctcggtcaattgtttcctgtgttatgatgttaaacaggacaatacaatataaccataatgtaaatcaattgcgaagtgaaactgcacatcttgcaaaagatgcatgattccatgaagttgataaaagtgctattggagaactgtttgaatcacatgccaaaccactgacaacaggagaacctggcagattaaggtcagttaatcattgtggaggggacccctggttgttcaccaggtaaccattttttccttcctactcagtaacagaaccctgatttttcagtaattgtacttctattgtaacggtaaataagtgatgttaatatactccaaagctaagaaatgtgagtcactttttaaatccaaagagctaaacggacagtctcagataatcctctgctcctcaagtaaatatttgctgctgcaatccagtttcaccctatttagggattaaggcaatgctttacaatgctatgatccacgaatgaaaacatatattcgagggagtgggagggaacctaatgagtcttcaacgagtttaagccctggttaactatgttcaactaccattacaggcaggcaatagctaaatgcaccagcaatttgaagtctgtggtattgtagatacaaaaaggtttacatgaaaggaacatgaatttgaaaatagatacatgaaagtcagttacataaattaacgaattcaggcattcacagtacttcagcacaaaggccaggccaggaaagatttaaaagcattcccacagactgcactggtgcactgtagcaggagctggtgaacaaagacaaaatcccagcagtcagcgtttgcttatagaaaccagaagttaatatcttcataaaaatcttaaattcctctactgttgcccatattcccagcagaaccaccagacaaagcaaactaggttttgcagttacacataactcacatcctgctttgtccccttgaaacaggatcccagtcaacaaaacccaaacattcccacaaatctacttagatgtgtattatctataaataaagcttacagaaaggaaaaagtgactttctatgcttatcggtgtagatgttatggaattaaaaaaaaaaaaagcctctttgtttcaccttcgccagcgttaaaatccgttcttttcataacccacctttcgccgatgtgctgcagaatttcacgaatgcaccacacaccaaggacagaacaaagagctcctcttaataacagaggcgcacagtgcccttagaagatggcatggtatttatcgatggctgcttctgctctaaattagcacgaacaggaggactcctcttcaactagctccaccggggaacacaggagggggcggggatccttatttaagagcagctgatgtcaggccagcaactctcctccctttgggggcttcggtttgggctatgccaacgggtttcttcacacaagatctcacggcaccttaaaacggctcgccaatggaaggatcctcgccccacaaagagataactagggcagagctgttacacaaccgatacccgacggcgaaagccagcctgaggagtcccccaggagtctgacttgggagctacatcctcggcagacgagaagcacttttgctcgagaattgttttacgcgcccctctaccaactgcggaatcgctcgcctgcgaaaacggaaggaggggcgaggacagagaaagaggggcgcgatccacagggcgcggggttccaccccgggaaccaggggcccgagccccggaccacctcccaccgtcgtccgtcactcccacagaggcggtacctgtttccgcatgttattcatgacgcccatgaaacccgccaacaatttagcttcttcccgagcagcaagtttcttctcggtcttcttcttgctgctcttctccaccccagaggctgccatcctccctcagctcggttcacgcccggggctcgccgggccgggcgaggggtcgcactctctgggcacactggggattctatcgaccaaacacggcgatcggcagtgcagctgcagcgcccagctctggaacgcgcggcaggcggcggtggctcggccactgccgaaagacaaggccgggcggcccccttagaaacgctcagggagcgacgctaccaactgggctgcgtccccgggcagaacccgagccctgcccaggagcctgcgcacttcgcgcaaggaggcgggggcactatgaggagagtcaggggcggggcctgacacgtcacagtggcgcgccgttccgagcaatgagactgcaggcacaggtgcggccggattccctgtcgctgtcccgcgctgagtgaattttgcctcggagctggtccgaggtcgcgcctgctcttttgtgtgcccaaggcagatttccaggtttcggttacgtgattatcttttttttttttttttttttgataattgggttgtggaacatgcaaaggtgtctcccatcagtgtaaggcttcatgggacagggtcggtgttcagtgcagtatctgagcctggtgtatggtaggcgctcaataaatattaaatgatgaaaggatattactgcaagttaaagtcatgttacacggagcacaagatttattttcgtgggattcataacgcaagagcacacagtcccgttggtgtctccttggcgtgcaatgaatgtctgcctaactaggctggcttactgtgtgtttacaactgaaatcagttgtcagtcggttctagaaatcttcagttaggcttctctaagtgttttacgggaacacggaactcaatcacagccctcatggaaatgttttttgtaaccatattctttctactgtatagtaatatacaggattatttgaaattgtacattatttaacattatgaaaactttatatctcattggttttcctcctcggtctatataggactatacagagacattttatgtaaaataatttacaccattgaggcttttttttttttttttggaggcagggtctcggccctgtcgcccaggctgggggtgcggtgcagtggctaatcatagctcactgaagcctcagcactcctgggctcaagcaatcctcccatctcagcctcccaagtagctgaaactacaggcgtgcaacaccactctgggctaagttttaatttttaaatttttttggtggtggtggtggtggtggtggtggtggtgaagaggtcacactatgttgcccaggcttgtctcgaactcctggtgttatgcaatcctcccgcctaggcctcccaaagtgctgggattacaggaatgagcggccaggcctggcccacagtatacttttcttgttgaggacaaaccatatagcataatccagatgaaagagcaagctatatatacgcctcaatttttacaaaagagtaagatacttatgtctctgtactctttatctttcttctattaatctagaggttctcagatgtgcctctattttaactagttgatttggggatttcaggtgaaccctggcaataggaataatttattgttaataaaattataaatgagaaaatttttcattcactttattaaatgacccaggacactgaagaaaaacggaataaatttttttcttttttttttaattgaaaagaagtagaaatctgtcttcta

SEQ ID NO: 586621 - DNA, 4001 bp, Homo sapiens
tcaggagttccagaccagcctggccaacatgatgaaaccccctgtctaccaaaaatacaaaaactagccaggcatggtggccggcgcctgtaatcccagctactcgggaggaggctgaggcaggagaatcgcttgaatccaggaggcgaaggttgcagtgagccgagattgtgccattgcactccagcctgggtgacaagcgcaaaacttatttcttaaaaaaaaaagaaagaaaaaagaaaaaaagaaaaaaattggctatctcttgccccaaattcaccaactactccctccagtctccttatccaggacagtctgtatcttttgtgggctctttcttctgtgtcaagctccccctcccccacaccacaaaataaccagccgcacatactactggcacatctaccctgtggtcccactcactatctactgaatggatgagtgtttggggctaaatgttcctcagtgtggtggaaagaaagcagcagcctggaccttccagaaagtccttggcagtgcagggatggggggatctgggctgccacccctgccacctgatcctgaatgacttcccctcatctggagttccttccactgctacttctcaaaggtgctgcgcatgctaagagggaatttgaaagttcgggagtgcgggtaggggaggatgagaaggggagtggctttactcttttttttttgagacggagtttctctcttgttgcccaggctggagtacaatggcatgatctcggcccactgcaacctccgcttctcgggttcaagcgactctcctgtctcagcctcctgagtagctgggattacaggtgaatgccaccatgccaggctaatttttgtatttttagtagagacggggtttcatcatattggtcaggctggtctcgaactcctgacctcaggtgatccgcccgcctcggcttcccaaagtgctgggattacaggcgtgagacacggcaacaatgtgaattacagttacgtagacaggaatgttattgattgtaagcccgagaggccagatcgggttggggatcgggatggccaactgggtcccttagtcggtcagctgcccagcggtccagggctgggcgggtgtgggggtttcggctacgtccacccgacctggcggcgtcggctgccggcgcaggtgagcactcacccgtaagcgttacggcccggggcagcttctcgtcgccgtccaaccccgcgcggggcaacagcgccgcatcctccttctccagccccagctccttgcagcggcagcacgtgggggagcccggggagccggcgcttccttccgcggggctggcccggccctctgcgtcgcagccgctctccgtccgggctgcagccagcggcgagcggcggccccacgtgccgccctgggatggtgcgcgcagcaggagctggtgcgccgggtccgcgtggcgggagaaggcaggggactcgggcaccggcaccttgaggaagcgcgtggagggcctgggcgatggcgtgctgctgccaccggccgcgcccacgggcttcacgcgcacatctacctgcagctccatgggcgcccaggcgctgggcgcaggctcagccccgggcgcctcgccattccggggcagcttgaccaaggcagggcccggtgacggcggctcggggcagaccccgtagcccaggctgagcggcggcacgcgcggggacccggggcgaggcgaaggcggctttttcttgctcgagggctccaggcctgcgcccgccgccttctccacggccccggccggacttgggctgctttcgggaccttcaggttgtcgcaccttcgcgggcacctgcggctgctccagcgtggggaccaggcttcccacgggctccattgggagctctgccccggcttggcctccgggcgcagcctcccaagactcctccatcccgcgcgccccgccacccggagacgctgaggagcgcacctgggcccagtgcagaggagcttcgctctcctccgtccggattggtccagccgcgtcgccgaagttgtcaggccacgcccctccccgaaggaccccgctgtgattggctgtggctgaggttctgctgccccgacccccttcgggacacagccccggcctccaccaggcactgggagggagctgagaacggcagcggggccaggcgagggttgcagggtgggcgggagctctcgggagaaaagcagaacaccagcggaggcttgtggcagggaacccggagccccgcctgacccttccctcttctttgtctctgacctcacccattttcccctccagccctatgccggggtgttggttttgagagttacagtttgggcggggaaggattggccaagcctgtctggatcctgggacctcagagaaatcagaatccaaaggaattggggcgacctgtggaaaagtagcccagttggttgtcctgacaatccagcagggtttcgaaaggactctccatcatacttgggaggactcccccactgagtaacgctaagagaaaagaaacagggcgtggataagcaattcttctttttttttttttttttgagacggagtcttgctctgtcgccaggctggagtgcagtggcccgatctcggctcactgcaatctccgcctcccaggttcaagcgattctcctgcctcagcctcgtgagtagctgggactacaggcacccaccccaccacgcccggctaatttttgtatttttagtagagacggggtttcaccatgttggccaggatggtctcgatctcctgacctcgtgatctgcccgcctcggcctcccaaagtgctggggttacaggcgtgagccaccgcgccccgcctggcctctggtatttttaagtgcccccagggtagggttggcagataaaatgcaggccactcagtttaatttgaatttcagttaaacaagggatagtttttagcatagtagtcctcccttatccactgggatagttccaagacctcccagtgaatgcctgaaactttggatagcaccaaaccctatatatactgtttttttctatacaagcggtcttcaaaaggttcatggaaaattcatactatgaaaaaaactatgcatggatttgaaaattttttggcaccaaaataaatttgtactaacttgttatcacatgtctcgacaagatctagtttgaggcactaagaaggataagacatcagtttgaaaagagctcctgtcagagcaacaaggattctgctaaatttgaagcaagaataatcatcacatttatggtgacatcattgatatttttatgaaaagctcatggggacaatgcccccaagaaaccagcagtttgcaaatggaaaactcgttttaagaagggatgaggccaggcgtggtggctcagcctgtaatcccagcactttgggaggccgaggcaggtggatcacttgaggtaaggagttcgagaccagcctggccaacatgctgaaatcctgtctctactaaaaaagcaaaaattaagctgggcgcggcagctcacgcctgtaatcccagcactttgggaggccgaggtgggcggattgactgagctcaagagttcaagaccagcctgggcaacacagtgaaaccccgtctctactaaaatacaaaaaattagctggcatggtggcatgcgcctgtagtctcagctactcgggtgcctgaaaatacaaaaaattagccgggcgtggtagtgggtgcctgtaatcctagctactcgggaggctgaggcaggagaattgcttgaactcgggaggcagagtttgcagtgagccgagattgtgccactgtactccagcctgggtgacagaaggagactccatctcaaaaaaaaaaaaaaagagaagggatgagacaatgttgaggataaagccctcagtggcagaccatccacatcaatttttgagtaaaataattaatcttatttgtgccctcatgaagaggaccaacgattaacagcacaaa

SEQ ID NO: 586622 - DNA, 4001 bp, Homo sapiens
aatgctttgcaaatagtgaaatgggaggcaatcaaggtaaaaccccaatatggcttgtcctgagttgctttaaaggatgcaaaaaaaagtggcttacatgtctaaaaattacttaaacctccacttccttctacaaatttcagttaatacagaataagggcattttatacttgccactgtattacaacgcaagtggcataataaataagtcctaactttgtatcacgaacaagctaatgtaataatgtacacacatcctgtacttgcttccctcacgattatcatagctaggtaacagctggcaataaaatatggaggcaagttgaaggccctgaatcattttcatagtaaaaggacagcggggcaagaaaagagcacattcaagtcaagagctcaatgggttcccacaacccagctctgctatgcctcagttcacgctactatttttactacaaatcaccaaacaacaatactattactaagtgaatgcacccgaaccaaagaaacagcctatccataaacgtgctggcttccttcacgtcccagcgcacccttccactcccgacagttcaatgagaatatcatctcacgaaatgagtaagcacacacgccattctacaacttcgagagacattcacagttcttccacggcacacgcgagagccacagaagccgagcagttcgctggcactaaaacggtgtcttaatttacaagcaaagccgtcaaataaccgttctgtaagaagacatttctggtcctctaataagctggggtccagccctactgtacgctcaaaggcaggcgaccctattcccaagccccttacagctaagacttacgagggaagcgacatttacatctgcactctctccgaataagtgctcttggtattctgccttacgaggggacgctggctacgtctccaaaacttaggcaggccgttccccgaagctgggggatcccacaggacttgtgctttcggagcccgggagtgcggtgctgggtgttgggggaggggggaggaagaagtcaaatggcttcctaatatatcatcaaaagaagaaaacacaggtttgggaccaggaaaagttccaggagcaagtcgctgacaaacaaaagctgcactcgcccggccgctttcttctcgcccccagcccgcgccccgagaccacctggcccgggcgttttgacagctccgagagtttcccgagcgccgacggctcggcggttcgcccggagtccgtccggggactacctgggcgcgctccgggcttgttttctcaatgatccagctaggccaagacgcggctacgagaaatttctccaaaagaagagtcgcggagaagacccagtgaaaaggcccgactgaaaagtaaagtgtgcggagccgggcgccggcgggagcccgggcgggcggcgcggagcgggggaggccgggcgcgggcggctaccgaggggcgcggggccggggccgggagccgccaccgcccgcgggcccgccccgcccccaccccgccggggggcgccggggcgcggaggccgcggggcgggcgcccggtgacagctccggcccggcgccgccgctggctcccggcctggctccctcgcactcaacttacttctttctggctctctggaaaggggaagcgccatctttgcgaggccggccccgaggtcttttgtctgcggctgcggggctcggggccggggctccaggctcctcggggggtggtggcggcggctgcggctgctccacgctcttgtcctcctccgacgacatcctagtcaccaggaaagacacatggatcccggtcctcctcctggggggctcccgccgccgcggccgccgccgccgccgctgctgctcgggttcctcctccccggctcagcctctcgcatttcccgcagccccgggagcagcagcaggtaccgggagaggcggcaacatggagcgagcaggacacgcactcacacacatcggcgcgggcgcgcgcacctccgcgcgcaggggccgggcggggggcggcgggcggggcgggcggtgcggggcgggcggggccggcgggtgcgggcgggcggggcagccgggcgggcgggcggcgtgaggggcgccggcccccggggtctccgcccgcggcccctcccccgagccgcccgcggcaggaggagaaaggggcccggcgcggggagggccggccgcggggcccggcgggggcggcgagggggtcgcgcccccggccggccgcccctcccccgcgcgtcaggcccgtcaggcccgggcggcggcggcggcgaagttttgacagctgctccagtggcggcgctgggcgccgggccgcggctcgctcctcacactcgctctctcacacacgctcgctcgctctcccggagcaggggaggaggaagttttgcgggtgtgcttggaccccacacacacgccgcgcgaccgtggccgtcgcgcgaggcccgcgccggggatcccccggggcgacccgcaccacagacctctccaactcgcagccgtcgcgcccacacaccgccgcctcgacggcccccgcccgctcccccacactcggcccctcgcccgccccccgcgcgccgccgctgccactcacgggcctcgctccgcgcatgcgccgctcccgccgcccgcggacgcgccgccgccgctgacctcaccgcccctccccctcccccccgggttccctccccctgtgacgcggcggccgggcccagccgcgactccggctccggctccggctccggctcgggaggtagccaagctgtggacccagagatccgggatcgggatcggggaactgcgggcgagggcgggagggagccgcggacacacgccgaggcggccgcggtcgcccggcgcagcccggcgcgaggagcaaatgtgcgcccgcacggcgagggcagcccgggcttcgctggttctcgccgaggtctttcctcgtagcgcccacactacggggaggaaaaggaatggagtcaacttcgttcgaatccaacgccagttagtttccttattataacgtcattttttttaatccagaaaaggttcataaggatgtaagacgaaaagaacgatgacagctcgagaaataaaacggttagagacaaaataagccaataaaaacccaaccacttgattttaacgttcagtgtgttgtgatgaagaggcaaaaatcgaagtacttctaagccacctctcataatatgtaaaaatggtaaaaagaaaaatggggctagaatccgcctgaaaaatgcactttctcaagaaggacagttacaaatatgggattctggatttctcaggctaatacctaacacttggacgatgatctattctgtgctttccattcactatcgattagtttatgagagtgaaaaaattctagatttgaatggggggaaatagtaagacctatcaaccatttgtgaaggattggggtaaactatcatttaataagcatctactttgggcctagcgttaagaggcacactctcatgttgatttcttttgatcttcgcagtgtagttttagtgtaaggtaaaaaaaaataggctccttttccagcgatgtttgctttcccttctagtagctaggatgttaactttaaactgtgtcttctacttgggcaaaatacacacactttgattcccagagcctattctaaatgaaagcataattttttgaaatggctgaaatgaggaataacgtcagatagtcatttgaataccttcagggtttaatccctgctggctctttcaaatttactaaatttataaccaaaggaaatttgggattgaggaggaggctggcatggtaaatgcaaactagaaattaaaagtgcctgacgattacacatagaaatacaacatatatgtgactagtgataaacatatgatgtgatctagtgaaagtttactcagtacaaatttgaaagcaccctttcttttttcattttcttcagcacattgtactttaaat

SEQ ID NO: 586623 - DNA, 4001 bp, Homo sapiens
taaaatttaagctaaaacacaatacaaaaaccaaaatccacaaaatgggtcaagaggtggttgggaaatgtcttactctagattgaaacatttaatcatataaaatagatgatacttatacagttactaaacattttaatctactttggcatattgaataaaagatggttggattaaaccaaacaaaaactattattggtacccaaataatttttttttaatgttgaagcgcacccatcatcaccactgaaatttgcaaggctgtttttttttttcaaaagtggagacattttatttgcctttcaggaaaaacgaatcaaattaatcagctaaaacacagcactgtaatttgcagtaaaaaatcaacacatttttgtaactggctcggggaaggaaaaacagcccagtcttttcatgtaaacataataagcctgtaatatgctgcagacaaacgcactgcatggggtgtggaggacccgagctgattagattaccacaacatcagcctggggccgccatttttagaatctgtaaaggacaaaagagggaaatttcagtttttactccccatctcagaaattgaaggaaaaaaacagactattttccaaataggtattcatgtctccagcctcgagttgaatgcacctcacttaattctctccaaggtctccagaactccaaacaccttaccttattcacatctctaaaaagggaacaaaataggcaaaacgaggtttactctagagctaactctagcgattcctctttgactttaaattgtatcgttcttaagacagagcccagcaaggacggatctatacggaactaaggccagtagaagagagcactctggattgtttttttctcacccccaccccgtttagcacagtgaaccgtttgtttctcatctgtgtctgctgccatagaatttgtgccaatcccttggtcaaaataagcttttctgaaatgagccatattgtagatcctaaggctccggcacagtaaaggacggcggtaatgcaaaaggagtgggggaggagactgagaaggctgggtactggggtgaccacttcaggggcgggtttaccctctccaggagaggatgaggagctagctgtctcgctctcccacaaagagagatgcccagggcgttcttcttacccccttcgtattcatgtgcacattataccagagactgcccgtcaagaaatggaagaagaaaatggggcctatatggcttttcagcacctgaacaagacgcggttgagaaaagggagcgctggcagctcctgggaccacttcgacacaaaccctactaacagtcacaagcctccgtcttcactcaagcggccttaacccgctgccaatgaggagtgcgccccctccctaactcccccactctcaagggggtttaactgccagttacccctttcccaaccctaaaacccgccataatgctccatttctagggtcagggagaagaaagaataaattcgatttaagcaagcaacgtcttgcgccggcaaagacacctgagagtcaacgtcggctcccccagcttaaggataaagatgagagacctccctcccccttgaaacacaagtaccccaaccccgcaagccccaggaactcccatggagacgacaggcactaacctgtgatgttcacacacgagacacccgaaccccgttatgtgctcgacccccaaggagtctctccgcacctccgcgaacaggcgaccccccgacagcagccactgcggacacaggacccggctccacacaccccctccccaaacagcagcgcgcagcctcttcaccaggaaccgaggagtaggggagggggcagccaggcagtcaacaggaacgcagagacgacggcgaggctgctcggagtgtctatgcccactctgttgccgctcccgaactccggcacggtctccgactcggccccctgcgcccgctcagtgtcactgcctctcgctctgggaaaatggcggcggcggcggcggcggccgcggcggcggcggcggcggcggcaagtgcacggggtacgcccgtcccgctccgcaggggcagagggggaggggatgaagctgcccggcgccattttgcttgtgggctgccgcccgccgttgcctctccgcggaggctcgaagatagcaaactggaggcggtgagggggacggaatctctgtctttctgacaacagatgcattcaacaatccaccgaaggtttgaggaagtgtcggtattcggtgggactggttctttccccctttcccccagtggccctcaagtctggatataggtgagcttgggcatgccagtattgggtgcacgaacaaggacagcagggcttgggaacgaactccctcccgtcaccctccgaaagcgatacaccttctccccctcccaaacaaccccagtcccgtctccccgttcctctccccctcctcccccagcccagtctggcctccagcgctgggtgaacccggttggggtgtcactcgacgcccactaggggctgaggaggctccagtgcgcaggctccgggcaccggataaaagcggagctggcgagtctagtgctgtctcgatggaggagcaagaaacggaagaggtcggggggagaagcagccggaaaaatgcagccaccgtcaacgccgcctccctgccaccgtgcttcggggtaaaaagctgccgttgccgtcggtgcagttgccgtcgctgcctcctatacttctcttggcctcggggaaggatttccccaccggtgggacaatgtgcggggaggggagtgggaattcctttatatggcggtgattaaacgagggagggacagacagtgatctcgaagaaaaaagggggagaccaaagaataaaagaagggtttccccactaaaatgacacggcgattccggctcttgttttgggggtctttccccgaaatggtttccgtcttccccttgccccgcagcgacccagagcgctgggggaagcggagtggggagaggcagaggcggtctcggcagccaatcagcgcctgatgtgtcctgtcgggcgcgtcgtggttggctggcgatgacctcatcctgcagcagcgggtggggccaaagccgtagggggaggctgttgcaaaggtagagagggagaagtgacgatggtgatcgttgctgccgcggccgatatggaacccaagcagtggcgaagggaatcgcaaggctcttccctgaccattttctactgtccctgcgcgaggtgagggccccggctcggcctctgcaaaactttggggcgctggcgcggaggaggagacaggatttctcccgtgacttttgtaactgcgtcagggcaagatggcgctgggtctctttggggcgcggggggagaggcacgtccaccgccgcagcgcatgtgaccgggctgcattcctgtggggtttggctccgacccaggccggggcgggggaggggacagggcttgggcggaggagactgtggtgcggtcggcgttggcggcctgaagaggaagagatgactgttggaaagcgttcccctcccccatacggcagaacagctgcggctcccaggggaaagcccccgcaggacagtcctcgtggggtgtgacggctgttggtggagaaggtttggcgccctattttcttatctgcctttctccccgcaaagtatacttatgtaaggtggtagttccctgacgtgggactcggaatcaactaggagtccttgagggcctctgggaggcctagcgaggggtagaccagcttctgggggtacaacgtcaaggaggatcgattactttctgaggaaacagtttctcagattgaaatagaaaagtatttccaaagtttggaaacaaatttaaaggtgtaaataacacccaggaacactttaattgctttgaaaaggcataagcagccatctgaatttaagggcccttttcagactcttccttcctcctgtgattcctgttctttatttca

SEQ ID NO: 586624 - DNA, 4001 bp, Homo sapiens
gctgctgtgaccctgtgcttccctcgttctcctaatcaggcttctggattcccaaggtggagctaaacttatacgatgccagtcaagatacagagatggggggctgggagcagtggctcatgccagtaatcccagcactttgggaggccaagacaggcagatcacttgaggccaggagtttgagaccagcctggccaacatggcaaaaccctgtctccactaaaaatacaaaaaattagccaggcgtaattgtgcacacctgtaatcccagctacttgggaggctgaggcaggagaatcgcttgaacctgggaggcagaggttgcagtgagccaagatcacactgctgcactccagcctggactatgaagcaagtcttcatctcaaaaataaaaagatacagagatggaggacagagcttgcaacacaaaactatgtgaccaaagaagccgagtgaatgttagaatccatatacacagcacacaccccccgtccccagcccttgggctcaacctggaagcaagaacagcctggacttctcagttccaagtcctatttctacaaggcatgcctgttggccatacctatatgctaacgttttagctccttggtaagcctcattgacgtgagcagctgtaaacacctgtatactggcccttgaggaagcaatccagctcctcggagataaatagcagcctggttttttatttttttcagacgaagtctcacactgtcgcctggatggagtgcagtggcacaatctcgactcactgcaacctccacctcccaggttcaagcagttctcctgcttcagcctcccaagtagctgggattacaggcccccgccaccatgcacatctaattttttgtattcttagtacagacagggtttcaccatgttggccaggctggtctcgaactcctgacctcaagtgatcactttggcctcccaaagtgctggaattacaggtgtgagccatcatgcccagcccagcctggttttttatttggttttgttttagagacagggtctggctctgtcacccagattggagtgcagtggcacaatcacagttcactgcagccttgaactcctgggctcaagcaatcctcctgcctcagccaccagagtatctgagactacaggcacacaccaccacacctggccgattttttgtttttgtagagttggaggtcttggtatgttacccaggctggtctagaactcctatcttcaagcgatcctcccaccttggcctcccccaaagtactgggaacacaggcatgagctaccatgcccagctaagcagccctgttttatggatgaagaaactggggttctgaaattaaataattgcaagattccacggaaactttgatttgattccacagttgtctggctcctaagtccacatgcttttgtcttctccacctttaatattttatgatgaaaatagcaaacatacagaaaagttggaaggataattcagggaaacacctagtcatctatctaaagaatcttttgctatatttgccttttcaacccatctctccaccacctccctgccccccgctattttttttttgagatggagtttctctcttgtcgcccaggctggagtgcagtggcctgatctcagctcactgcaacctctgcctcccaggttcaagcaattctcctgcctcagcctcccaagtagctgggattacaagtacaagccaccacacccaggtcatttttgtatttttagtagagacggggttacaccatgttggccaggatcgtcttaacctcctgaccttgtgatctgcccgtctcagcctctcaaagtgttgggattacaggcatgagccaccgcgcctggtctcttcaccccgctttttatgcagattgcactggtccccaatagaagcaggtgggtgcttcatactcacagacacatctttgcctcggtacttaaattttctccgcctctcttctggagcatctaaggtcggcatattgactggaagtagtaagttacctgcaggttggacagcaacaaagaaattttcagtgcccattgtgtgggttattatgtcagtatcataaggctctaacccttaaagggctcacagtggagcaaagggcagacccaggaagctagcttttttttttttttttttttttttttttttttttttttttgagacagagtctcgctctgttgcccagacttgagtgcagtggggggatatcagttcactgcaacctccgcctcccgggttcaagtggttctcctgcctcagcctcccaggtagctgggactataggcgcctgccaccacgcccggctaatttttgtctttttagtagagacggggtttcaccacgttggccaggctggtcttgaactcctgaccttgtgatccgcccacctcggcctcccaaagtgctgggattacaggcatgagccaccgctcccagccagcattttttattttttgggaccagagaagctgagtgagagttagaacccatatacacagcacagactccccgtccccaacccttgggctcaacctggcagcaagaacaacagtctggacttctcagctccatgtcctatttctgcaagacctgcttgttggcatcagagtctcactctgtcacccgggctggagtgcattggcacaatcacggctcactgcaaccttgacctcctggactcaagtgattcacccacctcagcctcttgagtagctgggactacaggcatgagccaccacacatgactcactttttatttattttatttatttattttttgagacagagtctcactctgtcacccaggctggagtgcggtggcgcaatcttggctcactgcaagctccgcctcccgggttcacgccattctcctacctcagcctcccgagtagctgggactacaggcacctgccaccacgctcagcaaatttttttgtatttttagtagagacggggtttcaccgtgttagccaggatggtctctatctcctgacctcgtgatccacccacctcggcctcccaaagtgctgggattacaggcgtgagccaccgtgcccggccacacctggcttatttttggttttgtttgtttttgtagagtcggcttttcaccacgttggccaggctggtcttgaactcctgaccttgtgatccacccacctcagcctcccaaagtgctgggattacaggcatgaacctgaagtcagcttctataagcatcaccacaccagctcagtaggctgtgaacactgtgggagcaccaagaccaccaatgctgggcatagcagtaaaggaaagcttttaaaagtgctttggcttcaactgggtcctcaaatgaggcagatgggctggttgtcatatatagaagcctttcatgccaggtgcagtggctcacacctataatcccagcactttggaaggctgaggcagatggatcacttgaggccaggagttcgagatcagcctgggcaacatggggaaaccccatctctactagaaatacaaaaattagtcaggcatggtggcggacacctataattccagctatttgggaggctgaagcaggaggatcacttgaatccgggaggcggaggttgcagtgagctgagattgcgccactgtactcgagcctgggcaacagagtaagattccgtctcaaaaagaaaaagaaaagaaggctttcacacggtgtgtctgaggagttataaatcaggcatatgtacagggtggtgaggagacccgccaaggctgcaacaggaaaaccccacacccaatgcaccagcacatggggtcaggacagtctcaagcacaagtcactgagaatccttcagtagactgcctccaccccagtccagaccactatcacctcttacccacactactgcagttgccttccagctggtctccctgcttctcccattgccttattccaatctgttctttgcacagagtacatgtgattgtggatcacct

SEQ ID NO: 586625 - DNA, 4001 bp, Homo sapiens
agaattccaatccctgccttgtttcatactagttatgagacctcagccaaacctaacctatttgggcctcagtgaactcatctgtaatactgggatcataacaacctacctcatagaggtattgtgaagacaaaacaaatacaggaatagtgcctagaacaaatgcggggactatgaatattaagtgctatgattagtaatactgcagccagacctgtctgcctaatgcccgcttgcaggtctgagcctgccagctgagctcttccacatactgctcctgaccaccggtgtctctctcgctccagactaaatatatcccagctcttccaggaatctgtaagagatgctttccaggcctctcaccatctcagcctcaagacaaactgttttgtgataaaattcttagaaaatgagaatgggaactgactgtggccagggtaggcgcttctgccagtggcctccctctccccagaaaaagcaaagagtgagggttttgtgtgtgagggagtgagcaagtgtgagtgtgcaaacacctgggctacaaaactcatcttcgggaggaggaaggccaccactggctggctctgcccacacaccaccggccttcctcctcgggccccacttcacctccttcccccaaccaatggagaaaagctttctgggctgacccaggactcttgtaactgggcagcctcctagctcatagctgcacactggtcctcctaacatcacccttccaccgtgtcactagcccagcacaaaaactgcagcttcagtgcctgctggacctgcccctctctcacagtccttcccaacctagacctgctctcccagtgggcctcaggctcgggctccctgatcagaccctgccacaggacctctcaacctggaggctgtgctcacattgccctgggcttctgggaaccctccctgctcctctccaccttacagtgacctaccactccccaaggtcactcctggccaccttctccatgaagctacgtagtgtgaggatattcccctcatcagatctgaaaggtcaatggcccaaactcctcactttacagaacaggaaactgtggtatgaggaggccttaggatggggccatgggcatgtctgaaccagggtgtccctaggctacttaactgtgcagccagacctgaaaaggacacttgactgtccctgcccaacaacatccaatttgcctagcctctcccttctccccaaatgcttgggggcactaatgacgccaagggcctggcacagtgtttgctctgcctagtcacacgctgccccccatccatggctgcctcggactggccaaagctcaggagccaccacggttgcagaactggctccaggtgcccatccagaagaacgtggagcagttgctggtatcagcaccagatacctgatacctcactgatatcagcaccagagtttcccagcatcgtcacagcccacacacaacctagcccaaacggtgcccaggctgtcacggcctggggctctccctccagttctcagatctaaacgccttacctgcaggcttcccaagacaaaacttggggtttgttctatctttgtttctccccatttccacgtccccagcccccgggatccaggattccaccaagaacagaagtatgagatttactcactgcctccgaggccttcatgcccactctaccaggataacttgtaacgaaacaagccacgccaagggggtttccccaggtggagactgggccgtgggtaccggcggcggagagctggagagaggttgtccgaggacctgaacttcccggcacgaacccctgagcatcaggcctgcccagcctcacccagccgatcccgaagttgcgggggggtcccagctctttctcgccctaccgccttcggggccgcactgcgccgaggggtccgcgcgtccgcctgccttacctggcgcgccatccccgggctcagcctccccgccactcctcggtttccggcgcgggccctggcgcgggcgcacgcgaccctcgtcggcggcggcccaggtccgcgcaggagaaggcggggccgggggcctgggccgagggggaggggcgggggtgggcgcgcccgggcccgcccccggcctcgttgagcccgccccgagcgcctcgcatcccttggtgggtggtgccgtttccgcccggagcccccggcttcggcggcccggccggccggcgcagacgcggactacacttcccagaaggcgccgcggcgccggctcggaagcggggggcggagacagggcggggcggacctggctcgggcctcgtccccgccccctcccctcgtccccgcccccagctgcgggtagaggttgcgcgccgagaccagccggggcggctgtgggcgtgcaagcccgcgggtacgcgccgcttatcactcattcattcccgcagccaccactcagcgcgtcccatgtgccaggggctgatggtggggatgaagagggacccatctttcccagaggccgcggtcggggaaacccgacctggagtgaaaggggtcgagggtccggccgggcgtgggtgggacagagcagctgccaggcccccgtacatcctcacgtctttcgcccgcgcccccgctcgccgcagccatgacctaccttcgtgtcacattttgcgtgcctgtttgctggggtggtaaccccagttgttcctggcacatagtaggcctcaaataaacgtgtgatgcgggaaggaagcgcggcccactctcctctgcctccccctgcgcttcacgagttcgaaggcctggtctgggcgggcgctgcgagagcgctccgggggtgcgggcgaggcgcagcgagcctggttttcctgtctggagaaggaccccgtcatttttatagaaggctgctggaagggggcctgcggggctaagcctgctgtgccagacagaagcttggaggggaaggggaggctgtggtcccacgcagaggagactctgctctgagtttggaagccccgtccagaccttgcggcccagacagcgctctgcctgggcaatatcggagggaaggaaagggaattcctcgcccagtcgcccggggctggcccttgcagccgcgccggccatgatcacggactcgggtacgatgccgacaacccctcgtcccggcctccgaggaaaggcgcacgcccactcgggcaaagccccctcggtcatacccgagacaccttagacacaggaccggcgtgtgcgcagcctgctgaacaaggatttgaagatatcacaaggccccacctcgcggaaagggaaaacttaaaagtccaacttttcaagagccctacaggccacagccctcagggtaagtcgcctcctgggctttaggccgggtcccacctccgtgccgaggtgaggcgggctccttacagtaatgtgttcctgctcccagctcctctccaccgcccaccctccggcccgggatccctaaacgttaaaaccccctaaatcaggggtccccaaccttttgggccagagcccggttttgtggaagggaatttttgcatggactgggaggggggttgttttgggatgaaactgttccaactcagatcaccaggcattagattctcctaaggagcccgcaacctggatcccgcattcacaacagggttctggctcctatgagaatccagcacctgcagatctgacaggaggcagagctcaggggtaatgcgagcaagggggagtggctgtaactacagataaagctttccctggcttgcccgcagctcacctcctgctgcactgcccagctcctaacaggccaggactggtactggtccatagcccagggactggggacccctgccttaaacttaaacacctgtagaaagaaatctctatccaagtaagatgcacctttgttttaagctgtgcagattcttggcacctctttgactcaaacgtccacttcctggctaggcttcctgccccatttgtggaccatcagtcg

SEQ ID NO: 586626 - DNA, 4001 bp, Homo sapiens
tgaggacgttatcattctttatcattatatacttcatgaaatttttttcagttcaattttttgtataaaatcattcttaaaacccacctcatgcaacagaccttcctacatcatgtgaaaaggatgaggcctttttcttctcagaatttctatttagcaattacttttcaccacagattaacaatgacttcaagataataaacgtttacaaattatgagacagacgcattgaagactgcaagccccaaaaagaaagacattgtattgtgaatacactgtatgatatatgggcacaattacagaaaccattttatctattaaggacctaaaagaaaaatcaagtaactcttacttttctaaagacaatttaaagcaaatcaattcctgtcttggtcaactcatgttaagaaaacatttactagcaaagtactttgtcaatactcatcacttctctagaatatttaattaatactgcacagaagcctgaacttttaaaaggtaaacaaatgtgattttaaaaagacataactatgacagtaacagtattttgttttcttaaaccaaatacttttttaccatatccccaaaatattcttaaaattcattttcaagaactattcgtacttgactacttaaaatctacattcttccagtgacatgaaagaaggaaacaaaggcttaacaggaaaataacaaaagtaactaacataggaaggtaaaactgctaagggagaaacacagacaaactgatagaaaatgagtagcttgaactaaaatacaagaaaggtataactagagtttgcaatatgtttagactgagtctgagatgagggttcaagtgaataagtacaggaaacgtggcattttgttatatggctcactccattctggaaaatgttaggcacaaatgataatatgctccctaagtaataagatcttataaataaagcagtggaagtggtccttaattaggggggtggcacctacctgggatcactggaaaatatggagggcatttctggttgtcactatgactgatgaggggagatgtacaactgccatttagtgtccatggaacaggtttgctaacatcctcttagtatgctagacagcgtttgcaaacagaaactgtaaaggcacatatgcactccagaagggtaagaaaataatgaggctgagatcctgagttggaccaccgagatgaaagacttctggtgaggctaaaaacatgtagaaaaagcgatgaaagccaaaaaccttaaaaggtggagaaaagtgtagaggcgagaagtgagttacagggggagaagtgagttagaatgacaagctgtgaatccctttccctgcaatgacaaaaatacgtaatcactctgcctgggaggttttttcctgcgccaccacccgtcaacgtccactactggggaaaaacgtaagcctctttgctcaaagagtttccacccaaaaagtggctatggtttctctgtaactacatgtgaaaaataaactccttgcctggggcaactagatgtggagatggttcagtctcccacctccgttttccctcgctggagtcgaacttgctcctcctgtttcccgaaggacaccgagaggtcccacccgtacgggctgccgcgagtgcctctctggccgctacattcaactaaatgggtgggacagtcacctggcgagggggggcagggaccgtcaccgctttctcattcctccttccctcctcccaggcacagcagcccggcccagcttcctgtggcagaaaaaccctcagtcgccaaaagaaagccgtcttgagggttcccccgcgctcccacccgcgccccaaaagctcaggtctctggagtcggagaccctcctgcccacctgctctttactgtccttccctctcctcgcacctcagcaccattcacccctcaccctctcccgaaactacggggtcccaggtcttcaaaggccttagctttccaccccgccgttaccgtggctatgaaatcgcttccgggttcacaccctttgcagcctcgcggttggcggtgaaagagcttccgggtcggcggccgggctgctgccgttcctgctccttttcactggacctgcagtctctcaggggctggtggcaggcgactaggagactagggtggtggcggtgggggtgccagcggctgagccggagccggagccggaggcgggggaggggaagagggcggccggggctgcgagcgcgcaaggctggaacatgagccgggcttgaccgcgaggcggaggcaagagccaccgccccctcttcccctcccccgagtgaggcggcgcagcggccggagagggatggggggcgcccacccagtctgagcctcgccgcgggcgccttcggctcacgcagcgcttcccgcgggccgccagtgcgcaccctcggccacatcagcctccgcctggcgggtgcacccgggccggcgaggaaggggcaaccgtccgggtgggtggggcgggctgggtacctgaggtcaccagctcggctgtagaggcaggggcggcggaggcggaactgcggagttgctgggtccaccgacccttaccctcagcgagagaagtaaccgtaagtctcagcttcgcggtacagatgtgtttgaggctgcctctacccatttgtggctccgagttcagagctacctacttcacaccctcccggatctactaggagtgtgtctgtcgcctgttttggagcattgttgttctgtctgtccccatccctgaacaggcagcattctctgccctacagggcttttctcccagcgaatttgcaagcctccgggtctccgtgacgcgtcccatcctccccatctggatgcatctccttgtccctctgtcctcaaaggatctgtgtccttcctcgcagcctcccccccacccccatcctttgagacgtggaaagccacgggttctgccgacctcgggggctagagagagtcttgagaagcggatgggtaaaagtgctctgcagggctgtgatgggtggggataggtgcagatggctccagtgaacctttatttttgcagcttctgccaccaaaacaaaagaatggagcgctcccctgtattcttattcttctccgtatgtatgagctgtttttctgtacgtagctgtttgagtcgcaggaaattgaaactagagctgtaataaagcatctcctgaggagattttgagaattagtctcccaagctctattcacacggaatggcatatcgaacaatcttgtattggaatgaccatttcagaagagctttactggtagatctgacagataaatgtaaagataagagtctgctgtttcaaatagtgtattttagatacctttaaattttagtgttctaattttcatctagttcttaatttgtgaagtatgtgggtatgtgtaaggtgtaaaaatctgtgtattggaaggttttgctttgttacaagcttttgctttgttgcttttgagacagacgtttaaagatcatattagattgtatttgataattattttcaatcattaattccagagaaatctttttttgtatcagccactcacagatgttacacaccttggtgcctatgaccctcctgctgcttaaactgtgaatgtcttcaaagtatattttcagatttttgaactaggcgttttttctcattagaatttgatttgcttttcaaactgctcctgcagaactttccagaaattagatttaaaaataattttaatgctgtcagtgattggacaatagctcttatatgactttatgcatttgctacttttcagagcaccataggaagcaaacgataatttaagaataattttactgtgtactgcaggttgtcattctgcaaactactgtgtagtgtagactggtagctttggtgttttgtgttgctgaaaaacattgtcatttcattaagaaagatggatgtgtttaatgacttttccccccaacctcctttcagcagttgattt

SEQ ID NO: 586627 - DNA, 4001 bp, Homo sapiens
attgtgtgaaaggttttgaggacgttatcattctttatcattatatacttcatgaaatttttttcagttcaattttttgtataaaatcattcttaaaacccacctcatgcaacagaccttcctacatcatgtgaaaaggatgaggcctttttcttctcagaatttctatttagcaattacttttcaccacagattaacaatgacttcaagataataaacgtttacaaattatgagacagacgcattgaagactgcaagccccaaaaagaaagacattgtattgtgaatacactgtatgatatatgggcacaattacagaaaccattttatctattaaggacctaaaagaaaaatcaagtaactcttacttttctaaagacaatttaaagcaaatcaattcctgtcttggtcaactcatgttaagaaaacatttactagcaaagtactttgtcaatactcatcacttctctagaatatttaattaatactgcacagaagcctgaacttttaaaaggtaaacaaatgtgattttaaaaagacataactatgacagtaacagtattttgttttcttaaaccaaatacttttttaccatatccccaaaatattcttaaaattcattttcaagaactattcgtacttgactacttaaaatctacattcttccagtgacatgaaagaaggaaacaaaggcttaacaggaaaataacaaaagtaactaacataggaaggtaaaactgctaagggagaaacacagacaaactgatagaaaatgagtagcttgaactaaaatacaagaaaggtataactagagtttgcaatatgtttagactgagtctgagatgagggttcaagtgaataagtacaggaaacgtggcattttgttatatggctcactccattctggaaaatgttaggcacaaatgataatatgctccctaagtaataagatcttataaataaagcagtggaagtggtccttaattaggggggtggcacctacctgggatcactggaaaatatggagggcatttctggttgtcactatgactgatgaggggagatgtacaactgccatttagtgtccatggaacaggtttgctaacatcctcttagtatgctagacagcgtttgcaaacagaaactgtaaaggcacatatgcactccagaagggtaagaaaataatgaggctgagatcctgagttggaccaccgagatgaaagacttctggtgaggctaaaaacatgtagaaaaagcgatgaaagccaaaaaccttaaaaggtggagaaaagtgtagaggcgagaagtgagttacagggggagaagtgagttagaatgacaagctgtgaatccctttccctgcaatgacaaaaatacgtaatcactctgcctgggaggttttttcctgcgccaccacccgtcaacgtccactactggggaaaaacgtaagcctctttgctcaaagagtttccacccaaaaagtggctatggtttctctgtaactacatgtgaaaaataaactccttgcctggggcaactagatgtggagatggttcagtctcccacctccgttttccctcgctggagtcgaacttgctcctcctgtttcccgaaggacaccgagaggtcccacccgtacgggctgccgcgagtgcctctctggccgctacattcaactaaatgggtgggacagtcacctggcgagggggggcagggaccgtcaccgctttctcattcctccttccctcctcccaggcacagcagcccggcccagcttcctgtggcagaaaaaccctcagtcgccaaaagaaagccgtcttgagggttcccccgcgctcccacccgcgccccaaaagctcaggtctctggagtcggagaccctcctgcccacctgctctttactgtccttccctctcctcgcacctcagcaccattcacccctcaccctctcccgaaactacggggtcccaggtcttcaaaggccttagctttccaccccgccgttaccgtggctatgaaatcgcttccgggttcacaccctttgcagcctcgcggttggcggtgaaagagcttccgggtcggcggccgggctgctgccgttcctgctccttttcactggacctgcagtctctcaggggctggtggcaggcgactaggagactagggtggtggcggtgggggtgccagcggctgagccggagccggagccggaggcgggggaggggaagagggcggccggggctgcgagcgcgcaaggctggaacatgagccgggcttgaccgcgaggcggaggcaagagccaccgccccctcttcccctcccccgagtgaggcggcgcagcggccggagagggatggggggcgcccacccagtctgagcctcgccgcgggcgccttcggctcacgcagcgcttcccgcgggccgccagtgcgcaccctcggccacatcagcctccgcctggcgggtgcacccgggccggcgaggaaggggcaaccgtccgggtgggtggggcgggctgggtacctgaggtcaccagctcggctgtagaggcaggggcggcggaggcggaactgcggagttgctgggtccaccgacccttaccctcagcgagagaagtaaccgtaagtctcagcttcgcggtacagatgtgtttgaggctgcctctacccatttgtggctccgagttcagagctacctacttcacaccctcccggatctactaggagtgtgtctgtcgcctgttttggagcattgttgttctgtctgtccccatccctgaacaggcagcattctctgccctacagggcttttctcccagcgaatttgcaagcctccgggtctccgtgacgcgtcccatcctccccatctggatgcatctccttgtccctctgtcctcaaaggatctgtgtccttcctcgcagcctcccccccacccccatcctttgagacgtggaaagccacgggttctgccgacctcgggggctagagagagtcttgagaagcggatgggtaaaagtgctctgcagggctgtgatgggtggggataggtgcagatggctccagtgaacctttatttttgcagcttctgccaccaaaacaaaagaatggagcgctcccctgtattcttattcttctccgtatgtatgagctgtttttctgtacgtagctgtttgagtcgcaggaaattgaaactagagctgtaataaagcatctcctgaggagattttgagaattagtctcccaagctctattcacacggaatggcatatcgaacaatcttgtattggaatgaccatttcagaagagctttactggtagatctgacagataaatgtaaagataagagtctgctgtttcaaatagtgtattttagatacctttaaattttagtgttctaattttcatctagttcttaatttgtgaagtatgtgggtatgtgtaaggtgtaaaaatctgtgtattggaaggttttgctttgttacaagcttttgctttgttgcttttgagacagacgtttaaagatcatattagattgtatttgataattattttcaatcattaattccagagaaatctttttttgtatcagccactcacagatgttacacaccttggtgcctatgaccctcctgctgcttaaactgtgaatgtcttcaaagtatattttcagatttttgaactaggcgttttttctcattagaatttgatttgcttttcaaactgctcctgcagaactttccagaaattagatttaaaaataattttaatgctgtcagtgattggacaatagctcttatatgactttatgcatttgctacttttcagagcaccataggaagcaaacgataatttaagaataattttactgtgtactgcaggttgtcattctgcaaactactgtgtagtgtagactggtagctttggtgttttgtgttgctgaaaaacattgtcatttcattaagaaagatggatgtgtttaatgacttttccccccaacctcc

SEQ ID NO: 586628 - DNA, 4001 bp, Homo sapiens
acttcaagataataaacgtttacaaattatgagacagacgcattgaagactgcaagccccaaaaagaaagacattgtattgtgaatacactgtatgatatatgggcacaattacagaaaccattttatctattaaggacctaaaagaaaaatcaagtaactcttacttttctaaagacaatttaaagcaaatcaattcctgtcttggtcaactcatgttaagaaaacatttactagcaaagtactttgtcaatactcatcacttctctagaatatttaattaatactgcacagaagcctgaacttttaaaaggtaaacaaatgtgattttaaaaagacataactatgacagtaacagtattttgttttcttaaaccaaatacttttttaccatatccccaaaatattcttaaaattcattttcaagaactattcgtacttgactacttaaaatctacattcttccagtgacatgaaagaaggaaacaaaggcttaacaggaaaataacaaaagtaactaacataggaaggtaaaactgctaagggagaaacacagacaaactgatagaaaatgagtagcttgaactaaaatacaagaaaggtataactagagtttgcaatatgtttagactgagtctgagatgagggttcaagtgaataagtacaggaaacgtggcattttgttatatggctcactccattctggaaaatgttaggcacaaatgataatatgctccctaagtaataagatcttataaataaagcagtggaagtggtccttaattaggggggtggcacctacctgggatcactggaaaatatggagggcatttctggttgtcactatgactgatgaggggagatgtacaactgccatttagtgtccatggaacaggtttgctaacatcctcttagtatgctagacagcgtttgcaaacagaaactgtaaaggcacatatgcactccagaagggtaagaaaataatgaggctgagatcctgagttggaccaccgagatgaaagacttctggtgaggctaaaaacatgtagaaaaagcgatgaaagccaaaaaccttaaaaggtggagaaaagtgtagaggcgagaagtgagttacagggggagaagtgagttagaatgacaagctgtgaatccctttccctgcaatgacaaaaatacgtaatcactctgcctgggaggttttttcctgcgccaccacccgtcaacgtccactactggggaaaaacgtaagcctctttgctcaaagagtttccacccaaaaagtggctatggtttctctgtaactacatgtgaaaaataaactccttgcctggggcaactagatgtggagatggttcagtctcccacctccgttttccctcgctggagtcgaacttgctcctcctgtttcccgaaggacaccgagaggtcccacccgtacgggctgccgcgagtgcctctctggccgctacattcaactaaatgggtgggacagtcacctggcgagggggggcagggaccgtcaccgctttctcattcctccttccctcctcccaggcacagcagcccggcccagcttcctgtggcagaaaaaccctcagtcgccaaaagaaagccgtcttgagggttcccccgcgctcccacccgcgccccaaaagctcaggtctctggagtcggagaccctcctgcccacctgctctttactgtccttccctctcctcgcacctcagcaccattcacccctcaccctctcccgaaactacggggtcccaggtcttcaaaggccttagctttccaccccgccgttaccgtggctatgaaatcgcttccgggttcacaccctttgcagcctcgcggttggcggtgaaagagcttccgggtcggcggccgggctgctgccgttcctgctccttttcactggacctgcagtctctcaggggctggtggcaggcgactaggagactagggtggtggcggtgggggtgccagcggctgagccggagccggagccggaggcgggggaggggaagagggcggccggggctgcgagcgcgcaaggctggaacatgagccgggcttgaccgcgaggcggaggcaagagccaccgccccctcttcccctcccccgagtgaggcggcgcagcggccggagagggatggggggcgcccacccagtctgagcctcgccgcgggcgccttcggctcacgcagcgcttcccgcgggccgccagtgcgcaccctcggccacatcagcctccgcctggcgggtgcacccgggccggcgaggaaggggcaaccgtccgggtgggtggggcgggctgggtacctgaggtcaccagctcggctgtagaggcaggggcggcggaggcggaactgcggagttgctgggtccaccgacccttaccctcagcgagagaagtaaccgtaagtctcagcttcgcggtacagatgtgtttgaggctgcctctacccatttgtggctccgagttcagagctacctacttcacaccctcccggatctactaggagtgtgtctgtcgcctgttttggagcattgttgttctgtctgtccccatccctgaacaggcagcattctctgccctacagggcttttctcccagcgaatttgcaagcctccgggtctccgtgacgcgtcccatcctccccatctggatgcatctccttgtccctctgtcctcaaaggatctgtgtccttcctcgcagcctcccccccacccccatcctttgagacgtggaaagccacgggttctgccgacctcgggggctagagagagtcttgagaagcggatgggtaaaagtgctctgcagggctgtgatgggtggggataggtgcagatggctccagtgaacctttatttttgcagcttctgccaccaaaacaaaagaatggagcgctcccctgtattcttattcttctccgtatgtatgagctgtttttctgtacgtagctgtttgagtcgcaggaaattgaaactagagctgtaataaagcatctcctgaggagattttgagaattagtctcccaagctctattcacacggaatggcatatcgaacaatcttgtattggaatgaccatttcagaagagctttactggtagatctgacagataaatgtaaagataagagtctgctgtttcaaatagtgtattttagatacctttaaattttagtgttctaattttcatctagttcttaatttgtgaagtatgtgggtatgtgtaaggtgtaaaaatctgtgtattggaaggttttgctttgttacaagcttttgctttgttgcttttgagacagacgtttaaagatcatattagattgtatttgataattattttcaatcattaattccagagaaatctttttttgtatcagccactcacagatgttacacaccttggtgcctatgaccctcctgctgcttaaactgtgaatgtcttcaaagtatattttcagatttttgaactaggcgttttttctcattagaatttgatttgcttttcaaactgctcctgcagaactttccagaaattagatttaaaaataattttaatgctgtcagtgattggacaatagctcttatatgactttatgcatttgctacttttcagagcaccataggaagcaaacgataatttaagaataattttactgtgtactgcaggttgtcattctgcaaactactgtgtagtgtagactggtagctttggtgttttgtgttgctgaaaaacattgtcatttcattaagaaagatggatgtgtttaatgacttttccccccaacctcctttcagcagttgattttgggctattatctgatttgtaacttctcactgttcacagattttaatttgaagtaggctcaggagatgtagctccaactctgtctctggaaatgtacttagcacagaagccaagcactgtgcagagttgagtgtattattaagggtgtggcttttgctttctgtaaaattgttcagtttctgaata

SEQ ID NO: 586629 - DNA, 4001 bp, Homo sapiens
aggaaatgtgtggcggatgcaactgtgcaaactgagatggggcgaaaggttgagctacaagcctaatcccgggactccccggctggctgcgcttcctatctggattgctggaaggatgcggagtccccagggcctgccccttaggtctggacgggaggaggcgctagcagagcctcgaaccccgctctcagccctcacctgcaagtggctgacgatacagtagggttcgggcttgtgcagcccgcacgtcgaggtcaccgaaagcttctgtgctcggccgatgagaaggtcgcccgtggcgggatagcagctgccttctgcgcagccgtagctgaactcgggttcctgagcgcgcactcgggctctgcacagggctgcgggaaggacaggcaacagagttggggggacacaagcagggagtggagcccgaaaaaaacgaacaagcgggggcgggggagtgggtgcggagagaggacagtccattcggaagaaagcaaaatgcacagaaaagacaatggagagatgagcgcaggagaggctgggaaggcagggactccgaaaggagaaggacacggaaagaaacccacacacgtcatcaggtctgtccagcagcgagagcctccctcccgggaaacccaccgacgctcgcgcccaccctgatcagccccggggagcagctcccccaacaaagggtggatgtgtagaccctccacttcgacgtgtccggagcccggcgcagggaggctgacccccaaagggccacacacccacgcacgtgaacccgcgtgcacgcggcagcccgcgcatcctcggtgtgagtgtgcgcgtggagatctgtgagcttgggaagcgagagtgcgtgtgcgtgcacgcgcgagggtcaccggcgcttcgctggggacgaggcgccggggctcgcggtggacgccgctttccggagctaggggagcccatggacagtccctggggctctggagtggtttcaaggcttctccattccagggaagcgccaggtcctgctgtttctggtgccatccggagacaaacagagatggttaattaaagccacatggcccccatctgttcccagaatgaagcctccgctcagctcaggcactctcctgggcaatggatttttggagagccctcctcggtcagcaccgccaaccccagggaacctgccctctgcggtggggaaacccagggtgaaccggccgagggtgcaaaaccctgagcgggggccgcgggaggccgcaggggccggggcttgggcgcagagcccgggggatgagggtccgcggcgctccgcgtgcgctgtctccagccaccaccgaagcaagggcggtggcgtttaatcccaggggcgtcatttccatccagtccctctcccaagcccccaggatcccacgaaggtgagcaagcagcttttgggttttccttccccatgcccaagtccgtccgcctccccgcaccgtttccacggaattacctaagaaactgaaagctagcaactggagaagccccatgccggctccctgcagccacggggacgcggcagaggagtggagaagacgcccgccgagccgcctgccctttcttcccgtcttcctttctggagaggtggaaaggaggggaaaaaaggcaaatgttcaaagagagaagaggcgcccttccatttcctgtcgctcccacggaagcggggggtgggctggaaagtggggaaaatcgtgcagccactttgttctcctcacccggcgacgcgagctctcgccctgctccgggagcccccgagcccaaagaagggaattagaaagtttagccttgggaggaacagagggaggcgcctctgctcatgcgcatacggagagccggggctgaaggggcgggcggccgcaactctgcgaggaccgggtgaggtcccggtcccaccccccggggcgcctcttttgtttgaaagccgaatctgcgatcgctgcggggctggggcgcttccaggtcccagggcgggtccgccccggggtgcgcgtcccagaacggcgcgcggcggggccgtccagcgaggggggcggatgcgtgggggcgtctccgaggtgggttttcaggttgcccagccagggggccggcgggacctaccgcggactcgcgcatttacgttcgcaagaagtgaatcaccaaacgtgcccacggctaaaactctcgtgcggtgcgctcggggaaggcgggttaaccctttagaaacagggtcgacctgtcgtgtttgttctttagaaagtgacacttcctctccgcccctagtatccaagagcttgggatgggcgcgacatctacagtgtcttcctaggaaggaggagaagctctgtgcgccctgcaattctttgcgcacacatttattcaggacctatctgtaatccctgttacccaggtggtcacggcattgaattgaacgtccagttctgtttttaaaaaatctacttccaacatggtgcaactccatctctactaaaaatacaaaaattagctgggcgtggtggcgggcgcctgtaatcccagctactcgggaggccgaggcacgaaaatcgcttgaacctgggagaaggaggttgccgtgaaccgggatcgtgccattgcactccagcctgggcaacaagagcaaaactacgtctcaaaaaaaaaaaaaaatcttcctacctatatccagatgatggctttagctcaggtaattcctcaaatgacactattattgttactgactccgtttcccatctcgccgtggaagagttgacacagccaggaagtggaaatctctcatgagaggcacttccccacaacgctcatctcgacgattctccatggtgtgcaaatgctgaggtggggagagggcctctaatgaagggtctctaacaacacagtgtaacctgcctggtgaaattaggggtacatagaaactcaccaccttctaggggttggagagggaaaagaggttggtgacgggaccccaccacccattctgctacccttagcaatggacagagtcaaagcttggagtcctgctctgggcaaatgtggctggaattcagggagtatagttagttgtcagtccagtcaggagacttggcttgttttccagtcatttccgggagaagagtttaagcggctagctggtcagtttttaacttagctgtaacgaaataaggcccagagaagtttaatcattagaccatagagtcagctgctttacgagttcgtaagcctgcacgagtctgaggcaggcgggagccttggggtctaggtgagtgaggcattaattattcaccaaatcagcacttgccctgctacagcctggggaggttttgcctctgctgaggcttaggatcctctgcgccggctgggtagcctgaaagcgctgagaaagtccttgctgttgggaggctgtagaattgcaatggagggtcttcagggcttaattaaaagaaaaatattaaaaggcaaatgtcttttcttcctgttgagcttttaataccctgggccagagtttcgtattttcatgtgcacacactgcaagcatctttcagctccttttctttcttgagcctaacctctgctctcacagcagctgagccctccttgctacctgtccctgctcagcgtcctctccccttgcaaaaggtcatttactttcagcactgttcagaagcctacctgctctcctgatcacctcacttgcagtagtaaattgaacactactgagaaaattaggtttttaaaaatttgcctgtatatgtgcagggggaggagtgtgtgtaacactcaccttctgaccacttcatctatgaatttgcctacctcccttcccacctgtatcttttgtgcttctctcctagaagtgtgccctcctctcatctactaagttcagtgctctcatatacttgctcagcctcctcctgttttaagtaaaaacaacacaaactctacattgtatggaatcaaagcttgagctctgg

SEQ ID NO: 586630 - DNA, 4001 bp, Homo sapiens
gcattgagtgtgtagaggccaggggtgctgctaagtaaatattctacaatatttctgggccctacaacatagaattaagcatcctaaaatatcaacagcgctgagcttgagaaactttctcagtggcttcagtgcccttagctatgggccttatcatctcagcccttatttcccaaaatcactcacctctagtcttcctccccattttctatttcccattttaggagagctaagctccaaactagataagtattataatgaatctggcaacttctagaagttctgttatctgaaatcacctatccagtcattataaaacccacagctgcacatacagcgcaatatcagaaaatgtggtaaccctgtgcatgccttccttcgtcaaactataagtttaattggtactgcttttcgggttggtttaccagagctgacattggaaagcctctcaggggctacatggcactcttttcttgttaaattcatcagtgagttttagtaatatatgtaaaagtgattaggagtaataaacaaaacattttccctcctttggatgagatatgtataaacgtatttccaaaggcgctgggtgcattttggtagccgtttaatgaatgctgctagatgacactggtcttaaaatgtattaagtgttgcaataaacagtgaaatatattagactgaaagtaactttctggcattgctaatttatttaatttactgaccattcacttatatttgcctcatctgctctcacttgaaggctgcaaagagtttactcttttttgtcaaaacaatttggatgaaacagatgaagagaaaagggccatgtggtgcccatttgcccagctcctagaaccacaggtgcatcgtgtttgataagagcctctccgcaggaaagacatgcattccgctcctgtttctactacagcacctttcttctgcaaattggacagtaatttataacacagaagataattataaatacatttatattagcccttaagactttttctggtacacaaataattgtctataaagtgacagttctcagaaatcttgtatttaactttcctttgtctaactttttttcatgttatgtcaggactcattagatatttcaactgttttgcctaaatttcatcatagtgaggaatgcagaatacagaactataaagtttactttttttttttttttggagacagagtcttcctctgtcacccaggctgtagtacagtggcacattcttggttcactgcaacctcaacctcccatgcttaagcagtccttccatctcaacctcctgagtagctgggattacaggcatgtgccactacggctgtatagtttttacagagatggggtttcgccatgttgctcaggctggtcttgacctcctgagctcaagcaatttgcctgcctcggcctcccagagggctgggattacaggcatgagccaccatgcccggccaagtttatgtttcttttagttatagcagacttgcttttcttaaaacaatatttacacatatctagaacattaacaaaatattttgaaaatatgggtagttctaatgcatttaaacttttataagttgtcataagttttataaccataacaaaaacaaacatttgctgaaaacacaatacagttgtacatttcaacactacatcatttgaagctcccttcaaggtacagtaaggctcaagttgttggcttcatatcacaatgcactaacatcaattttcccattggatactgttttatgttgcaagaacctttatttaagtgtcattggactatcattctgtaaaagtaatagtaatctatgtgctaatatgtcccatttcttactttatgacaactccacttaccccctaaattctaataccttcatttaatccataaaaatgccaatttgctagtgagagagcaggcaagacttaccaggatctgggagtctttgtggagaggttcaggcagcaaacggggcatgtgaagacacacctgaaagttagagccagtttatgtagaaaacattctccccgaggcacctaaaagtagggaaaaaaaaagacaagaggtattccaatgcctgtcaaaaaggtgatttgtgaagtcacttaagttttaacttatacacacacacacacccacacacacacataaacagggaaatagagctcagttttacagcaaatatttttcttgttttctctaaaaccaattttaatagccaggaataatgcacagacattttgttccctgatttatttatgtttttctggttcatgttttagcggtcattttcagacagcttgatacttaccagctataaaatgtgcggaattagatgggcttgtttctcaggaatgtgagacccctgactccatcccaatctactttcaggcggaccaggtggaatagtttcagatgggttcccaaggctctgaccagtcctacctggctcaagatcatcttaaatggctcatagatttctgtttaccttgtgattcggcaagtacaactaaccattgtgggaatggcaagtttaagtggttttggaatccatgtggtttgaaatttcattctcctacgaggaaggtttatagtatagaaatgaacctacagcaatcttacattttattcacttgtcagtggattaatatctccatttcaaatctgtgcagtttcaatgggtaagtttattggttgcttgaaaaaacatttaggatttctagaagctcatggaaaatacccttagggaagaaaaatgattgtgaactgagccaaaatgagatgctcatttttacacaacatttacaaatcaggaaatagattcaacaaactttcaccaaataccactcttacaggcctttaagctttttcaagggtatttttcaatgcttcttacctgttatttgtgttttaatttattgctctatttttccatcgatgccactgtttttaattttgttccctataggtcaggttcatctgctcacttctgatgtactagaaagcaaactccaagagggcaggaacatgtcttttccattttaggatgaagtatagaagaagcttgcagtcaatatttgctaaactaacttgttttatttattttttacaagccaacagctgccacaaagtaccaggtggtaggagaccaaagagcagtatttggtttttaggtggatacttcagcaaagtgtgtgagtgaaatcaagggactttcagtttgttcaattgacgggtttgtgatctgttttattagaccaatactattttccctttagactcttaaattattgtgcaaagcataaactctaggcattaaaatttatataatttttaaacttatttcaaacattggaatttcatattgtcttttttgccttttgagatatgtaaattttaaaagcttgttgcattcttgagtgatttgattatatcttgaggggttttcctgttatatgtgtctccagttttatgacgagaatcaaagttacatggttcaaatttcaaaaatttccctttaaataatcatgaataggttatcgtaggctgttttcctgtaaactgatggcatgtcttggggtatctgctttcatctcaatgagttaactatttacctcttaagattaggtgtagagttagaagctgtcaggcaggatatattttcaagaaaaataattttcccatgcaactaaaagatcagtctatcagttaatcagaagcagtctttcagtatagctctccttaaagtgttgatatcttttttattaaaaggaaaatagctttattgcttttcctggagagtagtatatgctcttttacccaaaatcggacaatataaaaattcaaaggaaaaagaaagtaaaaatccttgaaagcctcaaattttttggtaactatctttccagatccctcctcctcattctctggttcttttctttagtctatatacgcctgtaatttttctttagtctctatttcttc

SEQ ID NO: 586631 - DNA, 4001 bp, Homo sapiens
acgccattctactgcctcagcttcccgagtagctgggactacaagtgcccgccaccaggcctggctaattttgtttttgtatttttagtacagacggggtttcaccgtgttggccaggatggtctcgatctcctgacctcgtgatccgcccgccttggcctcccaaagtgctagaattacaggcatgaaccaccacgcccagcccagtctcatctcttaatgacgcctccttctgcccatcttcacatcactaacaacaatattgctcaaccacctcactgggtcttgtttctgttttaaaaaacctttcaaactgtattaccttcaagaataagttcaagtgtgttaacctggccttgaagatccttcacaattacatcctccctgaccatatcctcctctcttccctcaaaccttcccaaatcttttcagcataaacttaccatcagttcagataggttagtgccacacacctgcaaataagtcctcccccactgtaaatactctcctttaaggtgggctgaattcctacctcccggaaagttagttaccttgtcataacatgttgaatttttaatatcctggattccctcaatagtctttaccacctgtattgttttcaacccttaaccttaagctttgtctctacctaagtcaaaaacatctggagacttaacactatacagtactatggaacaaaatacaaatgcctctttaagaaataccaaataaaggccagacgtggtggctcacgcctgtaatctagagacctaacaccatacagtactatggaacaaaatacaaatgcctttttaagaaataccaaataaaggccaggcatgttggctcacgcctgtaatcccagcactttgggaggctgaggcaggtggatcacctgaggtcaggagtttgagaccagcctggctaacacggtgaaaccccgtttctactaaaaatacaaaaaattagcagagcatggtggcacgtgcctataatcccagctactcgggaggctgaggcaggagaatcgcttgaaccccggaggcggaggttgcagtgagccgaggtcgcaccactgcactccagcttgggcaacaagaacgaaactcagtctcaaaaactataaataaataaatcgcagccgttaggagactaagattccacagactgattactgaaagtaattgcaaaaactgcaaatacttttgtaccaacctaatagatgccaggcaggaaaccagataaaagccgagaaaagaagggccaatattagaaggggttaccgggctgtgtgcactaagggaccccctccctttcccagaacgcaccgccagcactgcaccttcactcagtaccaggtagccgagctggtctgggattcgctccagcccctgggtcagcgcagaagtctagtgggtaaagatgcaagtcgtgagaagcatgctagagggatggacggcccgatacccttcacctgcaaacccaagtctctgggttgacgatggccccaggttttctcattccccagccaggtcccttcccggccccctcccccctacatggtcctcaatactgatcttcccgagcctccatctgcccccactctcgcccccgggctcccctggccttccacatcccacctttgctaccccaaggggcctttgctgccccactggcccctgcccccagaccctctcttcacctcccttcgtctccgcccgacctgcagactacccgcagccccagaacaccctcccacagacccctccccagcattctcgtcgccatccctcccatttccatcccctcttcctccccgagcggataggaggtgagggtggagcgcaggcccaccagggggaaaccacacagactggggagcagagacgctgaacccccggcgggtcctctcgcgcatgcgtcctcactcaccatcgcagtcttcggtgctgggggagctccctaccagataggtagcttccggcttcaggccccggtcacgtgcttgcagccgctgcgctcctccttctgcttgcgccactggcctttagccccgcctctagcatgaggattggacagtggccacgtcgtcagacccaaccagccagtgcgaagcgctgtttcccggaggcgcacgttgattggtgatatcccctctttaacacccatctccccgcccctcagtgcctgagcgagaggaagacgcgggagcgtccgaggaggggaggatctgggaggggcgggagtaggccggggttgaccgtttggtcctgggcgcactgtctggagccagagttccgcctgagccaggatgcccgctggtgtgacccccccaaatgaatcccttcccaggtttaagactggacccaaaaactagagaataaaaggaaataacgtgcaatgcatgtgaaaaactattcaaggctgggcgccgtggctcacgcctgtaatctcagcgctttgcgaggccgaggacggatcatttcagggcaagagttcgagacgagcctgagcaacatagcgagaccctccccagtccccccgctccaaccacctctacaaaaaaataagaaaataagccgggcatggtgcctcacgccagtaattccagctactagggaggctgatggaggagaatctcttgagctcagcagttgcagagtgcagtgagctattatggtgccactgcactccagcctgggtgcccttcctctaaaaaaaaaagaaaagaaaaggaaaaaaaaggtactcaaatgctacttttttttttttttgagtcggagtctcactcggtcgcccaggttgcagtgcaatggcgcgatctctggctcaatacaacttccgcctcccgtgttcaagcaattctcctgcctcagcctcgcgagtagctgggattacaggcgcccaccaccacgcccggctatttttgtgtttttagtagagatagggtttcaccatattggccaggctggtctcaaactcctgacctcgtgatccgcccgcctcggcctcccaaagtgctgggattacaggcttgagccaccgcgtccggccctcaaatgctacttttgtgcctactcaagacagctctttgttgaagacaagaatttgttcccgaagtggtttttttgtccccagattcagtccgggacaatgtggtggtaaatagaatccccagctagccaatgcagctgcaatactgaatattcattccctacaggaaaaaattagaaacagtaccttggaatgatacacacacacacacacacacacacacacacacacatcacacaatatatgtaaacattagaaatttttgttttaaataatttctaaacctgttgccatattaatgtggtggaggctgtgttagtgaaataatatgaagaatgattctagaagcctgggcaacatagcaagaccccatctctaaaaatttaaaaattaaccaggcatgatactgcacatgtagtcccagctacccgggaggctgaggtgggagaatcgcttgagcccaggaggttgaggctgcagtgagccatgatcatgctactgcactcaagactgggtaaaagagcaagattgtctcaaaaagcaacaaaaaaatctgaatataataacaattgttaaagtctgggtgtcttttaagacttgttagaaacagcaatttcaaggctgggcgtggtagctcacacctgtaatcccagcactttgggagaccaaggcgggtggatcacctgaagtcaggagttcgagacctgcctggccaacatggtgaaacctcatcactactaaaaatacaaaacaaacaaacaaaaaaaaaaaaaactaggtgggtgtggtggtgcatgcctgtaatcccagctactggggaggctgaggcaggagaatccttgaatccaggaggcgaaggttgcaatgagctgagattgtgccattgcactccaacctgggcaacaagaatgaaactccgtctcaaaagaaaaaaaaaagattttgat

SEQ ID NO: 586632 - DNA, 4001 bp, Homo sapiens
ccggcctgtttcgagtttttaaccacattcaagaagagagaggtttacagaagtcacttgccttagattccatattcagaccaatggctctttcaaaattaccttcttagttttagccaaatatgaaatacatggagatccaaggaggtgaagtggccattggaacacgtacctcagtggaaaaagaaaacctggtaaaggtacggttttaccaagcatgaaaacagttgtgctgatattcaatcttctgttttattcccactttttgcctcccacgttagattctgttcagatagcccgtgaagggtgacagggtatgccatcccaaaaatatgtctctggcataaggattattttaagctaaaagcacttgaaaaacagaagagtgctctaaactgcccccttttcttcatgaaacaagagaaaactcctgtaaaacatggcctccctacaccaggaacaaagaaacactcggcaccagagccgagcaaggcggagatttctacctagacgtggttcaagcagttccatcttccattagcctccccgcacactttactctcccacagctgccgctcttggttctgcctagcacaaaagtatttgggttttgccatttctttgtgtctttttcacgtaaaacatattcaagagatgtatgtttttctgttgttaatctgttttatgtcaatgtaacgctctgacccacctcgcgacactaagaaagtcaagtttggcctccccttacacccgcttcccatttctgggcacacagacagtacggacaatgcttctttgtcggcgagagcccagggaccagatatggccaaggaaatccagcctccaggccacttctgaggagcaggtagccggcggagcgctccgccgcgcaggggcgggaggtgtccgcgggcctcacgagtgcacaagcccgcattgcgaagcgccgctcgggccaagaaggaaagcgcactgtccgcgtatttcaaaggcgcgttggggccaggagggccgaactgctggaacgtggttcatgcagctgaagcccacggaccctaagcgcggctcatcgggaaggcccggagacaggtgctaggcgctatcatcccgcgccctcccaagcccggcgcgcgcctgtgacgtcacgcctggcggaaggtggacgctaccaccgccgcgctccccctccggcgcctctgcggccaggccgccgactcaccttcccgtcctgatgaaaagggaggccgggctcatccgtggtcgccgggggacgaacacagcctgtctcttcggccgctccggaggcgagcagcgccccggcggcggcctcgtagtccgggaaggggttgacgaacgcccgttcctccatttctgcctcccctcccaggtggagcttcagcctctttgacatggtctcgcccatctccgccgcggtacggcgcgcgggcggggacaaacctcctgtcccggcgctgcagctcgccccgccgccgcctcctccgagggcccgcgcagagagcgtcctctaggaggagcgaggccgcgcgctggcgggaggagcggggcgtctgagcgtgcactgcctcgtcgcgggctgctcgcacatcaggcggccgcagaggcggtgggcgctgtgcctctgccctgttcctggcgcctttgccctgctcccgacggagaggagcgggctcgcgggagcgcccagcggctcacagcctgctcgcgcctcctcgcaccttccccgtggcccgcagagcccgtccgcggcgacgcgcacggccggggctggagtcccggggtggggatcgctgcgcccggccagccccctccgcgatttccaaagaaaaccgaacgcccgctagggccacgctcccgcggggaaaacctgtagagaagaggtcgctgtcactcaaggtgtgtgcgcgtcgccgaccggggcgagctcagcccctggcgcgccgtcgtcagcctgcatttcaccggcccctgctgcgccagcccaaaggaatagcagcagttctttgtttgatattaagaagaaaaaaaaaatctcttctaaagaacagaatttcaaaacagtctaaaacactgcaaggctagtctccgagggatgggggagggagacagtccctcctattcatcactgttggaggggggtgtctgggaggaggagccacaggcctttttttttttctttttatgttttatgttcactccctttgttttgaataaatggacatctttgataccgggacataaaatgaaagcatacttaattatccaaacattttatcgaccagaaagagtcctccagtgttaattggcaaagatcatagtatgtattataaaaaggacacaagcaaccagatctttacatttatgtaatcgtgatgtggtttacttcagtcttcattggttctctttatttttatttgtttggaccaaatacgtgtaatgatttctgctccttgaggaaaatgtcttatttccgttttcttccgctcagtaaacgttgattgagcaccaaatggtactaggtgatgaagaaataagagattaaaaagatagttttggctctctggggattcccagttattgggtgagaaaagcaaggattacagcatagctgatgtaggtgcttttctggaagcaagcaaaaatacacgttaatgtaaaaagtgacatgatgaagaaaaacacagtgccgagcacagggaaggctcggttcctcctgcctccgtggcctcggtggaatgatgtgggaaagtctggcttcccactacctcttctagtgtccccccaaccccacagggctggacatgtgaaacacaccccaccaagaacatgaccatgggaaggtacagtgtagaagaaaatcattttaaagggggtactcagcataactatcttcaaagttcagggaaacagaacagatacaacaggatgagtgttatagcagcatcccttagctccactttcctgctttcccctttcctggggtcttttctcccaccaaattttcatacctagacggtgtaggaaaatccactccaggaactactgatgccgacatgctctaggagccatccttatcccaccacagggacttaactagacaaaataacccacggtgatattccccaaagtctggggaactatcacgccttggacaggtacagcagaaacgtccactgcgggctttgttaggctaagcctagtgaattctcagctctccctacccaggagggaggtgaagattgtctcttcttcctgcagtctgctggtggataactggcaactgttggcaagtacagaaacctgtcctaaagaaaaccaatattttcaaaagctgaaaaatcgaaacccaatttaaggagtcggcatattttcctaaatgctctcttatcggcagatcccctgccctcctggacagctcactgacactattttatggagaagtggtaggttccctttcttcagcctcctgtcccctgggggttttttaatgcagagcacaggggattcccttctgcggcccttttacacccagggctatcttcccccgtggccactcttgagctcttgagtagtacagagaccttggtcagtgccttgaaattacaactttattttccttaggacaagccaaattcttaggacaccctccccactcttctgtgtaagagaagggcaagaggacatacatgccggcccaaagcacacccaaggagtcgtgagggcccctggcaactgacctttcaaaggaagacatagtccaaggacacgatgtgcgagagggcggcattgtggcaccacgttgagatctgggggggcactgggcggagcagcacctggggaagccgccgggtgcggtgcttgggtcacggccctccggggaggccaccgggtgcggtgcggggcagggccctacggggtggccggcgggtgcagaagttgctaccaggggagggtgtgctcatccttgaagatctgagtcaaaa

SEQ ID NO: 586633 - DNA, 4001 bp, Homo sapiens
aggccaggcacggtggctcacacctgtaatcccagcactttgggaggccgaggcaggcagatcacaaagtcaggagattgagaccatcctggctaacatggcgaaaccccgtctctactaaaaatacaaaaaattagccggtcgtggtggcaggcgcctctagtctcagctactcgggaggctgaggcaggagaatggcatgtacccgggaggtggagcttgcagtgagccaagattgcaccactgcactcccagcctgggagacagagcaagactgtctccaaaaaataaaaaataaataaaaaataaaaaattagccaggtgtggtagcacgtgcctgtagtccccagctacttggaagggtaaggcaggagaactgcttgaacctgggaggtggaggttgcagtgagccgagatcacgccactgcactccagcctggacaacagagtgagactccgtttaaaaaaattctgtgctctctctctgtctctgtctccctttgtgtctctgtctcgctctcactttcactctcccatccaggttctgaaagcaggtgggctgaggtggagggagcggagggtggaccctctgaggcccccaggggccggcagggctgggcggggtggggagtgggggctgccacagaccacggttctgcagaggccaaaatagcactaaagggaagtgggcagttttcatatgaacaacgattgccaagagctggcttcggggaagttctcggggctgggctggaggagctacagtgtctgaatcccgcctggaaggacgctcgagaccaccctgccggttctcccagccttctccgagctgagctgtggttggggacactggggttggggagggggcagcctggcttgaagccctggatggctttatccactggactctgctctggggtctgttggttttttcatttagtttttaattatatttttttatttttattttttaaagagatgggagtctcactatgttgctcaggctggtctccagctcctgacttcaaatgatcctcccgccttggcctccccaaatgctgggattacaggttgagccaccgtgcccggctggtcctgttgctttttccaaataactctgggcttcaaatgagcctagctgggagggagagagggaggcgggcgggtgcaggaggggcctgagcagccctggtcccagggacagagttgagggccaggtagggggctgggcagggaggcagtgggggttcttcacctgacctggggcaagacctgggccctggcctgtaatcccaccgttttcccctgacctgtgtagggggttacagtcccatttcacggatgaggaaaccgaggctcccaggccagggcagccactgttttggctctcggccacttacttcaccagtctctggcaatgatgggaccaccctgggatgtcccaaggctacacaggctggacaggggaaggcgagggcaagagagtggccagaagcccagaaacaaactgacccctgaagtgccacagagcctggtgccagggtgagagtggggctgcgggagggggcgccaggcatccaggcctcttcccaccccacccagtggggccaggagctcctgggggatgggggacagcctgaggactgaggcacccctgggaaaggcttacctgagagtccagggttcctcaccacggccgccccatcctgagcccgcacacctgcccaagctgatgccaacaccactgacactggcgggcgggcagggcgggcttcctgccagccactgaatcatccgtacatccgccgcactgccggacaggctcagctatgaagagggcggtggggggaagggaggggagacgggggaaggaggcgggagagagagagagaagagaaacaaagtgagagggagaaagagaagaaagagagataggaccgggcgaggtggctcacacctgtaatccaaaaactttgggaggccgaggcgggtggatcacgtaaggtcaagagtttaagaccagcctggccaacatggtgaaaccccgtctctattaaaaatacaaaattagctgggcatggtggcatgtgtctgtaattccagctactcgggaggctgaggcaggagaatcgtttgaacctcagaagcagaggttgcagtgagccgagatcgcaccactgcactccagcctgggtgacagagggagactccgtctcaaaaaacagaaagaaaaagagagagacacagcagagagacacaagagaacaggaaaatatggacacacactaaacacacacataaacacaaaaagtcacacagagaggaagagagatacactccaatagacagggagcaagataatgaaactgaggtgctcctgcagatggcagatatggagacacacatacgctaaaaagacacacacaggcagaaattcacacccatgggccgggcgcggtggctcatgcctgtaatcccagcactttgggaggccaaggcaggcaggtcatgaagtcaggggttcaaaaccagcctgaccaacatggtgaaaccccatatctaccaaaaatacaaaaattatctgggtgtggtggcgggtgcctgtaatcccagctactcgggaggctgaggcaggagaattgcttgaacccaggaggtggaggttgcagtgagccaagatagcgccactgcactccagcctgggtgacagagcaagacttcatctcaaaaaaaaaaaaaaaaagaagaagacacacacaggcagaaattcatacccatgggccaggcacggtggctcatgcctgtaatcccaacactttgggaggctgaagcaggagaatcacctgaggtctggagttcaagaccagcctggccaacatggtgaaaccccatctctacaaaaaatttaaaaattagctgggcatgagatggaccaagacacacacagagagacacacagaaagatacagagagccacagactgtcagagacacacacagatggggagagagcaagaaacagggagatagaggccaggtgcagtggcttgcacctgcaatcctaacatttttggaggctgaggcaggaggatcgcttgagaacaggaatttgagaccagcctggacaacagaacgagaccccatctctaaaaaaatttttttaattagctgggtgtggtggcacacacctgtagtcccagtgttttgggaggccaaaacgggaggatttcttgagcccaagagttggaggctgcagtgagccgtgactctgccactgcactccagcctgggggacagcaagaccctgtctgtctgtaaaaacaataaataggccgggcgtggtggctcacatctgtaatcccagcactttgggaggccaaggcaggtggatcaccttatttaggtcgggagtttgagaccagcctggccaaaatggtgaaaccccatctctactaaaaatacaaaaatttgccgggtgtgatggtgggtgcctgtaatcccagctacttgggaggctgaggcaggagaatcacttgagcccagaaggcggagtttgcagtgagccaagatcgtgccactgcactacagcctggacaacagagcgagactccatctcaaaaaaacaaaacaaaaacaaaaaaacccaaaaaacacaacaaaaaaatttaaaataataataattattatttaattaatagctcaatggccttgggcagctgtttaatggtcaatagcacaaggcagtccacccacttgtgggatgtggctttattgacctcaggtgccagagcatcctggcctccacagggaactatctcactcggtcctcatgtctgtgtggatggcagccacggtgtccaccccagggctgggcacaggagcaccgctgggcaggagtgggctgtggtccctctgcctgtgctatgagccgttctctgcaccccgatgccaggagcctcatctgtgcagtggggtgatgagacccccaaggctggggtggag

SEQ ID NO: 586634 - DNA, 4001 bp, Homo sapiens
tgattataaattccattccatagagctaacaaactgagcaggaaagacggtaacatgctgtctgctaagcaacgaggcacattggctgtcacacgtggaataagtgcaaaggagtctgtgggcccagacaccaagtgtgttgtttttaagcagaaacaacctctctgtttctctgagacaactgtgtggacaaagaagaatttcaaggctctctgccgactggccagaatggagctgcggctgccagactcctaccccggtggggatggggtaactgactgccggaaaatttggctcaattttcctttaaatcataccagtgctgttcacagatgcacaagacacaaggactctaccttcctggagcccctcttctctccttggctcccacgcccctggtggcatctaagcgggggtgggacattgacccaggttccgtggcggccacctccacgctctgcatgggccactcagacgtgcaaggcatctgcctggggctgacgggcaggaattcattgcaacttccctggctctgtccttggcacttggagccatttcctggaatggacggggaggaaaatatttccccaaataccaagaagagttattttgggtataaaatgtacaaaatatgaggaggacgctcctttagccaatgtggaaatgttcccctcagcccaatgtccacaactgcttgggaagggaaagaacctaaaagcatccactgtttctctcttgccttgtctccctgcctaagtgagagaaatgatcagtgtggccttcttgtttctaagggcattagaacaggagcactcacgttgctagaagcctccatatctggttctgcagacaatcctaatatgaaagagattggcaaaattccccagttccagctgcccatggcccacctcagaatcctacagaacaaacacaactccggctgccagaggtcattctgcactgcaaaggaagagagcctgtgctcctggaacggtaccaccaagtctctgctcttcacccacctccccaaagatcacccttccaacagaaattaatcacctcttggaagctgctattctgaaatgacagccaggccacttgtctcacttggacctaactgtatttaaggagtcactttcccaaagcaccactatctttaaactatagaaacaggagtgtaaaggcgatggcacccacagtgaaatccaaaccaagcccagactgaaggaaggctataggtgagcctggtgggccaacagcgcgtatttagcagtcctggctagaagttccctaataaccagttctgacccccagagacacctcattgtatgcattgcaaagaaggcaatttgcatggctttgaggacagatctggtaagaccctgcacaatttctctggaagattttgagtcttcctgacacttgtttccccccacctctactcatccttgccttcctcccaggcattggccttacacagcccctctcattcagaggtcaggaacttccctggaaaatgaatcctgaattcctacccgcagagcaaggcaatgtctgggactgagactgatcacttgcatctgcgtctctcctacccccaactttatctccttcagactggggtgggacatcctgatctttggggatgtgcccaaggcaatttccaatgcatctcagctctgcgaatgccaccaggttggtgggtctgacagtctcccagggacctggctggttctgcaaggtcctgccttctgggcaccggcacagcccagcagcaaatccaacgctccccagctcccggtaaccttctatctggctagaactcggtacaaagctatcatagtccagaactaagccatccgccctgcatccctcctgactcagtttccccgggatccagagttgtgtggggccctgtggcctgccaagaaagaccagcagagaaggaggaaggagcgcgccggggccttaccttgcaaccgctggcgctgcgattcctacggggctccatgcctgcccgcccctcttatagcggcccgatcacaacttgcgcaactgccccgcaggccccggcgcatttctagcgccagctcccgccccgcccctcagggtagcgacgtgccgggcggctgctagccctgggcccgcagtgtgcacctcgcggggcctcgagggagggcctcggcgcgccaggagccacgcgcgcacccttgggtacctcccaaaaatttgggggtggctggtaggagcgagaaatccttgatgtccctccagaggctccggcgcgactatggcgcaaggaccagccccttgggaaggtgcttcgagccgcgcggggcgcggtcggggcgggggtggctgtgaggggctccgcggagcgggctggggcatacggctgcgccctcgttggtcctggcgcggcttcggggtgggagcgaatcgggactcggccccgacggccctggacgccagggaagcccagggttagagggagcggcccgcagtgcgccaggctccccgacccagattgcggggttgggggttctgaagtcccaccccttctctggcacgcggagaatcgagttccaagcctcagggcaagttgtctctggctggcaccccagggagtgcacgctctctggagggctccaggcgggcactgtggcctttggggacactctggacatactgtgggtctccatcctcaactccgtatttcctacgtacaaagtgggggttggggggtggtcccagatgtagccacgtttttgtcatcatagcctgtgagtggtgtggtaggcatgtttcacctgtatcgtttgtagttccccgctttacatgatgggttggtttgttttgttttgttttgttttgttttacccttgggcttcagggatgaggaatctaaggtccagcgaggttaaatgactttccttagaatccacagctggtaaggaatagcaatgggctaggaacccaggcctattctggtccccactgcgcagagcagctccaaaaacaaaccactccattgagaaccaacccagccaggcgtggtagctcaagcctgtaatcccagcactttgggaggccaaggtgggtggatcacctgaggtcaggatttcgagaccagcctggccaacatggtgaaacctcatctctactaaaaatacaaaattagccaggtgtggtggtgagtgtctgtaatcccagctacttgagaggctgaggcaggagaatggcttgaacctgggaagtggaggttgcagtgagccaagatcagaccattgcactacagcctgggcaacaagagtgaaactctgtctcaataaaaaaaacaaaacaaaacaaaacccataacataaagcggggaactgcaaatgacgttggtgaaccgagcctgccactgccgggtttggtaatgcccaaaagctaagaatggtttctacatttgtaaaagtttgaaaaaaaaaaatcaaaagaagaggccagatgcagtggctcatgcttgtaatctcagtatcccacgttgggcaccagatattgggggaacctgcccccaatatttcaacgtaggttctttctattttccataagtgtcagctggctgagaaataaagagagagagtacaaagagaggaattttacagctgggccgccgggggtgacatcacatatcggtagtactgtgatgcccacctgagcctcaaaccagcaagttttttattaagggtttcaaaaggtgagggggtgtaaaacagggagtagatcacatgcttcaaagggcaaaaaggagaactactgataagggtctgtgttcagcggtgcacgtattgtcttgataaacatcttaaacaacagaaaacagtgttcgagagcagaaaactggtctgaccacaaatttaccagggcggagtttttcaccaccctagtaagcctgagggtactgcaggagaccagggcgtatctcagtccttatctccattgcgtaggatagacat

SEQ ID NO: 586635 - DNA, 4001 bp, Homo sapiens
tcttacaacgtgctcctggaaggaccatgttcccccatttcagagatcagagtgagggtctgagaggccccaggtcttgctcaggatcacacagcccagccctctgaccacatcccctctgttggagaaaggccccaaattccaagatgagaggtgctcagagctggtggtagcccagagtggggctgaaggatgcccaagatcacatagcagtaaggcttgagtgctgggggtgggggggccaggctcagggatggtgccccaaaaggactgtcagtaagagatgctgggggggcccgctggtcccctcatcgccaggcaacctgagtggccagcacgccagcagcggttcccacggagcgcgtagctgcacacaaggggcccgacgcctttctcgctggagaaaggggctttgttaccttgcccaaggggccggcgtgagagccgcccggcgctgggaatcctaacggcccggccgccaaacaaaacccacggcccccgccgccccctcccgccagcccgctgagcccctgggaatgggacgctgtgttcccaggaggctgccatggggttcccagggccccttccccacgccaggaccagggaggaccctgcccctccccgtcgccctcatgacctcaccaagccctgctcccacccacccacagtgccccaaaacaggacagcgccaggtcagaaggccctgggtctccggggtttgagcagggaggaaggcgtgcagggtcttccctgagcccccaccctcacagcaaatgcctctgcatctcccagcccagagacacccccccagtccccgactgcaagccccacacactgtccccatcccgccccagcccaaccgtcctgctgtggcctcgagggaaatgttcaaagtggggtgtgtcttaattatgtgtgtgtaagaagctgatgcccaactgaagtgggctgtgcccaaggttgcaggcctcagagactactgcactgtgcggggagggtccccacacagaccccaaaacctggagttctttgagatgtactccccaggacccaccaaccagcaatgacttccctccctccccgtaccttaacactgtgatgaggaaagggcccagaggtcagaacccctcacttctctaaaggaagagcctttctccccaggaaggggtctgagctgagggtgggtccgaacagaatttgcttgtggaagtttgaggacataatgccctatgaatgcgctccaatgtttacggggtgagaagtatcacagggcaccaaccccaagcactggagactggtgtagggtcctgcagccatccaggactctggagctggacaggaggcggggccccggggacagtaacacaactgtaacgggagagtggccccagcaggcaaactgggtgcaccggggtgcactggcgtcgcccacagatggccctagtggctggatggggatgcagcctgactcccatgggacactgccaccagctggaccagatggtgggtccccgccccgctcgcccgccagtccaggccgcggggggctcaccatctccttgtggcgcgagatccaggtctccagcagcaggtcgaggcgcgcgcggtggaactttttggtggtcttgacagcgatgaagacgtctcggggcgcgagcggctcggccagggggcgcgggtggccgtcggcggggcggggggcagccccgggcggcgggcccgcatctctgcgcgcgcgggtgagcaggctgaagtactcggacagactgtgcacgtcgcggaccagcgccccgggcgccgccgccgccgcccccagcccgggcgccggggcagcccccgcggggcccgccaggctgcgcagcgcgcgccggccgcgctcggcgggcagtggaggcggcggcgggtcggcggtgagcaccagcaggcaggcgagcagcgcgcccgccagcgccagcagcaggcgccggccgcagcgcttgagcatggtggggtggcggccgcgcggcgcgcccttccccgtgcgcctgccttgcaccgacccgaagcccgtcgctccggcggcgcagtccagcagcgcagcaccagtgtcccgcgctcttaaacctccccgccccggtcccgcccccgtgcgctcattggctcccgggctcgggggcggggcctcgcgccggtcgccgctccacgcccgcagacccacgtggggccgcggctgggggctgggaactgcccagagggcgcagcggccccgcccccggcgcgcacgtgcacgccccgcaccccccccgccccgggtagcccctgcgggccgccgaggggcttggggacgggcccggcccgcgccggtgtccctgaagaggaaacccagcctggccagcgccgtccggggatgcaccgggcgtcccggcacgggaggggcgcgccctcggcgcagcgggcagggtgctgagacccgggctctgggctccgacgcaccgcgggggacatcctacttcctcgctgtgcgcttcccctcctgagcacggcttcctccccttgggacgcggcaggccttgcaaactggggtggcgcctgggtcttcccgagcgctcggttcaggggagccgttatttgtacagagcaagagcttggccacctgtgccgcaggtggggacacgaggttctaacgagaaagcaccagaaccaaattccactccttcctccctggctgatttcctcgatcctggccctccgtcgggagggttggctccccgaaatcctcaggcgccccatggcgaggagaaacgaaggccgccacttccctcgccggatgaaaggccgccttctgtcccatttggtctccttgcgctcgggccagatgcggcccagctgtgcgccctccccaccccgcctccccggcacacggcccccatccccggcccttcccacgggcccgggcccgcccctcgcacgagcgggggcggcaggaatgcgcgccggcagccgagggtgaggggcgaggggcccggaagtggccaagggtcgcctgagcagggtgtgagccccctgcccgccacgtcctccggaagcgtggacggaggcggctctgcccgtggctgcgctgtcttcccgtgccctcctaagcagggtctctgcgaccaccacgaccaccaccgccaccaccgtggctaaactgcccccctcggagttatgttcacgcctgagatggcattttaaattctttaagtgcccttggagcccctctccttacctctacctgaatgtcagccgcaagacagcagcgacctggtgtcattcagacctggaacaggttttgggacatagtaggtgctctgaaaaaattcactggataaatgtctggccccactgtcagaccctctccccccgctaaggacgctgtagcccatttgctcttagggccccaggggccccacccctagcccctgtacccgctgggtggtgtgggggatgggggttcccaggcctcttcctggccccaggtaattagcagtcaccacctccgaaagcagatgccccagcagatggtgctggctgtgcccaagtgacaagtctcccatggcgtcacctcctgccataaaccccttccgatcagccagagcctagccctggagcctccatgcagctggagaggcttgagggtgagccggggagaaaaggacccagtgactgggttggctgcccccacaaagtcagctgagtcccagcccagccccagcctccggactgaggggtgtccatgaccccacgtgcttcagtcacaccgctgacttcaggctctcccatatctgaattgtttcagagacggagcctcatccatccccatcatctcttccctgaatcacttgggcagcctccacccccatcccacccactcctatcctacctgctttacttattctccacgcagcagctggacaactaggatcatagccactcacacacccacacaaagagcaaaaccctccatagctctccactggctg

SEQ ID NO: 586636 - DNA, 4001 bp, Homo sapiens
atggatggatggacaggtgaatggacagatggaccaacagatggtctaatggatagatggacagacacatagacacagaggcatgcgggtggctgggagggtgctggatgtcagctgcttgacagcgggaccgtgatgtgattcttggctgtgccccagggcctagagcagtgcctgtgtgtatcaggtgcttgatgaacattggttggtagaggttggatggaaggatggatgggtggatgtgcagatacacagagggctcaaaggcgcctctctgactctgtctcccaaatgcccagccctggggagcataggtctcagggtgagaagacctggcagggctgccgctggcctctgagcccgcacagggcctggggcctgggggagggctgtgctgaaggtgaattcccagtgcctaggcactatgtgcctgccctgccctgggggcatttccaaacaccacctccagaaggcctcagggggtctcactctaactgttggtcttacagacgggtccagggggccagaaagaagaggtggcacacccttaagcccacagcaggaacagcaaggggcctcagcctggaggccagggcttgtccacaccaggaggacggcaggcctgggctggcagctgcgcctctttctggcgcttctgtctgaggccagctgggccatggggctggatggggctaatctgatttgcagcccccagcatcagagcgcagccaccaggatccacttactgacgtcctgcagagtccagacacccaccagggaggcaccagagccaccctgccccagccggcctttgtcttgccaagaatggctggcttgtgtggcagccacagcaggcagggggtgggctgtggccacggtggtgcctgtcaggccccaggcatgaccccccaccctagtcatgaccccgtgcccatgtcagtgggatgggatacagagcagtgggaggaggggctccaggccgggtggagggagcaggggtcagtcttggccccaggggagccctgcttgctatgtgatcctgggcttgtgtacctccctgatcccaggctccccatcgctaccatgggccatctttcccccttgaaaggatcagggaagacgatacagcatcaaaggatattccaggctgctctggaagcagaagaaggggaggttatgtccccaggaatggcgatcacacctgctgagagaggccacctccgtaggacctgagagctggtgttgggctccactcatccatccatccatccatccatccatctgtccatctgtccgtccatccttccatccatttcatgtgctcatcccacagccttcctgagcatttgctccatgcccagatctgcttggcactgggggaaggtagtaggtgaggattcaacaggggttagaaaaatgggtccagcccaaaggtgcccagggcccagacgagggagaacccactgtgggctggggctgggaggcaggggacttctggaaagtcttccaggaaaagatggtgacatttgccctggggcttgaaggcttgggcaggtggaggtggaggttgtgcagtcaggcaggggtgtgtgaagcaggtggaggtggaagttgggcaggggtgtgggagcaggtggaggtggaggttgtgtggtcaggcacaggtgtgtggggcattcatggaggtgaggctggagataaagagaagcctgaggatctaggtgtagaatgcaggggtactgggggagacatagggggctccaggttcacgagcaagagggacggctctgagtggcattctaggaggaaaagcaaccctgaggcccacctcatacaatacgtgtccagcctgagccttcctgtctgttcatccatccctctgagctttgggtccttgtggccagggagggaggaagctgcgagggtggccaggagccgccttggcctctgtcctccctcctcccttccttgggaggctctgccagtgttgcagcttagtctgggaaggatttgcagagagaaggcagggccgtgttgctcaggggtgggaccctggcaggaggggatggtggaggcgggtgtggggaggtggggcagagtctctctcagggcggcagaggctgggctgaggctggcatcagaggaaagtccaagcattggaggcaccgtcctctctctgcagcccgtttctgtgcacgccatctgctagggacttgcccagacggggttatccagtgctcgtcttggtttctggggacacctgacagtgaatgtttggagacactttcatttgtcgccaccgggctggggctgaacagacagtagggtctggcctatagggcccagagaggctgccccacagccccccatgcacagaacagccccacaaccaagaatgatccaccctcaatgtcagtggccacggcgcagaaaccatccaagagatggcgggccctcccctggccgtgccttggtggggctcttgcggtggctctcctgcctcgcctggggtcctcacaaggtgggcttgtgtctggccatgaggcccgggaacggcgtgctcccgccttcttgcaggaggtcacacaagggcagaggatgcagtggccgggcgtccaggacagtgaggctgccctggattggaaggatcgcacgggggggttccgggggagcccacggcggggggctgggaggaggctgcggcaggggcaggggctgggctgctcaggctgtggtccaggccttggtgagggcagggatggcaaagcttggtcccctccatcccccaccacccccacagcctccaggtggtcccagccttaggacctgaagacaaggctggggctggggtggagggaggggccgcctggaaagctgtttgctcagccggggtttaatctccaaaacaggaaggccgtattgacagaagcagcagccggaactgctgcgggctgccaggttacactccctggtccctcctcctctccccacgctggggggctccccgacagaccctgccctcaaatacagctgctcccatcacctgccacagccccccaggctgcacctcggggagacggtaccccgcttgctctgcaagctgcagggaggcctggtgccagagtgaggcaggaggctggagggggctccggggtcacaggccgggccgggtgtgactcttggcctcattttgcaaatgaggaagctgagcccagagagggaagtgagctggtttgggtcccacagggtggggtgagggtggtctgcctggatgcccccaccccaggtctctaacactcttgggagtggctctgtccaccatcaccactgtccaacccgcacagcaacccccgtgcctggcctccccgtccctggggtacccaggaggtcggacccagctggggctcagcagggctcagcagggctgtggtgccgtgaaccctctggcagcgggcggacattatacatccacccactgccagaggaagctgcggagacgggcagggtgatatgccaggtggccccggcagcctctgaggtcattctgggcgggcacttcacccaacagcaacgtcaggccccttaagagcctggcggtcccttatcttctccccggtggctgactcagtaggaccagggatctccgggcagggctgagggccgcccacccctaggtcacctcggggagcccacgtgcgtctccagacctcggccttcctgcatctcagttccatgcccactgcttgtcctgagctggagctgggtgggagctggctctgagggctgtccccatatcttagagatggggctcggctctgccaccctcccttggctccccactgcccagttgggagggctggctctgcccctggcgtcctcaggccaccccctggcccactctgcctgccgaaccccccaggccctgccaggcccaggatccccacactccagccgcccctctgtgtctgcctggagtgctcagcgtctccacccctgtggga

SEQ ID NO: 586637 - DNA, 4001 bp, Homo sapiens
atggtggggtggcggccgcgcggcgcgcccttccccgtgcgcctgccttgcaccgacccgaagcccgtcgctccggcggcgcagtccagcagcgcagcaccagtgtcccgcgctcttaaacctccccgccccggtcccgcccccgtgcgctcattggctcccgggctcgggggcggggcctcgcgccggtcgccgctccacgcccgcagacccacgtggggccgcggctgggggctgggaactgcccagagggcgcagcggccccgcccccggcgcgcacgtgcacgccccgcaccccccccgccccgggtagcccctgcgggccgccgaggggcttggggacgggcccggcccgcgccggtgtccctgaagaggaaacccagcctggccagcgccgtccggggatgcaccgggcgtcccggcacgggaggggcgcgccctcggcgcagcgggcagggtgctgagacccgggctctgggctccgacgcaccgcgggggacatcctacttcctcgctgtgcgcttcccctcctgagcacggcttcctccccttgggacgcggcaggccttgcaaactggggtggcgcctgggtcttcccgagcgctcggttcaggggagccgttatttgtacagagcaagagcttggccacctgtgccgcaggtggggacacgaggttctaacgagaaagcaccagaaccaaattccactccttcctccctggctgatttcctcgatcctggccctccgtcgggagggttggctccccgaaatcctcaggcgccccatggcgaggagaaacgaaggccgccacttccctcgccggatgaaaggccgccttctgtcccatttggtctccttgcgctcgggccagatgcggcccagctgtgcgccctccccaccccgcctccccggcacacggcccccatccccggcccttcccacgggcccgggcccgcccctcgcacgagcgggggcggcaggaatgcgcgccggcagccgagggtgaggggcgaggggcccggaagtggccaagggtcgcctgagcagggtgtgagccccctgcccgccacgtcctccggaagcgtggacggaggcggctctgcccgtggctgcgctgtcttcccgtgccctcctaagcagggtctctgcgaccaccacgaccaccaccgccaccaccgtggctaaactgcccccctcggagttatgttcacgcctgagatggcattttaaattctttaagtgcccttggagcccctctccttacctctacctgaatgtcagccgcaagacagcagcgacctggtgtcattcagacctggaacaggttttgggacatagtaggtgctctgaaaaaattcactggataaatgtctggccccactgtcagaccctctccccccgctaaggacgctgtagcccatttgctcttagggccccaggggccccacccctagcccctgtacccgctgggtggtgtgggggatgggggttcccaggcctcttcctggccccaggtaattagcagtcaccacctccgaaagcagatgccccagcagatggtgctggctgtgcccaagtgacaagtctcccatggcgtcacctcctgccataaaccccttccgatcagccagagcctagccctggagcctccatgcagctggagaggcttgagggtgagccggggagaaaaggacccagtgactgggttggctgcccccacaaagtcagctgagtcccagcccagccccagcctccggactgaggggtgtccatgaccccacgtgcttcagtcacaccgctgacttcaggctctcccatatctgaattgtttcagagacggagcctcatccatccccatcatctcttccctgaatcacttgggcagcctccacccccatcccacccactcctatcctacctgctttacttattctccacgcagcagctggacaactaggatcatagccactcacacacccacacaaagagcaaaaccctccatagctctccactggctgagttaaagtcccgcctgatattcacgcacctcgtgacttagtcccagccccgtttcttgaggcccaatccctcctcaatcccctgcagccaagcatggccaagcccccaaatatgtgcacgggttgtgctctgtacctggactttacatcagtggcaccgatggtgggtgccatgccaccctgcaccccacctgacaagatgctgtgagtccatctccccacagttcccaggccaggggatggggcttcctgccctgagccgccccacccccgcaactcctgctccccagctacccctgactgcggtgcctttgacccagcaggtcgtgggagcaatgtgcccattgtagagaaagcaagggggatattgtaccaagggagtgaccatacagaggtggatggcccagcctggcaggggcacatgcatagaactgggtagggggggttcccgcgtctctctgtagccaggaatgggaggagtgggggacctgatgctgctgcctgtctggaagcagcgggaggaagctttacagcattcttgtgggggccgcaggctttggcaagagtgaatcaatttctttgctgtcaggagaatggaatttcgtggtgacttcttgaggtctgaaaactgttgagggggtggcccgcctagccacccccgcccgcttccccaggctcagcttcagcctgaaacacttccctccccatccagaccccaggtctccctctaggggcccactgggccacacagccctggtagggaagtgggctgtgggatggtgctcagccctggacaggacaaaggggagctggggagggggctagagagggctgaccgagttgccagtgaagcctcttggggccgtagggtcctggggaagaggggctggggatagaggctgccccagggcccagcctgccttccgaacccagaggggccacttctcggctttaagaccttgaaccggtggtgttactccctgagcctcagtttcctcacttgtaacacaaggatgacataccatccagaccaggcaggccagctctggccctggcgcatggcttcatgggcttcttggaccctagtcttcccctctgcagggcccctccaccagtcccagtttggggctcccaggcagctgggtgtgcgaatggcccgagagacctgcctgctgaggtcaggtggaaagcaggcccacggagccaggacccacatgaccaggggccctaccctcctcctctagccgccatcaggctgagacagtgttctgtccccatctgagtccaggcctcctctaactgccagggctcagcccgggggttctcctgctggagtcagtgccaccaggtccccaaagccatgggctgggtctgcccttgacactcaggcctagaggggaagggctcggggctggctttgaggtggccatctgccttccctcccccgggctgttccttggggctgctctggcctgccttcctgcagggtcctgggaagatctgtggagacataatgggtgacccattaactcggcaggaagccatccgaggcgcctgtccactcatcggctgatggagagcggccccactcagtgtcttgggaaccagcttcctctgggccagtagcagtgcccagagatggaaactcctggacaggactcagcatggtggtggctgtggctcgggcaagcctgcacctccctgtcctctcctgacacagacgcaggaatgccaacccccaggctggggccaggcatcagaactggcagtgtttgaagcccccagatgccagggggcccatggatttccaaaaggcaggcgtggcctagtgagtgtcccgacccaggagcttctgtgagcagcccttggtggcaggaaggagggtgatgggaaggttggctgggctcagcacagccggctcccaaggccgggggagggataccgcagggtggcacagctgattcccattactgcagctggag

SEQ ID NO: 586638 - DNA, 4001 bp, Homo sapiens
ctgctgctcatttcttgcttttcacatacacacttttacaatatatggcaaatcaatatcaggcgagccaaaacacaaaataaatactttcacacaagtgtagtctcccacaagcttctctttccttatcaaactagcaatataggactatgaaccttaacgctattgtccagcacctttaagtatctactcatcctacaacactctgtcagggattgaatccctctccccagaaaaccttcccaggaatagaataaacgacaaaatcttgaaacatcttaaaaatgagaacagtaaaagaaaacgcaaatgaaaactttagctgcctaagatattcagtgcccttctacaaccagaccatccataaaatcaaaaggacctcaacaatgttggaacagaaatgtgtcacgaccactggacccttgactttagaagggagggcatccaagctggctggcagagaggcaatcgccatcaggggaagtacagcaaggagtcagttttgtttcaggactcttcaaagtcaccaggaaatgtaccccatcctttctgggttaaaagtaactttgatgcacagaaaaaaagtactttcatatcctccagctagcaacaatttatcatccacagggaaagagtgatcggagatgctaatgaaacattctcctctctgcctacttccccaaagccacttcccaaaaatgagatcttgaggaatcttgatttactaaagacttctgtttaaagatgaaatggaaggaactttgcacggacaaggaggcaaactgaagacttgacattgaggaattgcgaaagaatgttctaagctacattcttcttacaaggggaaacccaaaacagaattaagatctcttcacctccggatggaggagtaaacatatttaactgcccgggatggaaagaaacagtatcactccagccaccgccccccgccccctttcccaggatcaatgacagaaatagtcccagcagcgaggggcagggcaggctggctgctccttccactatgacctctccaaatccgcttttcacttcgccctgtcagtccctccttagtccctcagcacggaaccccggccccatctctctaagcggccacttctccacccaccatccttagttctgagcggactcggccccacaaccgccctgcctccggggcgtccctctgagtgggcgtcccccacacttgggaggctcacgaaagccccgggacgaggcgccagcgccggggctggggaaccccgggggttccggcctcgctgggctcccgccccccacacctcgacgcctgagcggattaggcggcttggctcgcagcggcgcgcacagcccccgtccctcccactctggcccctccccggctcgggcgccccggggtcctccgcctccgcggaggtgagcgcgcactcaccggaggtgagctgcatccaggcacatatcttgtacacagtggccgtgttgcagaagaagaagagggtaaagcaaatgatgcaggcaatgatgagcatcatggagaggccgataaagaaggaggcggctttgaaggcgcccgagggcagcgtggagaagtccgtgaagctgcccctgcaggtcagctcccgggagaagccgttgccgatgcagtagtggaagagcccgaaatagccggcttgcggggtgtccacgccgtcgcctatccagtagggctggatgaagcacaccacgttgacgatggcaaagcagatggtgaagatggcccacagcacgccgatggcccgcgagttccgcacatagttggtgtggtacagcttggcagcctcctgagccgggagcatcgcggcggcggcggcggcggcagcggcggcggctccgggcattctccccctcctcctcctcctcctcctcctcctggtcctccgcctccccccgcctctcagcgcgcaggagacacactcacggagcctcgcgcgctgcaactcccctgcctccgcctcagcccagcagcaccagtttcagagtctgcatcctcgctcccggaaggagggcgggggagcgcggagcacccctccggctcgcctggcacagcctcccggctcccctccctccctcctggcccgggctccggccctcctcaccaccctccacccctcttcccgccgccgccgctgcagctgctgcagctgaaggcggcaaatccctcgtggagcaccgcggcgcgcaagcccggggcgcctcccgctctgcttcccgcctccctccccgctgcccggcccgcgctgccagtgcccaggggcgcagaggacagtgacgaccccggaacgcccatcaaggggtggacatgagccagagaagtgggcctggattaggagggcgagggtagtctaagaaggtggcaggagcacccacagggatcctagagacaaccccaggatcctggtgggtgtgagaggccgggctcgagaggctgattcagcgagcatttcatcaccgcacagaaacgtgcttcgacctctgcatctttgcagaggcacgaggggcagcgcggcaattgcaggcaagaggcgccaaggcagtggaggcatacagcccccaagagtctttcttgttaccacagaactgcccctggctaactcctcggttgccttcaggtccacaggtggagatagaagttgcgcaggagcctggcagacaataatgtaaaagacaaatctcaagggtggtctcacatcaagcacagctgagcttgcgtcctctttgcgtttttcccccaagcagccagctgaactgtagccaatggatgccccatactttcctttaggtcgtttccccgataattccttccatagattgggcctgtgtgtgcttggaagggactgtgtcacagaattttatagtttgtttgaaaacagggtagttcggccagtgttacacttactatacaaatattgacagctactctgtgcccagacgctgagctgggtggtaagggtacaaaaagacatagcagatggttaattgtccaggaacttccatctccccctacaacccaaagctaaccagagagctgttttcaggctaatttatcccggaattaccactatagaattccttacattttcacatggcattgctgttgtacacctgcccttcgtgctgtttccttagcttatgttttcccttttaacagtctttctgttgctcttttaacagtttctacttttcaaactgcatttccctatttccgttggtttttttgtttgtttccttctgattctgatataaagaaacatgtaactgcctcccacccccagccatgaaaccagaatgcttaattgtaggagtggattttggtaacaaatcgttttgaaccatatgatcacagaattttctgagcatttctatcagagagaattctgatagaattggaccctaagtcttacctaattggctatatcaacggctattctatggtagaagggtcataacctaagtgatgaaaattatgcttttcatttgatagtctgaagatttgagattctatgaagagggagggggagaaagtggaataggggtgtgagacacataagataatgaaggggctgctgctgaaactggggaaagcatctaaaagcatgagttttcagaatcttccattcagttttttctataggcatgtaattcatgtattgtaatacatgtccatcagacaaggtccatcttatacaaggtccattgtaatacaaggtccatcagacagagctttgaaaatcaagagaacagaattaaacagtagcatgagacatgtaagattaagtgagtaagaatttctagcaagtgtggttgtagactctcagaaggtcttcaaaataaatatcagagggatttggaggaggtgacaaagatgaccaaaatatgagttagcccaatataacacttgcaagtctctaaaaatacagttcatgatgatgcatcttgagtgcattggtggcagtggagggtca

SEQ ID NO: 586639 - DNA, 4001 bp, Homo sapiens
tgtttcctacccaggaaactctccacagcctggggcctgcatgggtatcactcatgggctgtctgctaatgctaattaactgtaactagggaactggggttgaggaggggagttcagcagtaagctggtgggacactgtccctttaagaggatccagccacttcccctttgtctgggagcctaggggaaggggtgggagtaaagggggagcagaaaatgccagggtttggaagcatgtgggtgaggggtgcatccaggaagggaggcctggtgcattcctccatgggggtggggaatgcggaggctgggccaccggaggtggtggcggtggcaggggcggcaggagacgccacgtcagggtcactgccccactcggtgcacagcagggggccggcagttcaccggatcaccgcgggggtggggcggaggacggaagttggtgaggggggtggtctacagggcacctcccgtcccagggctctaacctaattcgaaagggaaaggagtgctgcagccgggaggccaggccgactttgggtcctgccctcgcagaagcccccacgcctggtgcagaccaatgactcgcttcctgcccttacaccgatcacacatgacctcggtcacaggggtgccacatcacaggagtgcccctcactcctgcctgcaggaagcagggcccccgcatacctctgcagtgggcggtgggtgggtgggggattaggaattgctgtaaccaagtgtccccatcccggggagggaacgctcttccacaacctggaaactgctactggtccattcactcgctcacgcagaaactcacaaaccttcatcactgttgctcactttcagcagctgtgaaagacccggcggtgatgactcacccgagggtttgagtgcacttggcttccctccggtcaccacttccttgatgcctgttctaccagacactaggtctgcccaccagtgtctgccactgacctgccagctccccgcggccccaggctgggcatccacaaagcttggcccaggagagagcataagtgattcctgccggcgaggcccccgctgtgcacccagcatcctcagaactgccccgagaccccgtctctgcctccattgcagacagggcacccaggcctggcccaggctgacttggtggctcagtggctggggctcggggcctcagtgaacctttgcggatggagagcacgccggagttcctgtccctgcccctgccccgcccctcacccctcaggcctgcattctggcaggagctagaggctgacgggcctggctctcttgagtgccccacacagagtgcctgactgtccctaagaaggatgtcaagggaggtgcgccaggtactgaggctgtgcagagctgccctggggacagccagagaggaactccctcgggggagagccatgccctggccccactccagggtacccctccctgagagcagggtaggacaaagccaggctggggcaggagaagggggaggcacccggagggcatgaaaggggtgctctgcagcccaggtggctggctgggctgggagacagcggtggcttccataatgacaggagtggagaatcatcgttctacccagggccacatccctggccaccaggtgtgaagaaacagcaggtggaggaccggcctcatggggagactgtcctggaaggacccacagctttggcagtggcctgctcccaggctgcagccgacagtaaccaaggagtttcagttctgccccagagcctggacctaggtgggtcggcttccagccccaggccttacaccaggggccctgcctggagcccaggacaagtagggagggggattcccacttacttagccctctggaggaagcggcgtcttcttggggctgaagccaacagcatcctctgtggctacactgggggctctggaggtctaagggagggcaggggtggccagaccagctgcttccccatcctccctcaggggctcaggattggaggctgcagagggtggggccagcgtggctgcagcgcacaggaggaggctgcagccgcgtgggtgccaggggacttggtctgagcctgcaacaggaagtggctgaagcaccctttgcctgggctttggtgcgggtggggagcgagcgatctaggcttggaccccaggcagggagcctgtggcccgtccctggccctcagtcctgaacacacgctgtaggctcctcagcctcggccctggcaacggcactgaaggcctcaggcttctctggggacagggacaagctcaaaagcagctgcctcttccactgctgcccccaagggaacagaggtcgacttcctatggacagtttgtcttcgccaaaaaggtcccctgaagaaagggaggttgcatcccgccgctgctccaaccccacaggccagcagcatgctcagccctccttgcccagggccagcccacccagctgccaaggagatgctaccagggatgcggcagccctgggggttgtgcacaggaggcttcctggaggggacctcgcagaggcagtatgtgagccaaagggaagcctggaccagtccaagcctggtcataaccttccgggaggcagggcctgcaaggggctgggaggtcagaacacagaaaggggcaggccccggagtgacaaccctcagggctaataccagaggtcccatgggcctgcagcaattgtcccactctacaaagaggggcagcatctggtcccggctgagccctccagcagcctgcaggcccccatcacagcacttatgaccctgtctgtcctatcagcgtgggacttcctcaagagcaggggccaggggacaggagcagctctcagatgctcaggttatgacattcaaagatgcacagctgcctgtgcgcagtggctcatgcctgtaaccccagcactttgggaggctgaggtagacagatcgcttgaggtcaggagtttgaggccagcctggctaacatggtgaaaccccgtctctattaaaaacacaaaaattagccaggtgtggtggtgggcgcctgtagtcccagctaccaggaagctgaggcaggagaatcgcttgaacccgggaggcggaggttgcagtgagctgagatcacgccactgcactccagcctgggcaacaaaagcgagactctgtctcaaaaaaaaaaaaaaaaaaaaaaaaaaaaagctgtacagccaacggcaccttccacggggcccacaaggctctatgcacccctggccactgactgcactcccgcacgctggctttgtggtcctcagttgtgccaagcacattcccaccccaaggcctttgcacatgcaccggccctacccccgacatcctctaaacactgctcccttcaattctgtcccttaaacatcacttcctgagagtgctgtcccccaatacctgacactacatttgttcactgagtgtcttgcccactagaaggcagggaccctgttggtctgggaggtgtgggactaagctgtggttacactgtaggctctgaagccaggctgcctcggttcgagtcctgattctactcctcacgcgctgtgagacttttggcaagtgactgaactctgcacctcatttgtaaaatcgctttttaaaaatttgagacagtgtctcgctctgttgcccaggccagagtgcagtggcgtgatcacagctcactgcagcttcgacatcctgggttcaaatgatcctcccatctcagcctcctgagtagctgggactacaggtacgcaccaccacgcctggctaatttttttgtagagatggagtctcactatgttgcctaggttgatctcaaactcctggcctcaagcagtcctcctgcctcagcctcccaaagtgctgggattacaggcgtgagttaccagccttggccttaaaatcgctttaatattgccgggcacggtggctcacgcctgtaatcccagcactttgggaggctgaggtgggcggatcacgagg

SEQ ID NO: 586640 - DNA, 4001 bp, Homo sapiens
cgcagcttgcacacacgggcaactcgcttcctgcagggtgggaagggagttgggaagcattctcaggaagtgtgatctggtgcaggcccagcttgccctgcccaccccacatatacctacacctgcaccaatcctcgcacactgcacatgtgcagcgcccaggcagggcagtcgctgtgccaaataggagaagaaagggcgctggcctgagtcttgctgagatactgactaggttgccaagcttctctggccctgtttccctatgtatcagcttaggaggaggatcaggtccatcctcccgctatagcattggatctggcaaggtaaatgaggagaaaggaagcagtggctttagggataaggcagtgggtgacattcctatcacagcctcctttcttccctctcctgcccaggaagaagtactaagagggcccttcaaaggcagggactggacagggctggattagtgcatcctgggctgaagccagctgggaggtcaagggcaggaagcctggaggtgccggccctaacagatccttggcaatgaatgccctggcttggcaaggggagggggctgcagacctgggtactcccagacacctgtcccagggaggcctggcacctcctctagccagccacaggcatgcttagtcatccttggggcctggcacccttggagctggtgggccctggaaaatgccccagacctgcccctctccactgtacagaaggggagactgagccccagagatggcatggcttgcccagtcacatagctaggtcccaaggccacaacagcctgaccctctgtgaagacgcaggtaccttaggtaggcaggggctacaggaaggtgggcccctaccccaatcaggttttcatgggcctgggaagagttggtggcagggggaggtgtggagtcaggccctgccttggggccaggtggatctaagtgacaggtcagcgaaggagatccaaggaggggcccccagaccctgtcctaggctgggggagtccttgaaccctaactgcagtgcagtactgcgccttgggccccagtgagggagaaggggctaaagaggaggttaggatgagtcatgctcccagccaagactgagggcaggcaccgggtttggggcacggacagggagagtggatgaggctcccgcagtacacggcctccggcttcctggacgcctatctccgctctacccatctggcccccaatcaccgacaccgggggggcaactacccagtttccaaatgtacagaaggggaaactgaggaccaggaagtcagcgcctggctcaaggtcacagagccgggcaggcgcccggcggccactgggacccggggctgcggcttccccagccgctctttcttccgagactggataaagggtggccccagggcgaggcccgggtggtggacagagcacgcggatggaggccgacgcggggtgggcagtgtctgggagtccttcgcggggggacgtgggaggaggaaaaagggtccaggggcccccagacccgcaggagggcagctcgccgggggccggggagggggatcccgggcgggagggggacagggaggggcctgcgggcttcgtaaggacgagctcatcccggaggaggcaggggcgcggcctcctggcagacccggccccctcccgtgccccacgctgccccgggcaccccctccaggccctcgccccacaccccgcggcccgcgcaccttcctctcccatacgttcttccctccaggtgcaacaaagtagcgtcaacctcatgcactcgacggggggcggggcccggcggggctggggctgggggcggccgggcccgcgagctcgcccaccgccgccggcccggggaggcgggggcggagggcgcgggccgggccgggccgggccgggggcgcctctcggacaccggcggggaaaccggctcggcgccgcggcggcttggggagcgagcggaggggcggaccgaggcggggcctgtgagctgcggcacgggggcggggcgcgggcggccggcggcgggaacggccctgcgcggccccgcccccaccagaaaaccccgcccccacgcccaaggccacgcctctagaggccacgccccgctgcggcccggcctgggggcgccgcgagctggcgcggcgcgccccgcccctccccgccccttccgcccttcattcattcttctttctcccagcgacaggcctcggctgggagctgcgaggcccagctgtctcggagggccgctagctctgctggggcaggccaggaggatgtaggagcctagagaaggggcctccgcttccctgcgcgaggcccccacagacccaaaccagctgcagccgggaactcggatcagagctggagaggccctgtggacccccaggacactggtggtcgccttggggaggggagggaggcgggccgggttttgtccctctctctgaggcctgcattgaggccaggctgggcccggggaaggtgacggtccgcgtctcaggcctcgcgaatgagcagcaccagagaaaggagcgagcccctgccaggcggtgacaggtgtactcttctcagtgccgattacctggagctggggctgccctgcccagggtcctggagggagcacgggtttgggctgagtcaagcgtccaaaggaattgggtggtccagtccagcactgatggtggaacgccctgcctagatgtggacaattctagaatgctggacatgggcaggaagcaaccctgtcccccctaggtctaccttccacgtcatccctctgcccaggaagcagtgaccggagtggagccacgtgcccacgtgaacccagtgaacaagaggcagcgctagcccagctccaactctagtcatcatgtttgtggggagaggtctaggcacgtctgcaaagtggggggcactcacccctgggtgcaaaacaattacgtggggtgggaagaaaatactagattttttttttctttttttagattcggtctcgctctgttgcctaggctggagtgcagtggcgggatctcggctcaccgcagtctccacctcccaggttcaagcaattctcccaccttagcctcccgagtagctgatattacaggcgtgcaccaccatgaccgactaatttttgtatttttagtagagatgaggtttcaccatgttgaccaggctggtcctgaactcctgacctcaggtgatccaccctcctcggcttcccaaagtgctgggattacaggtgtgagccaccacgcctggccagaatttttaatttctcatgagaaagaaggctgggcacagtggctcacacctataatcccagcactttgggaggccaaggtgggagcatcacgtggggccaggaattggagatcagcttaagcaatgaagtgaaaccctgtctcttctaactttttttttttttgaaatggagtttcactcttgttgcccaggctggagtgcaatggtgcgatctcagctcacagcaacctccacctcccgggttcaagccattctcctgcctcagcctctggaatagctgggattataggcatgcaccaccatacctggctaattttgtatttttaatagagacggggtttctccatgttggtcaggctggtctcgaattctggacctcaggtgatccacccaccttggcctcccaaagtgctgggattacaggcgtgagccaccgcgcccagacttttttttttttttttaattagccaggcatggtggctcatgcctgtagttagttacttgggaggctgaggtgggaggatacttgacctcaggaggttgaggctgcagtgagctatgattgcaccattgcactctagcctgggtgacagagaccctgtcaaaaaagatagggagggaaaaaaaggggaaggaaagagaggggaatgagagccttgtaacttggctgtagggcatataccaggcaggaccctggctggaaacagaaagtgccactta

SEQ ID NO: 586641 - DNA, 4001 bp, Homo sapiens
aaaatatatatatatatatatatatacacacacacacacacacacacacacatatatacatacacatatatatacacatatatatattcatagccaaaacctagaaactactgaagtgcccatcaacagtaaaatgaaaaataaattgtgctatagtcacacaactactgcaccgagaatgaattataaccacatacaacatggagaaatttcacaaacattgtacaagaaactggacacagaagagtatatacggtaagattccatttacataaagttcaaaactaagcaaaaactaatctatgatattagaagccagggcaacgtttacccttggtggaggagaaagtaattggaagagggaaaggaatcagtctctgggatcctagtaaaattgtgtttatttatttatttttttataatggtagagatggggattcactatgttgcccaggctgaccagtctcaaactcctggtggattcaggagtacacaggcgtgtttagtatgaaatgatctgaagggtacatgtatgattacatgaacttatctctgtgtattttagcttcaattataaaaattacaactaaatgtgtaccaaattccactaactcaaattccaccagctcagactttatatgtcctctttattcaaagtatgacttccaaagtgattctcaattttcaagatcagtgagtacacaaattagataattctaaagcagaattttttcacctcaaaccaagtgtgactgaatcgtagacaacttaggagaggcgtaaatataaacataaaaaattgacatattttacaacagttatgaaaacacagataaacccaattacaatacattctagagcatcatgaaaagataaaaacatcaaagtagactttccaaggtcaagtccgcttcctgactcctgccaacagcacacatggaacatgggccaaaaaagaagctgcttccctaagaagttgcttccatagcaaaatggacttttgctgaggtcctcactcccaaaaataaccaatattctcatcccaaacggtaaggtttcgaactcaacccacgtgggggctgggggagatgaaagagggatggaaacgtgaggcgccaggagggcaggaggtgttgaccgggacaaggtaaccggccgggtccaaacgcgagaggcgggcgggctccgcgcagcccggcccttcccggacccgccgggcccacccaggctctccgggacgcctgcgcatccacctgcctacctggcctggcggcggagcgcgggggcgcgcactggcggggccgccgtccacaccccgaggcgcgagccgcacacccgcccagagaggaagcccctggggtcccagagcgcggcgcgcaccgcagccctccccgcgggaagggaagggcagcaccgaggccgcggggcgggggcggggtcggggctcgaacggagggagcgcgagggggcaggggaggcaagagcggagcgggggggcaggcagaggaagcgaaggggaggggaggggagaggagaggtggggagggaaggggaggggaggggagaggaggggtggggagggagagcggcagaggccggggcgggaggcgcgaggcgaggcccggaggtgaggggtccggggaccgggggcccgggggcggggacggagggcccgggcgggcacgcgggactgtcagggctgcctcggtccccacgcaccgtggactcccgcacttggctgtggaagtgctgctcccgcgccgacacctcgtcctgcccttccatcctccttcatgcccgccgccgcgccgcccgcgtccgcgtgctccgccacaccatcgtccgcccgccgcaggggctcggacagccgcgccggggaccggagccggcacgggcccgcgagccgtgttggaacaggtaccgcgaccacgacaccggccgtcgcctcagcagcctcagacgagcagctctgactaagggagggcgggcgccgcgcagtcgggggcggggcgggggcggggcagggaggggagggggcggtgcaggcatacgtcagacgaaaggcgccgatgcgtcagaaaagcgcgcctcgcggtcttccgagctgctgggccgggaggcgctgagggggcggggccttgaggtcgcggggcggggctccgcccacgctctcaggggctaccccagttaaggaggcgctgtcctggcgtcggatggggacggggaacgcggcgagggcgctgcgacctctgcccacctggcccggccgcagtctcggagttcctgttcctcacaggagctaattatttatgacagctgcatggttcccctcccccagttactcagtgcttggcactcggcaccccttactcagcactcagtaccgcactcggcctcaggggacctgggcagagggaagcagggagtctcccgcggaaactcttgctctgccaaagtaggttgaaaggtcggaaatcggtggtttggggccgggctttgggcggaaacccagcttctctgggtctgagaagggtcttgggctgccccacctggaaaacgcagataaccgagctcgctagacccttgccaagtccttccggtagctcggtcactagggtcagttttatgactctcagtggaccctaaacagcacgtaatatatgtatttttcaccgccaaatatatcaaacacaataattcaccctccgttccctattatctttctttttgttataaaatttgaatttaagggaatgtttataattttaccttaggatttatttggctacgaggaagtcatttaaattgctagtggctgcgatttttgtttttggcatctttgagaattcttaggaagtgtgaaaatctacaaattgctttcaaatgtcatttagtttttgtttttgttttttttttttttgagacagagtttcactcttgtcgcccaggctggagtgcaatggcgatctctgctcacaacaacctctgcctcttgggttcaagtgattctcctgcctcagcctcccgagtagctgggattacaggcgcccgccaccacgcccagctaatttttgtatttttagtagagacggggtttcaccacgttggccaagctgttcttgaactcctgacctcaggtgatccgcccacctcgtcctcccaaagtgctgggattacaggcctgagccaccgcgcccggccgttgtttagatttttatgaatctaaatttaacagtcaatgaagttgttgtaaagttcttcaaagacaaatatgtggtaatttaaaccttgccgtttctcttcacaattttgagtagagaaaattttttcacaactcaaacttcttatggtgcttggcgaagttggaggccccgacacacggtttctatgagttcactatagctgaacattgtggtggtgggagaacttagagaacctgaggcttgttctcagcatgtgccctgctgccacaggctgattgatcataatccaagaacaactgtcaactggttaaattcaacgttcacctttattttttagaatgtcttggagccctaaagaacctggataatttctgggttaattctctccaaatcagagggcaagcagattagattttaaagtgtatggcatttaaacacagattccagaaagtgaatgcatgtagtattcctcatctttttaatgcaatactccaaccatctagaccttttgattttcttttatgcaatcatccctagaggtttacccaccactggtacttgtaacacttaacccagggtagtcaacttcaacaatggccacgtactcaccactccctatacgctcaccctctgccatctggctttgtccttcctcccagcaagaaatggactctactttccagccctggaatcagcctggctgggtgacctgctctagccagtgggacattgaaaaatacaaaactataggaaagtgcttgtacattaggacttgccctttcttacggaccctaggga

SEQ ID NO: 586642 - DNA, 4001 bp, Homo sapiens
agatgagatctcactatattgccagagctggatttgaactcctaggctcaagtgattctcctgcctcagcctcccaaaaaagtgtgggaattataggcgtgagccagcatacccagccagttttattttattaaagagagttttaaataattgtgatgataatgtcattgttattttgatgctcattatcacatcaaagaaaaaaaaatccctcttaaaacaatggttgtggaggaattgacctgcccaagtactgacttgtatgtgtccttccttctaacacaccccttctagctgattagtactgtggccttggcagaccctggccagatcccagtggcccttcctgcaatgattgacgtggacaaaactcacacatatcttgctgcaattgtggccaagataaccctatcatcaagatcatctaacagccctagattagtactgtggaagtcttgccattggctttaggccattttgattttagatgattccaacagagtgcaagggttttaaactgtttctcctgacctatgttcttccataattccggaagaattttttttttgttatatggacactttattgtcattactgttttcccagagaataatagtcttttggacttccttctggtattgactcatttggcaaattcaaaataactgtttactgggcagtacacaagagctttataggcctgagctctgatataagcacatttcctaacctcaggatcaccatcgtaaaggagacagaaatcgaagagatcatctatacagctgtgctgcccctgagtcctcagatgggtttcaggatgtgttatcattttgaaattctatgcaaaagttggtgtattttgcacaagcccagggctattttcttaagaaggttcataacttatcaaaatctcaaaggggttcttgattcgcaaaagaaacactgtctctaactccctcaatgtccagagggaaagagaaccctgtaaaagtgattgttcaaggtctaaagatgtgggaacagagcagggactcataacaaggccctgtgactctcagtgtcatgtacttcccaccaccccacacttcttggtattggaaaagaactatttcaccatagctactatcacagtcaaagcaaccagcgttcccacttttgtctttataggagaaaataaatgtacttaactgaaaaaaaagtatacatttatacgtatgcatgtatcttgggaacaaatattatgccacattaccaacatatagctcaaacaacacttatgtttggcaaaatattgaatcccatacactgattgtgaattattttcctcttgagctttctatttgtaatcaatcaaagagccccaattaagaattttacatattatgatccattgggtggccatagcatttacatgattatttcagcctgaaaaatgatttagtagcaagtataaatgggttataggaaaattcaagtgatgaggattgagaagttagggaaaacaagtgtctgggtttgggatggggtgatggggaggtggggttagccaaggaaaagtcccgagagcctacctttccacattcccccagcctctccttctccaagagtttttgggactccttttcccaataggccatcagtgcctctctgctgaatgtccctgtgggggttttctctgtcaggctcttttgccttagccccacgggaaggttgcggtcaggttcaatgtcttccaactctctctctagctccttcagctcctcggctgacagggaggcgaggagttcatcctcgtcgatggattcgtatttactgagtcctcttcggtagccaaaggtagacatggtccctgctttgtcagacccagaaggagcttgaaggaccaggcattcaaggcggccagaagcaggcagggaggcaagtggcaggctggtcaacaactggtgctaggagtggctgtgggagccttttaagagtggtgatacagggctgtgacaatgcagagaggggtgaaggcatgggctgttttaagcatcagacgtcagctagacatttgaacacaaagaatgtcacatcggtggtggatggaggtctcagaaccagtggggattattaacatactggccagggccatatttagctgagtctgatagctcatgaggacaggcagagtgtttcagataaggagtaacacagttcttctcactttgtattcaaacaacagggaaataaaatttattttgaaaatgacttgccaccacctccatggccatgaaaagattctttcattataatcttagggttgagaaatgtctccacaatactccatgggtagttattttggttcttctataaacatactgtaggtggtattgatggggacaaaaggtcataataatatagtatttcataattttatcctactttgcagtttacaaagcacttcaataagtttttctaatcataaatactgtgagatgaataacatgattctcatttatagatgttggcaactgaggctctcagagattaagtgaaacgtcagaagttggagagctgaaagtacagagaggtgtctttctccactgaacgaaatgcttcttcctactcaccatgattactagtaaaaatctagacttgcaaatgaaactcgaaaaatacaaataataatactggatatgatttattaaggactgacattatgccattccagtgttaagcattatctcctttaattctacagtcctgtaaggtgtacattagtgcctgtacttaactagtacacactcagagaggttaagttactagcatgggagcacagagctaagaagtgagagagctagaatctgagcccagatttgtatctggcctgaaaatggaagagatgctaatttgaaattatatatatgacttaatcactacatattatatatatacaacaaattttcttatgtactccatacatttgcacaaattaaaaaaagaaattatatatgagcatattgttgtgtatatgttaaaataaatccatagtttataggactccataaatataacaccattttatagatatgtaaaatctattaaaaatattaatgcatacaaaaatacatttatcaatacatgtatagtacatgatattctgattataccttcagcagctggtgaatatttgggttgtttctagctttgggtttctaccttttatctatgaataaagtttctatgaacatttacatgcaagtgtttgagtaacctcaggttttcatttattttgagtagatatgtaggagcagaattactgggttatatggtaaatttactttttaagaaactgtaaaaaactgttttccgaaacggctgtaccaatttacattcccatcagcaatgaatgagagttccggtttctcgacatcctcacctattattgcttgtctttctattatagtcattttagagggtgtcaaatgatagttttaattttcatttccctagtaagatgttcatcatttcatgtgtttattggccaccttatatcttctttggtgaaatatttattcaaatcttacctcccccttttttaaacaactttttgagacagggtcttgctcggtcacccaggctggagtgcagtggagtgatcatagctcactgcagcctcaatctcttgcttatgcccattttaaaattgggttaattgtctccttattattgagttgtaagaatctttatatgtgctggagacaaatattttattaggtatatgactttttttttctattctggggcttgtcttttgattcattttgaagagcaaactttttaaattttggtgaagtccaagaccaatttatcaatttttttgttgtattgcttggtgttatagttaagaaatctttttctggccatgcacggtggctcacgcctgtaattccaacactttggaaggctgaggtgggcagatcacttgagcccaggagtttgagaccagcctggccaac

SEQ ID NO: 586643 - DNA, 4001 bp, Homo sapiens
tccgtctcaaaaaaaaaaaaaaaaaaaaagtgtgcaggcagacataggttcctataaagaatcgatacttcaaaatatataaaaatccaattaagtgtaaagtcatctggaaatttcttgaatccccatcatataaatactctttacctactacactatactagtgctaactttcaatatcaatatctttaaatatcaacatcaccatccttccacataatctttcattatttcccaggcatttcctgtgactctttccggggttgcctatacacatctgataacatttactcttcttatctatcggatcagaaaacagaattcacctcacaagtatttgatctaaggcagtaacagaaatttagtgctacattatacggtacaatgaggacatttaacgttcaactaaagggcactcaatgacaaaccctgatgtagctctggaagcaattacatgtagctttcatcgtagatttgtttgaaaaatatgtctttactggagacagtacatccacattctgtacccaattaacattattccaaaataactcttgacctcgagagtattccaaaacagttacaagacttaaaaaaaatcatacaactaggggtatctaagacctggctttggggctctgcctacaacgaagctgtgtcaccctgggtaggtcatttgacccaacatgcccagtatctcctactacgtaaagaagaaattggtctaaattttctttaaggtctcttctaactctaacattctatgaatgtatgaaatttcaatctttccccatttcaaaggtaatggcggcagtcaataacgccaagttagcctagatttttttttcctttttagaaaaatgacccaacttgggatgttttcttgggttgaagttttatttaggaaaataaaccccaaataaaaacgatgttgagaaaatgggcggggggggagaaaagaaaatcatacactgacgttagctaaaatagaaacttccatcacccttaagccagtttgtcaatagttattcaacgcctgctactctaatcactggcttcctaaaatagaaatatttatagttgtttccttctcatccccggagatacattccgaataaaaagcacagcgtctaaaatcaatttacaacttcagaataagttgcaaggagcgaaaacaaactccgcacagctcgccaagtcatttgcatttaagtatgattagggctaagaaacggttcttatgagatgcgaaaaaaaagcacaagaggcaggtgacatctggaaagggaagctgaactgccaggaagcgatataagctgaggatcttaaggcaacaggtccagggccggcaccgcagcctatcccgggaggggtcggtggctgctacctcgcccgccgccctccccagccccaacgacgtcgcctcgctcccgcccccccaaatcccacgcccctgcggcagaaatctccctaatcactcgcctccctgggcttcccgcccccggcaggccctccgattcctcggcgccgaggccggcccggccctgccgccccctcccctccacgccgaagaccccgcagccccgtccccgccgcgggcccgctcacctgcacctgtttgcggaagtggcgcggccccagcactgccggcgatcaggaggaccagcagcagcagcagcagcctccgccgcaacgccggcggccccggcatctcgcccacggcgcggctccggggccggccctcgagtcgccttccgtccgtccgtccgttcgcccgtcagtcgatcctgcctccctccgctgcctcagtggcacccgcgccggttgctcccgagcacacgttgcttctgccaaacctcggtccggctcccggtccgcacctgccgctccagtcgcagaaacaccatccttcccgcccgcctgcgccgccgccgccgcctctcaacagcagcaacgccagcagccctgcggagcggcgggcctgggaagccgcgctcccgccgccatgatgggctgcgtcatgtgacgtagcgcgggggcgggatgtcgtgatggacagggcggccagccactcgtcagtccacaccggcccaggaggccccgcccatcatcctgaaggagtgagcggtggcggccggtgcgccccctgcagacggaggagtgcgtgggcagcaggtaacaccaacaattattttaaattgaaaaatacaggaaaatgtaaagaagaccatgacaatcatcctgatatttttttctcggtgttttataacatgcaaaaataggcctgtcttgtcttctgccttttttttttttttacttgtcagagctgttttaggctcttctccttaagttgacctacacatcctctcagccatcaaacagctttgggcttttcacttgaattgatcaagagaatgcctctctcggcatcacccactgactcacctcctgagctcaagctgttgcctcttgtccacctggcagacactcttcctttcatctgtcgagactcacctgacatatgacttcatctatgactctctaggagaaatgactgtcatctccttagtgccccgccctggccctgtgtggactgctatcctagctgcagtatcctattgacccgtgactgtaagctccctgaggacagcaactgtgtctgattcagctggtgggaaatccctggtgcaggacctgggtcggagcaggtgttctctaaagcaatggtgcatggccctggtcccaggtaccagggcagagcagctcccaggggtggccttctccccaccaagaggtgaggtgagaacacagtcctgcagagaggatagagaaagcactctccagacacaagtaatatagtggtcagaggcatgggggttgggaaaatgctaagcttttctggagaggcgctatggttcagtgtgtgcatgagaggagctgatttcaatcttatcagatgagactttgccacctggcaacagtgtaacctccccaattctccaaactccccaaatgtccatcctaaatgccagctgtcgatgatgttaacacagcactggacacacagatgatgcccagggaatatttgttggatgattgaggcaagccaataaatatctaaggagacaaatacctggaacgagaaacattgaatttaaaagtccatggcttggctgggcacggtggctcacacctgtaatctcagcactttgggaggccaaggtgggtgaatcacttcagaccaggagttcaagaccagcctggccaacatggtcataccccatctctactaaaaatacaaaaagtattagccagacacggtgacgcatgcctgtaatcccagctgcttgggaggctgaggcaggaaaattgctcgaacccaggaggcggaggttgcggtgagctgagatcacaccgctgcactccagcctgggcgacacagcgagactctgtcttaaaaaaaaaaaagttcacggctttctgctgattatatgcagaattggtaaggaaggcaaaggtctaggaaagagacacaatcaccctgttgtacttctacttcttttttttttttctttgagacagagtctgtctctgtcaccaggctagaatgcagtggtgcgatctcagctcactgcaacctctgcctcctgggttcaagcgattctcctgcctcagcctcctgagtagctgggactacaggtgcccgccaccacacctggctaatttttgtattttcagtagagacaggatttcaccatgttggccaggatggtctcgatctcttgacctcgtgatctgcccactccggcctcccaaagtgctggggttacaggcatgagccaccgcgcctagcctatacttctacttctatcaggaagcttctcactttgagttcagagaagccagggacacccacactgtgtactgcaaggaggctcgtgactgcctgctgtagtgctggcctaaggaaggccttacctgataatcctggtagtggttattta

SEQ ID NO: 586644 - DNA, 4001 bp, Homo sapiens
agcctgcttgtcacagggacagactgtggagagatgagatttccttcggcctcctgctccccgcttctagggctcgcctcctgcttttgttagaaagttatttccctgacttcccctttaggggcctgggggaaagggatgtttgggggcaaaatctcaactgagtcaatccccaaccatccaccttttctgcaagacactcaagcagctggagaagggtacagggctgaggagtctcacttgacattcatgagcacagacagcaatgggacgtgcagcaacatcgcccagcagccctgcctggcacatgcctgttccacacctttcctcttcatctctagttactccactgcctcagctcagctccctccccgctgatggccttgactcaacctcacagaaaaaagactcagccgagatggacaggcttcctgccaatgacatcccctacccgctctggctcagccctcctgcccccactcccatcagattccagcaacttgagctccctaggagatctcatggatttaaatagcacctataggccagccggtggctcatgcctgtaatcccagaactttgggaggccgagacaggcagattacgaggtcagcagttcgagaccagcctggccaatatggtgaaaccctgtctctactaaaaaaacaaaaattagctgggcgtggtgacacacgcctgcagtcccagctactcgggaggctgaggcagaagaatctcttgaacctgggaggcagaggttgcagtgagccaagatcgtgccactgcattccagcctgggtgacagagtcagactgtttcaaaaagaaaaagaaaaaaaaaaagcacctatattccaatgacctccgaatttgcatcttcagctctgacttcaatccagacttatagacacagccaccctacagacacttcaagcataacatagccaaacacacatggctaaataggacctgttcatgcacgctccagccctgacctctcccagtcttccctgtcactgcagctttagctaaacaaacacctgggtgattgatctctcttccccttattctcacattctatccatgggtgagttccaccgagtcttcccccaaaacatcctgaattgatttcagctctattgctgatccctcaggccactaccacaggataaccaaacagatgcccaactcatgtgccagattctaccatttcccctgaaaaagccactgcctacatacaggtcagggtgactttttaaaaggttcaccagtgtcactcttgaaatctgcttagaaccctccatcagcttccctgcacaacaaataaaatccaaacccatccttatcatctggctctcagcctcgggtcctcagaaaggcctttcctgacaatccaataaatagcagcacgtggccgctgcctccctgcccaccgccactccctagttctgtggaacgtgtcgacacttcttggccatctccttgctctgtttatagtctggacccttcaccaggatgcccactccctagcacatggctagtgctctgtttttgaggtgatttccaagaggttgggctcacccagctgccagccatacgtgaagctggtggtgatggggaagaggtatcgcgtctctggcatgtccagttttcgagtgttgaggtagcggtaccgcccctggaagtcgtgggagatgccttcatacagcagggctcgggtgataggtggtaccgggtacatttccgactgaaaaggcgcctctgggacagggctgggcaccttggaaggggctgacttgggggcgggtgggggtgagagtggggctttggggtgcagggtgggcagtttgaggggcaggcgggctgcagccttagccttctgcttggccttcaccatcgacccatacttgcggtaccattcacagcgcaacatcttttccctcagatattcctccttccagaagttctgccgtaacgcgtctatgttgagctgccgtgacatggtggccagggaaggagtggcaccagggtggccacagctgaggggtgagcacagcaagcagagtgcttctgacggcgagtggctgcccaggcacagtcacctggcaaccatgcctcacctcacacagggccagggttctacttgccatgcccccagcagaccccatgagcctggcttcctgaggcagcctgaggccagggcccactggttaagagccctgctccccccaaaactcccgcagggccctcgcgggatctggcatcacagactcccaggtttcgtgtgctttctgcttctgtcctttggatctggcccccttcccagcccaatgccgagcaaggtgggggaagcaggagctgggctcaagcctcctcccattcctccccagaccagagctggtcttctctgatccaaggaccagtccttgagttctgcctcccggcacaatcctcctgggccacctcttctatgcctgtctttggcagcaccttttccatccttgccaaccgaatctgccccatggcctcaccccacacatgtcctttccagcacccaacccatctggagagaagcaagaatatgactttaatttaacatcaacaatgacactgtgtaacagcacagggaagaggtagtggagggagatggtcaggcttcctgttccttaaccagcagagccccagcaacctagaagcgcctcacctagcctcttaatggagtgggaaggagcagggaattggaaatcagaggctcaaaaagtaaagaaggctgatggcaagcctggggagaggcctggaaacgagggaagggctgagggctatgaggagtcccctagcgcaggtcttcggcagtgaacatgcccctggccctgcgcaggatggagtccttggcggcgtcatatgggtgctccttggaggggatctccaggacagcggggatggactgctggtgggcgtccagggcatgccgcaccatctctgcgatgtactggttgatgaggatgatgccaatgtcatcccggtttagaaattgcctgtggggagagatgagaagggagtccaggacagctctgggggctgccgtctctcctacccaggcagccctctccgagttgttgggctgggctgtggaggggaatgagcatgacccagagggcacagaggacaaggggaaaggctgccacgctcaaccctctgtcaaccctacctagaatcaatttcatcccaaagcggagggtcacgctgattagggttggcttctacaacactgcccggaaggcttccaagtgaactggtaatgaagattgattagggtgcacactggtgtattcaatatgcagtgatgtgtcagaaaggggaaggataagattatatgtatgcagatccctttttatgtgcagatactgaaggccagctgtgatggctcacgcctgtaatcccagcactttgggaggccgaggcaggtggattgcttgaacccaggagtttgagaccagaatgggccacatagtgagacccccatctccctctctctctctctctctctctatctatatatacacacacaaaaaaatggctggatgtggcggatctatctatctatctatatatatacacacaaaaaaaaaatggctggatgtggcggcatgtgccagctacttgggaagctgtagtcctagctatttaggaagctgaggtgggagaatcacttgagcctgggaagtcgaggccgcagtgagctgcgatcacgccactgcaatccagcctgggtgacaggagtgagaccctgtctcagaaaaaaaaaaaaaaaaagacacattaacttttaaaaagaaaacaaattatttaaaaatagggctgatgagaccactgaaggcctcaaggtctatcctgatgagggtggtggaggggtcagagggaaagtttggcatgaactaagatcacaagctaggaagaggacaccttgatgaaggaatcacactttctgcacaaaaagaacct

SEQ ID NO: 586645 - DNA, 4001 bp, Homo sapiens
tgtggtgcttaccaaaccaggatgcgaccagcttcaatccaccagggctttgctgcttgctccttagagaaactgtctgtgaacacgtgctttttctatacctgttggatggattcttactgtactcattgaagatggaaatgggcaaggatttcagggggtttctaatgatgaagtagtagcgtatctgtaaccacttataaaaaggtcagcctggtgagaattaggggtcaagagagtgattggtttatcatggtcattcattatttacttttaaatgtaggttaacgtggtgggagaatggtgtctctaccagtggctctgtccagggaactttagagttttatgttaaataagaacccagactctggcagttacaggacctggtttcttgggtctgggttctcagtcactgggagtcttgagtgactaattacacttgtgcttaggcaacgtttgtagtcttctttctattcctttgtaggttgggcagttgttccgacttctgtgggactgagagatatcccaggatgtggaactttacaaccagaaaagtctgaggcaactggggcagctggtcttcctactttctagcctccatgccttcctcttctcctcttacctcctctctcatggccagacaataccatgagcattccaaactctttaggctgctgttacagataaactttacatgtggtggacctggggagtttggcaacacaaagttattcattttaaaaaataggagtgctcctagggtagtttggacgcaagcataagctgcctttatagagcttaaatgtgtgctgcctgcagtgctcctgatgatttctttgtggttctttcctttttgctaaaagttttctgaaaatagaaagccgtggccattatagttagaacagggagcaaacaggaacctctgagaggatccctagccccctgccccctgcctgggtccacccctacttctgggtagctatctgctgtcaccacctgcaagagcaagagtatttgtaagctgtggattatgtccctaggattactagtctttctttttcaggaaaaataatacacaattcaagccaaatgtaaacaagcactaagatcctacacttttgttctcggtgatcattaaatgctgtgggtcatttcacaatttcagttgtcattttagttatccctcatgcgtagacaggacaggtacaacctgtatctcaaggtcaaagggcaggactctacttatgtttgtggaacttcagaataccagacagaaacccatgcagagaggtagcctctcaagattttgatcttgtctcctccgtgaagaatgacatgaagaatttctctttccctgtgattcatcaggagagtgctgtttattcttccaggtttacagctcacacacccctgctgcttttccctcctggagaggttacaggaccttgtgatcttactgggctgtgtgaaaaacccatgatgatgcctttcccttctgcagatctttgtttgaccgtctgttttaagtgcccctttttctcttggttatctagctgccagctgtttacaaactagtttgcatcaagcggttgcctagaaaccatcatgaaaacaggattaggcaaagcattttttctatattacagctgctttctgatgaaggcttggcattagaaagagctcagtgtctaccccttcccagccttaaaacacaatgcaagtgaaacaaggactttccaacagagatgaaatgatttctctagagtcacattctgagaccgtcatcacccacccaactctcccctcctctgcaaacccgcatacctttccctttcaggagagtcgtgtgttggggatggttgacgctttttaaagaacatttaacatacaccaacagcaggtctcagatactgttatttatccatctattcctcaggcctcagctagactggagtgggtgcagagaagttagaaggctctggcagtaatttggtcataaggaaggaatgtgttatgtggagtagcagttaatcaactaagcggtaagcaggttttcagtgaaacaccaccgggagctaatcccacttaacataaactacagtgacttagagggaacaaactgtctaaccctgagctctcttgtttcccaggaaataaatcaggatgaagtcaagagacatcaaggagtttacattaaaaggtcttactaagtgattgaaatattcttaaactggctgggcacagcggctcatgcctttcatcccaatactttgggaggccgaggcaggcagatcacttgaggtcaggagttcgagaccagcctggccaacatggtgaaaccctgtctctacgaaaaatacaaaaattatccaggcgtggtggcaggcgcctgtaatccagctacgttagaggctgaggcaggagaatcgctggaacccgggaggcggaggttgtagtgagccaagatcacgccactgcactccagcctagttgacaagagtgagagagagagaccccgtctaaaaaaaacaaaaacaaaaacaattattcttaaactcctcctggagtaggatagataggtaaataagtgattatatctggatttggggtcaaaggagaaagaggaatcaggaaaaacttaagagttagtaagtcagcaaatacttactgagcacttccttctaggtgtggtagagttggggtggggtaggtagggtggctgtcaaacactgagcaagacagacagtccctgtatattctagtgcaaaggcgggaaagcaggggccagatcataaaaactggaacagataaatcagtaagctaatttcacagactggcaaatgcagtgaagatgacaaaatgggacctgtggctaccgtaggggtcatggacactgtttctctaaggtgacatttgagttgaaaggctgagagcctgagggctgggcggggatatcctctcagccatggggaagttgggaaggaggctgagtatgtggaagagatggttaatagaaatcaaacacaaggagaaccttcaaagtcagatgataaatcaggtccatactaggaagatcttttccaagtttcccagaaaagtaaatcaaacctcaccaggcctctagatggttttaattacctttttgtagggctgctgaacagggtattagtcatatacttgacaataaggacttgtggatttttctcagagatattaatggatgggagtaaatttgcatttgaaattttatttttaaattacgaaaataacatattaccaaagttagagaaataagaaaagaaaaactcttatgttcccactatcctaccagccctattgtctattttgtatatttcttgaagactaggtctcactctgtcacccaggttatagtgcagtggcgtgatcctgactcactagagcctccacctcctgggcttaagcgatcctcccacctcagcctcctaagtagctgggactgcagctgtgcaccaccacgcccagctaattaaaacattttttttggtagagacagagtctccctatgttgcccagactggtctcgtctcgaactcctgggttcaagcagtccttctgcctcacctcccagagtgcaggggttacaggcatgagccaccatgtctggcctgttttgtgtgtttcttacagtctttttcatgtatatgattttagatagttaatacattgccctttgaatgcatgacagacatttcgccaataattccttgagcttatataccatacttatacatttcaataagtacaatcaattcttgttatttgcagtggttatggtctcttaagtcactgtgaacactgaactagcaaatactaaccctttgctgctaagggaaatagaggattaggttcttgcgggtgtctgattacatttttatcactaatcagtatataaccttgttttatgtgtgcttctgtttaaagacaccatacttaatgtatcaatatattgttggtttatt

SEQ ID NO: 586646 - DNA, 4001 bp, Homo sapiens
ggtttcgccatgttggccaggctggtctcaaattctggcctcaagtgatccacctgcctgggccaacatggcaaaaccccgtctctacttaaaaataacaaaaaaaattagccaggcatagtgtcacatgcctgtagtcccagctactcaggaggctgaggcacgagaatcctttgaacctgggaggtggaagttgcagtgagccgagaccacgctgttgcattccagactgggtgagacacactgtctcaaaaaaaaaaaaaaaaaaaaagagtgatagggaagcatgcgcctgtaactctaagataatcaggtagtaattagatgagttagactctcatgggtaacacgactccttttacaaatagtctgccatcatcatcaaatacaaggtgcaaaaagaaaaaaaattcccattatacggctcatgttttttgtggtttgtttgttgagacagggtctcaatctgccacccaggctggagtgcagtggtgcattcacggctctctgcagcctcgacctcctgggctccatccatcctcccacttcagcctcctgagtagctgggaccacagatgcatcccagcatgcctggcgacttttgtattttttgtagtcagggtctccccatgttgtctaggctggtctctaactcctggtctcaagggatactcttgccctagccccgcaaagtgctcggattacaggtgtgagccactgcatcccgcccgcattttcttattgtctctctaaactgcttaaaataaaataagccataggaattgagtatgtgagctctcagaaatgaaatgaatgtgtataaaatatggttttgtttctaaattatctaactgaacttggttattgctgcacctaataatcttctattaagaaaactaggatacgggagaaagaacactggcctgggagataagtctcctgggttctactatgagcagctctacccacaaagccggtgacctggtcaagtcacccacctgctaaggcccagtctcttcccctagcaactgaggcagcaggagagaatccctgcagactgttcctgcattactacgattctcccagggcagatctaagggggggatcagcagacacttaagtgagagaatagaagtgctgacggacgtttaaaggcggtccaaatctggagcacggagaggaggaggaaggactgttaggggttagcggggagtggagacgacgtccgcagctgagggtggtgacaccctccacgcctccgtaagcctcgtcctcccagatcttcccatgcagcgcctgttcggtgcagccagaccctgccctcaaacccaacacatgtctctccggcaagcaatcgggaccctccctctgccccacactctaaggtccccaacacacggtgacttcacccaggcccttctcgctccgggcccaaaaacccaagacttaccctcctggggctccgcagcctctgccccacggctcccgagaggccggggcgggctgctgtcgctggcgcgcgcgtctgctcgcgaggtcacctcctgtccacctcaccaaagctgttctgctcccgaggggcccgggccgggcctacggggcaaatccaggcgggggtccttctcggggcccagatccgcctccctggggctcaccgtacagcgacggccggcgccaggccgccgaggacacacacgggccaggcccaggtcccgtcgccccttcgcctccgccaccacctcccgcccggcccctctggccccagcgccgccggctccggggttcacgctcgggggtcccggctcgagcctctacccggcccgcgtgaaccctgggccgcacagctcccgcccgcctaggtgctggcccgggcagtcagcgtccagccccgcagactcggtgattctcgtccactagaggccaaagcctgggaacgagagcaagcgatgacctgaagaggcgcaggaagccagggcagtgcggaggtggcgcgcatgtgcaagcacgcacgcgcgaacacgcacgcagggagaggtgcacacgcgcaggagtgcaccggaagtccgcctcccgggacacccaccaccggtcccaggacaagtaacggactctatttcccatgagcctatgcgctccccaagtttaggggccgtcttaaatgtctctaccctgcctaaaggttaagaagctccagcctatgagctttacgcgccctccaagtttaggggccattttaaatgtctctaccccgcctaaaggtgaagaagctccaggctatgagctttggcaaccctgaaccccggactgaacttcacctttgtctttactcccttttagggtcaagtccagggctgcgttactgggtcctggagcccaagtcctctgggttagaaccaagtttcccataaggagaaggaaaggaaagggtgtatcatggtcactgctctgaaatgctgagaagtttcactcaaatactgggacaggataaatgcccagcgatgctttccaaggaacaaaaagaaaatagaatttgtagctgggcgcggtggctcaagcctgtaatcccagcactttgggaggccgaggcgggcagatcgcaaggtcaagagatagagatcatcctggccaacatgatgaaaccctgtctctactaaaaatacaaaaattagctgggcgtggtggcgcgtgcctgtaatcccagctactcgggaggctgaggcaggagaatcacttgaacttgggaggtggaggttgcagtgagccgagatcacgccactgcactccatcctggcgacaaagcgagactccatagcttttctagatcacacagtgaatgcctaaaaactgtagagaaataaggacatacacacacaaattgaatgaagaagagatacctgtgatcttaccttccccaggaggattatgtttagggttaggttatgttgaccaaaaagagtcaaagtctgtaaagagttttattctgggcctcctatttgagtgaccatggctggtgacacaacctcagggggtcctgaaaacgtgagcccaaagtggttgggttacagcttggttttatgcatcttagggagacagtagttacaggcaaagacataaatcaatacatgggaagtatatgttgggtcagccaggaaaggctttcaggtcactagtagattgaaagattggcagttggttcagagttaagtgttggctgaacagctggaagactacataaagaaatgggccattgcagtggctcatgcctgtaatcccagcattttgggagggtgagctgggaggatcccttgaggccaggagttcaaggacagcctgcgcaacacagcgagaccccctacttctacaaaaaaaataattatacaggtgtggtggtgcatgcctgtagactcagctactcaggaggctgagatgggaggatcgcttgagcctgggaagttgaggctacagtgagccatgatggcaccactgcattccagcttgggcaacagagaagaaaagagagagagagagagagagaaagagagagaggaaggaaggaaggaaaagaaagagggagggaaaaaaagaaagaaaagtttgagttaagataagggggattgtggaaaccaaggttcttgttatgtaggtgaagcctcagaacaggcttcagagagaatagatgataaatatctcttattggatcttaaaaggtgtcagactctccagaaaagacctggagtcttttctgtaagggaaagagattctctacagaatgcaaatttcccccaaagagatggctttgcaggactattttaaagtttgtcaaagaaaatatgttacggggtaaaatactgtgatttacttcagggactgctatctgtcatgtgatgctatatcagagtctggttggagatgggtatcttactgataaaaagagcctgttttgtcagtcctatgatctctattctaatagagatcataatgttggtcagctgtgcctaaac

SEQ ID NO: 586647 - DNA, 4001 bp, Homo sapiens
taacatcattcaaaactaacatgtgggaaatcctttaagtgattgttttttgcaaatttgcaaacctagagtatatctcaaaatactctcaagtatatagccttgtattcatgaaagaatcagattttaagtgagggattttattttccttcaaataaatggatttaatgtttctcttaattatgtgtcacaaattggactaaaatctcacagggcctgcccatacaggaatctaaacaataccagtttgtagagtccaggggaatgtaagaaaaatacttttttcttttaggtatttattcaaataacataccattcaagggattcatttgtaagtcatttaaataattttaaggaggaagtcaaatcctatacaaactaataaattataagcaaatatttatgaaagttcatttcactgcctatgggaaggttactcttcctcttttactggattgttctatactactaagaaagaaacactgaagttccctgtggatggataatcagtatatgcccacaaagactggaaatcatgttgtttggagacatacatctacagcctcacaactaatccaaaagtcacagacacacatttgttgattgcacttccttccctttcacaagatttccatttctcatctctcctttgaacccattttcttcttttctgttcctcatctccacatgtttctttggtctatttagtttttttcttcaggtaatctctcagtttttcaagcatctttattgtgtatttttctgttagtctctcttcccttttacataatctgacatttacgctttctcttttttgcccattatattatctgccatttctatctcttattaaaccaaactaaatatggcctgagaaggactccatacttctatatttgcgtccttgtggatgaactgcaacctaactgaataggtagacaagattgaaaacttaagagtatgccctgtaataatcactgagtcttggccaatcccagcagccatatttcaaccagttatacactgctgagcgttcaaactgtgttcaataaggcaaacgccaagctgtaaccaatccagctgtttctgtacctcactttagatttctgtacctcactttactttttttgcctataaatttgttctggccttgagggacccctggagtctctctgaatctgcagtgattctgggggcttctcgattcacgaatcgttcattgctcaattaaactcctttacattgaatgtggctgaagtttttcttttaatactcctatccttattgtccccattctctcctttataatttcaaccacccactttatccctcttctctttcccacaaggataaagcactcctgtaattccaatttacctcccatgataagtagattccactgttgtttttttctttgtttttggttttgctttggcaattctctttctttcccaaggaatagaaaagattcaattcagaaacaacattcaaattatcatttgctctagtaagtataattggcatttgttaacttttaataaaaggatattttaaccataaaatgcattttatatatatatatatattctagagcagagctctcagtcttgttgctgatgagaagcattttgttctccgttataaaatgtactcttcctctgagacacacatcatgcttccttgacacaagccagccttttctttatttccattgtcttagtttctgatcatacctccatgtttgtcaaagagtagatttctgcttcatcctgcgtgatttcaggagccttggtacaaaccctttctgctcccattacttccagtaactttcaccatcactctcaggaagccctctctcagaagcggatttctgcctgcttcactttaacgtctctcaagttggatacccagcgtggtcctcctactgaaacaagagtgccagctataccaacagaaaatctttttacatgcctatctgatttggctcaaaatgaaggagcagagagcccaactctgaagtgaaagcagaaacactgagcagtaaatgacaaaattagctttgctctcagtggtttctgacaaccccgtggcaggactggggtggaaggaggaaggagataaagcctaaaaccttaatacagcttggaccccagagtactaaacgatcggagcaaaggtgaatgagaagtaaatcctctcctttagaaaaggatcaaaaagaaatatgtctgtccagaacttggtgcctccttagaggatttataaccattagcaagctttctcgcgagtctttagttcaaattttcaccatttttcttgtctgaagaaagtttgaggggaaattttaagttaagttagtcctggctttagttttctaaaaatagaacttcaagatattgaaaagataaaccttaaaatgaagaaacccagagaaaggattatacagcagatttgtatagttgaaaagagaatgattgaatctgcagggaaaagaaattatccagaatgtgaaagcacaagtaggaaaagtaaatgacagagtaaaagaaatatgcagctattcaaagttccagaaagaatagcagagacattggaagagatggtggctaaagcttttccagaactgttaagggacatcggtatttaaattcaggaagctcaatgaatcccaagctgaaaacaattaattaacacctaaaaccattataataaaattgcaggggcccctaagggcaaagaaattataagctataattttttgctctcaatgatgtcactgtctgcagtcgggtagaagaccctgaatttcctgttttacggcatttatttttggaatgagaggccctcatgactgttgggtctgttaatcctggtttccctctccatcccactttcatttccccatagcactcgttaataggaagactaactcctgcaaacctataatttcattctggctccaatgaagtcctgaaaatccagaatctcaaatacagcagtctatctaaaacagggtggagactcaacatctctccttcccaacgctgctctttgtgatcctctaactttacttttcaatcgttggtgcttgtctatgtccattgcatatttagctgacttctcagcacatgcctcatttttgtttctcttttggacccaaaggatcatcatttctatgaagcaaaaatgagacacaaaactgtacaggtagaatgacctttacctccactcagcacataaaaacacacacacacacacacacaggcacacatacttgcacacatttccaaagggctgttaatgttaggataggagaaaccactggtaggacatcagaagaactggaatttaaaggaataataaagtgatgaatcagcagaggttaactcaggtaaagagatgtcaaagatgtaacttggataagagcaactactctactaatgagcttccatctggaagatgtcagaagaatgtcactgaaggaaatttttctgtttcttctgagtaacagagacaagttcttttagtatgatgtcatttagtctatacaaccttctattccttcttaactctctcatgaattgacctcctggtaattctcattcactgaaagcttgaggatctgattcgcagttttcatctctgcctcaatcttcattttacaattcaaaaaaaagtggaaatctcatgcagcactacatctactgtttccttggctttctgtctccagtgatcttaatggtcttcacctccgctccactttagttacagacactcaataccataccctaggctttatcatcacctgctgtttctccacctctgaaatcttaacccgaaagttcactatttgagtacagattcttactcttccagctactcttccagctcttgcattctgttacttccattaaacattaatttttacttcacagcgatctcagttcttttgaatccacttctacaaaattattttgatattcacatcctttataactcag

SEQ ID NO: 586648 - DNA, 4001 bp, Homo sapiens
gtaatcagcgagatgggccggagtccagcccgcagcacagggctcgcccaggtgctccctgctgagtctgagtccagccaacagcagcttggaaatcaactgacaagttgctgatctgagagttatccatggtcccaggtaacctggaaactggtgtagctcagaagagacacccacagacctatattgagagaaaaggggagtcagaaggtatttaacattttttaacaattgtgacattaattgtgatgctcatcagtgcaggtcccaggaggtggctgcctggagagtggatctgatgaggatcccacagttcctcctgcccacagccctccccgccagcctcagggtcccctccccaacaagggtcactcctcctgaccaaaggaaaggacaagatgctgaccgcagggtccctgctgaaaccatgtctttcccggaaagggaaagaagggctgccacacccctgactccacttacctatgagcagggacacgccacttcctcgggttcaaatcctaactcagccacttactggctgtgttgggggattaaagagctcgttcatataaaccccttctatgagagtctgccaggcacatggccggccttaggcctttgtctgtggttatgattgttatcttcgttagtcgtcacttagagagagacgtgcagagctgctgtgacgtggtgtggaagacagcagaatcagcaaacactgagttagaatagtcgaggtcaacggcacagctgggggtgtgcatgaaatgggaaggggccacagccaaaggggcctcaaagaggaggaaggcagggagagccagggaaaagttgccatccagcggggagcccatgggaacacacgatggagggccctggatggcccaagtacctgccgtgcctcctggacccccagctcctcctctaataagctgtgctgccctgagggggtcagacaactcttcggagctgggttccctggaaggcccagccatcacccttccacctaaatggaggcctgcaaatcaccaagacctccttggtctcaaagcttggagccagcaggacatgcaattgtctgtgagcacagagcaagaccacagctgggccaaacggtggccgcctcaaaatatgatgtgagagagactggcagggcccgccttccccaaatcatccacgacatttgtaaaaaccccaccactacggcttcatccctgtggattcatcctaccactgtcaggtgtcaggagtccctgccacacgcaggtttatacactgttgcctaaactctccaaattcatctgaagcgagctcatcacagccgctgtaagcccctaccctccaccctgtctcttacctggcagaatactcatggtccacgtgtctgcaagcctggacctcagcctcagtgctccttctcctctgcggcaccccgtccccccggctctgacgcttcacttcctccgtgtttcttgaacctcccctttctcccagcctacatgagaatctggacaccaccggcccgatggcctcagagccgggtccccaagcaggttccggaggatgccctctgctcatccaccctctgcaaaggcccccaagcagcctctctgtgaggctgcaccccgcaaagctggcatttgtcttggccctaaatggccgaatattgtctatttcacgtggttcaacccataagcagtggagacgactgcagaggtcctgtttggaatcctcagtagctccatttgccaagctgcttagctgcctagctccagcctgtccttccacactacccagcagcatgaaacacgcagcttccagaactctccctgcatttcgtcttggctgtgacttggctgtgcagcccttttgcctggccttatccacatgttctcctctctcttcccattcatccttaagacccagcctagctgtcacctcctccagaaagccttccttgaccaaccgtcgtccacagtaagtagtacccgtgctcctaaagcttccctgggattaatattgcactgatcacattggcttcagtgatgtttttccttccacttcctgctctagtgtagaactcacagggcggggacaaggttttcatatacccagcacggggaacagcagcccttggttaacatgtactgaatgaatcacaggaagtggtggctggagctcattcacactagcatgtaaatgactaatatacatcctttcctgaaaacaacccttgatggaggagaggaaggggaaatcccagagccccgggcaagtgaagccagggaagcagccccacctggagagggacaggtccagggagttgggaggcccagcttcaaccctggttatgaaggtgggctcggttctgcacgcctcctaaatggcttgggtggagggaatcggggttcctatttgaacaactgagaggcccttaaggcagttgctaaatggaaaacttctcaaagggactgggaaacgtgggcagctctggaaatcggagcatccaagcaggaagcagctgagcaggtgaactccaactgcctctgctccaagcggctggcttccctgcaaaccgcagtcctgcccccacgcccacgcacactgcggattggcacttcacacagactaattaacaaatagcagggcgattaaatcacgcagcccgtggtattttcctaactcctctcagtggcggcagagcatgaaagtgaaatcaggagctctccccagaggccccgctgccgaccgcaggccactcttcagaaggagcagcagccaccgaagaggcacagccctcatgcactccagagaccatgggcagctgcctccatggccgtgtcctgccctgtctcccctcccagccctgggctggctctggcccccgaggagtagacagtaggtccctgtcactgtggctttccttgctttctgtccctgggtcttgccccttgtgccgagctgctggctgcccccctcagctcccacccacctcctctcagggcacagctgctccaaagctgcccctgtccttcctccccttgctcctggcatgcacactgggtcccgcctggacactcaccctcttggttatcttctctcctgctggtcaagcacccctttctgctggggttcatctcctctgagctctgtcctcttttctttacacggcaaacagaggacacagctgcccctcgttcaaatgccaggagaaggctcccagccagcattccagacagaacactccaggtgctccatgacacacggacagatccttgcagagaagtgagacgttctagagcctggacaattccataaatggccgtgaggactttgctttaaggactttgctctcggaagctggattttccctctatgagttagaattccatgacaacatggcacccaaaacacagatgctgtttacctctgttcatacagtcaagctcattaaaattcattaaagccaccgactatcattctactgaaaatcacttataacaaatcagacttacaacagattttgatgttgcatagtattcaatttgatcaaatcagtcaagacgttgaaagctcccataaggggaagaaggagggcgatgtagaaatataaaggggtaaaatgacggtacaatggccagagtgcagagtgcgcagaaaccggaattcaccttcctgaaggccagctcagggcaggattctaacacacacacacacacacacacacacacacacgctcaggcattcatgcacatgtacacacgcatgcacacgtgtgcacatgcatgcacataagcacacagtggcttcacattgctgctcgatgactcctttctgacatgaaaacgctactttgcacttttcaccctctccccaactatgaattcctgcatacttatccccagaaattagaattcacatggcagataatagaatttctgccaattagttcacttatctaacaaggtaggctctttctctactggaaatggtcatctgta

SEQ ID NO: 586649 - DNA, 4001 bp, Homo sapiens
atgacatgtgatggcaatccaacctgtatttctagcccagggatttagattcatatattcaactgcctattggatgtcccacagattcaataagatttaacatgtttaaacatgaaatcatctctccccacacctcactcccagttcctgccaatttggccaaattatctgttcttcaaataattaataacttgaggaatagaatcacattataaaaaaaaaacctaggaatctttttttaattcctctcattctgttagttctcacagccagttaacagttcagtcagactactttcccggtatctttgggtcattacccaagtgaccagcacaaacagggtcatttggatctcctatattcaagcctttaatggatctctgaataaaccaaaaaccctttagctttgtgatcaaaggtcttcatggcacgtcctaaccccagctgctcagcgtctcctctccccatattcccaccatactaaaccagcacttatgcagcaacaagctattaaatataagtcagcagggacaaagactgttctctctcttatttttatgttgattttgcatctcctcttacttttcatttccctgcctccctgctcttctcaactcctccccaatgccacgaccatttctacaaatatttttatataggtatatagcttcaatttttaattacagtagcctttaggttaatgtgtaataattccataaaagaagcactttaatattgaaatagaggtaaggaactaggacctacaggtaatttgccaacaggcatttaggaagaacccttagcccttggagacacgaggtttgggattaaaattgaggtttattaactattctttactatttacctaaattaatcagttgtctctcttttagtctaaattatttaaaagatatactctaatccctataaaatatatatcatatgactgtattctcataaaatccctgcattgaagctgatcagacagatatcatgatttccattttatagatgaatattaagaaattttgtctagtcacggttagtggtggaactgagacaaacaccgagagccgctactttttaaaatagtacttgaatactctctcgacaatgtatcctaggctgcagagcttaaagacttagaggatcggtctccaatggtggaatttcaggtagagaaagaagtaggaaggacctaccctaagagtgctatggtatcaaacttcgtttcttatacatacagcccacaactcaataccacagcaaaggcattattcatcaattggtctctttctgcaagtattatttctctccacagggagacttttttctttctagcttctaaaaatcagcagcagggacctactccacagctcctcaatcctcctgagggagcaggttcagcaccttagctcaggaagtacaggaacgctctgggaataaccctgggtattttcctgccttaggagctattgtcattcaggcagaggacaggatggggattcctaaaggtagaaattcttgcctacttagaaacccttcctgcccaaagctgggaggaattcaccttcctccaaatccatgccatcttgagatagtttccagaaggatcccatctgtttcctctgtccttaatttctcccagtgagagaggaggatctcacaccagacctcccccaacctgtcctccaaacactgacaccacacacacacacacacacacacacacacacacacacacacacacagtctctcctctccatcaactatctcatcctcactcctcatattttatggaaaaggaagaaaatattaagtccagaaggaaaacatgggcatccagatcacttaacagagcagcagacagaaaatcacacaaaaagaaagggaccttcctgcccttgttcaaagccctgcttgcatggagaagcgtactcaccgcatcaccttgtttttttctatgctgtatctctccctcagcaattcatagggagcactgagcaaaggtaactgggctgaggtagccagcttctgccacaattaatttattgccttataaagttgacagcaactggaggaggggagtgcatattccaataggtcataaaagaacgcttgttctccatgtgacacagaatgaaagctccttttgttaataaaaggggaaggtggttttttttctactcattgtccctcttctgtatccctgttcatatctgattacttgtcacgttatgtttcctcatctatacatgtagcctaaagggctcaagagctagggtcttgtctatcttcttcactgttgtatctcctgtgcttagcactctgcccaatatccatagttctttttaaatatatagctatttatttaataagtaagtgaaagaaggattagctcttagttcatcactttgttcttttctccattttcatcctccagagttctcttggtataactcagcttttcattaattcaaatgatcctttccaccaattattctaaatagtgaagtaccattaaagtagcaattatacaaacccgtccaggtgcagtggctcacacctgtaatcccagcacgttgggaggccgaggtgggcggatcacctgaggtcaggagtttgagaccagcctggccaacgtggtgaaaccccatctgcacagccaggcatggtggcaggcggctgtaatcccagctacccaggaggctgaggcaggagaatcgcttgaactcaggaggtggagctggcagtgagttgagattgccctattgcactccagcctggacaacgagagcaaaactccatctcaaaaaaaataaaagagaaagaatgtatacaaacctaaagtgggaagatgcctctagtggacatttgtcatgttcttcgatggctcagcatctttcaaaacctcttgctaagatgggggaggtggggagggagacaaaggtagtaacactacctattgggtactatactcactacctaggtgacaggttcaatcacaccccaaacctcagcatcacacaatatacccttgaaatgaacctgtatatgcaccctgaatcttagaccctgaatctaaaataaaagttgaaaaaaatttaaaaacggaggatctttctttaaaaagaaaaagaaaacctcttacttaaatcaacttaaggactttttctccaaattctgcctccccaaagaaacagctagaaattctctttcacagcctttctttcatccaaggtagaggcaagtggctggagctttgtgaatgagatattcctgtgagtgacttacatccagaagaaggtgtagataaggaggtaccatgtaaaatccaggatgttggaagcatagctcgtttcagaggcagcagggacaagagacctagtggcatcctatgctcagtatttggggttgcgagctgccagatatgtgctcagggcagtggcagtagaaaccgctacagggtaacctggggcttgtccctagccacatggcctacaaacctgactctctagtcctaccggagtttcaatgagtcaccaatatctttttaaaatttttcttaagccagctaaagtggatttttaaattgacatataatttccaaaccataagattcactcttttaaagtatacaattcagtgtttttaaaaatatatttacaaaattctgaaactatcaccactatctaattccagaacatttttgccacccccaaaaataattagtggtcactccccattcccatctccccctgtttctgcagccactaacctactttctgtccttatggatttgcctattgtgaacatttcatataaatgcagtaatacaatatgtggccatctgtgtctggcttcttttacttggcatgatattttcaaagttcatccacaccatttcaggtatcagtgtctgttcctttccatgtctggatagtatccactgcgtggatagaccacattttgtttaggcatgtatcagctgatatacatct

SEQ ID NO: 586650 - DNA, 4001 bp, Homo sapiens
atggagggcagggtatgggcaactgtatgtttttgtcacttcccctttctgtccctgcttgcggagaggggacagaggagagaattctggacaagagggaccccacttggcctagaacctgggccctgtgtagagagtggggcagaggagggttcttgggaagctgggatttccgacccccccccaagctcacaggagcacggctgcaccctgagccggaatgctgggggaggagggggccgggggcgggagctgggaggggccggggagctccgggtagttttccccaagagtccacacagggagagacagcctaaggaagtaaagaataacatttggtctttgtcaaaaaacaaccaagggggaggggaagggaacagacagtgagtgtcacacagctgctgaggtcaatctggagtgtggggttaggtgggggtgggagggaacagggctgtaaggggcaggaatggctcctggagctcactcattccccatctcaagtgttgcagagcaggcgagatcagtggggaggtttcgactggttctccccagaagagggaagaggatgtgtgccagtgccggcctgagtgttcccaggtgagcaggcacctgcttagggagaagtaagcactatcctccagctctggtcccccaccgtgcagatgagaggaggaagaggcctgggctggggtgaggcttcgggaatgcagtcctcctccctgatcctgatccccacccccagctgccggcccaaggtcataggctgcctcctgagtagctgaggcttgactcacctgtcacagttaagtcccccaccccctaccatccacagacaccagggtggagggtgcatggttggacagatcctgcgggtggaggcgtggaaggacagtctctagctggccagcactcccagctaggagataagatttccttccctccagcaacggcctcaagtccctcccccgggggaaagcagaaactgaaatgggaattctaagatccctatgaggtcacaggctccacagtgacctcacaggcttaggaaggaggaggaggaatctcagataagccggttggggataataggcggaagagctcagggagaaaagagtgaggggaggtagagatttgtttctttcccataggctggagagctgcgtggacagtggagagggccaggaccttagggggcggggttgcggcacagaaagcagaaacctcgggcttaggggccagtcactgggaagggggtgcccggggctgctcggatctcggtgggacgggggttaagaggtgtagatgaagagggagagaaagcagttattagaggagctcgtggggactgcttcatagaccgattggagctgaggttaagagatcatgtaaataagccaaccaggtgaggggcgggaccatcctacaggtgcgcagatatgcaaataaagagaaaggaggaatctctcccaacgctcggaggcgcagggcgttctgtgcaaacgagaagcacgttcattgtctagggggttctcaaagatgggagaggatggctgcaggtttagggcaatcaggaggggcagcaaccctggccgccaggtgaaggggcgggcccgactcccgggccgggcggggcccggggtggggctatgcaaatgagggacccggttgggcccggggcccggctgcactcaccagcctgggtgatgtctgacaggtcgtagctacgggccgcgccccgggggaagtgcttcaagcgccggttagacaggttcagggtcccggtggccacggcctcctctagggcccgctctgcactgcgtctccccggcagacctggagacccgggcacggaggtcgtggctgccgcctcctcacccccggcggcgagtggagccgctacggccgccgccatccgctcccggcggctcccgctgcctgactgacgggaccggccgtccctccttcccccaccccctccttggagccgccgtagttgcctcaagggggagggagcggtgtccgggaccggacggaccaatcgtggccccgagacgcgtcagaagcggccaatcagaacccgtcagtgggggtggagctccggcgccggagtctgacgagagaagggaggggaacaaggatagagcgctcgccaacggccgacgctccaggccgtcccgcccagcgcagctgcacccaatcacaatgctcagatcgggaggtggagccaatcaggtccaaccaagaggaggggacaccggcactccactagcaggaaaacgggccgagggaccgcaagcagggggtgcctagtcctcgtcccccaaagaccaatcgtaagccagatacaggcgagtgactgtcaagaaggccaattagagcctccgaagggaatctggacctgcctcttctctgagggacggctctacctaccaatagcatgggcgagaaggcggtccctttgctaaggaggaggcgggtgagctagaactttaagactgaggttaagaatgaacgcggagcccctggccggccgggaacgcagttcgccgctgcagtggcgagtgcgagctggacgtgttagggggctagccggcgtccagggcttgaggggattcgggcgactgcttgaggccagtgcactggcggttgtcgcagctgaaggggcagcggggggacctccgactgtgaagcctctggcaggggtctcgggacccccgggctgggggcgggcggggggcttcccagagcctggagatgcccagctcgaggagggagggtgtaggtgcagcgttgcacggtctgccgtctcacccgaggagctcccctggacaggaatggagaggggaccagaccacggggttttagaggcttagaaaggatctcaccgcctagaacacgcccttggtgctacgaatgcagaaactgaggcagagggaagttgatgcgttagcaagagcgaacagcaagttcctgacagctggcttgctctagaaaccaggtctctggatcctccacgcacagccctttcccgctccctcagttttcacagtggatgttttcactcccttcctctcttcctccctccctccctctcccttccgttcccttcctctttttatttttttattttttgagatggagtctcgctcagtcgcccaggctggagtgcagtggcgcgatctcggctcacagcaacctccactgtccgggttcaagcaattctcctgcctcagcctcccgagtagctgggactacaggcgcccgccaccacacccggctaattttttgtattttagtagagacggggtttcaccgtgttgcccaggctggtcgcaaactcaggagctcaggcaatatgccctcctcggcctcccaaagtgctggcattacaggcgtgagccaccgcgcccggcctttttttttttttttttaagaaggtctgattctgtcgcccaggctggagtgcagtggtgcagtcatggctcactgcagccttgaatgcctgggctcaagtgatcctcctgcctcagcctcccaagtagctgggaccacgggcggcaccactgcacctggctaatttattttcaatttttgtagagatggggttttgctatgttgcccaggctggtctcaaacttttgacctcaagcgatcctgcctctgcctcccaaagtactgggatcacaggcgtgagccaccgcacccggcccacagtggactttttctttcttttgagacagagtcgctctgttgcccaggctggagtgcagtggcttgatcgcagctcactgcagcctcaacctcccacctcagcctcccgagtaactgggactacaagcacgcaccaccatgccagctaattgtattttttgtagagacagggtcctactatgttgcccaggctgatctcaaactcctgggctcaagcaatgctcccacctcggcctcccgaagtgctgggattataagcgtgagccacaaagcctggcccacagtggact

SEQ ID NO: 586651 - DNA, 4001 bp, Homo sapiens
gtagaggggagggaggaagggagggagggaagaaagaaagaaggaaagaaagaaagagagacagagtggagggagggaggaagggagggagggagagagagagggagggagggaaaggaaggaagggagagagggggaggcaggaaggaagggagggaggaaggaaggaaggaagaaaaaacgaaagaaagaaagaaagaggaaggaagggagggagggagggaaagagggagggaggggaaggcaggaaggaagggaggaaggaaggaaggagaaagaaagaaagagaaagaaagaaaaaagaaaagaaaatattctacttctctatattatatttacttctgaaaagaatttcacgcaatttatactgccaaggaaaaggaaaggggagaaaaaacctaaagaaaactttgaaattaagaaaaactattgaatctaagtttcctggcagccaagacaaagagaagaacctaacagtgtattgaaagaaaggaagcaaattaggccgggtgcggtggctcacgcctgtaatcccagcactctgggaggcagaggtgggcggatggcgaggtcaggagatcgaagaccatcctgactaacacggtgaaacctcgtctctactaaaaatataaaaaattagctgggcatggtggcacacacctgtagtcccagctactcgggaggctgatgcaggacaatcgcttgaacccaggaggtggagcttgcaatgagcggagaccgcaccactgcactcccgcctggtgacaaagccagactccatctcaaaaacataaacaaaatagaaaggaagcaaattaaattacgcttttgaaagaaagcaatttattagaagccaagagaaaagaagtgatgtgatgagaagtggaaaaggacaagaagacaacaatggactaagaaaggaaaaggaccataataagcataagaaagaagaggaattgtgtggtggtcagaagagatattgtagaaaggagggaatggcagtcatgtgaaacgcgaagccgccatcccagtcaatatgggtgggatgatgggaacattccccacatcctaaaatattcccacaatgagctggctgttcgaacattataaggctcttttctggtgtgtgtgcatgttgcttgtataaggcatatgcccccgacagaagtaatgtattcaacttttaagtcacttagtctttgaagaagcactttcaaaagcggatttttttttttttttttttcctggagggaggctgacgggactagaactgaggaagagtgtggaagtatgtcatagccatgggcaacaggtgctggcaatgtcagagatgaactctgcctattcacaatactgtcaaagtataattttgaaaaagctaaagccataattcccagacaattatctagacactcttacaaagtgacgctgtgttaactcgactcataagaaatcaaatgtgttaatgaaaaaagaaaggaactatttagagctatttcaggcagggggtgagaaaacggggtaaaagacaggggaagaaaagagggggaagaggcgttcctggaggcgagagagcctgagaaggtgtgggaagcttcgggctggtgggggtgcatcggggagctgccgctgaagtaacagggctggacgagggagccagggagtacggggtgggggggaagacacacctccaaattcagcatttcggactctgaggactcctcggatcccgcctcgccctcgccctggtcctcatctccgtccgagtccagctcctgatagcggtgcatgagctgctggagcaggtaggaggaggctatgttagagctgcctttcgtcttctgccccatgggaaaagaccagcaaggctgacgctctttttctgcgcgaaactgtaacgatcgggctccagttcgggatctgcccaagcctctcaggagagaggcagctctggtcctcaggagagccctctcggaggtcgccatcttgtttagcggggttgcctaggagactgaccccaggcaaggggaaccgcggaggattctggggcctgtagtctcctccgcgcgtactcgccttctgcaggcggggcagtgggcgctccacttgacttttctttttctcagtctcttctgttatttttctctctttggtctgttctgttcgcttatctttcctgttttcacctcttttcgctacaccccctttctttgtctccagctgtttcctccctaccctgagacccctcttagagctttgtcatcccacgataggatcgcaggtgcgccaccgttgccgcttcattcccaaagggctctttccgcagagtcgtactttagaagtgtctaatgtctctaaagcagtctgtaggaaagctagtaccactgaaatttatgcaaagcgcgacgctaggagatgagggtgcatataagtgaaatagaaggcatggttcctgtccttatgatttaattgcagataataaagagaaactaccagacgacgcctgagagctgatttccaattaatttacattccccacccccaccccccaatgataagccttgtccttggggagaaaaactggcagtggtcttacaatccaaacagagagagaaaaaactgctgtcaaattgacactgtatctgaaagcgtctgaaaagctattagcatcccataaataattatattagtcaagtgacctgcattggcaattattttaatcttgttgcacaggctctctttgcagttaaaaaaaatactctttcaagataacaaagcacgattttatgctagtgtgattttatgtgacccaaatcccatagccttaagctccacaacgtcgacactctatagaaaagcagaatgaaaattatagtaactattattgccatagtgatgacaatagagatccttgcagggaagtagccctcatccttctggccttacagggccttttctgcacgcttcaatgacagcagttgcaaatacaaaatgatcctgtcaatggctgtcaggggagaaggagaaaaaatccttatggacaccatccattgacgattatctttctcagtgcttgagggaccgttaaaactgacataaagctttcagaattaccttccttcattatcttgctagtcataaatgtaaaggccacaagcaaaatatctctttctgccaggctcatcttgctttttgcttatttctttttccaataagtagagattcctccaagggaattttccccacccttaccctcgtagggcctggcttcggctaagtgacatagggaagaatcaggcagaaagtgtaaaaatgcaaatctcgatcgtttttcttttttttttttttttttttgagacggagtctcgctctgtcgcccaggctggagtgcagtggcgcgatctcggctcactgcaagctccgcctcccgggttcacgccattctcctgcctcagcctcccgagtagctgggactacaggcgcccgctaccacgcccggctaattttttgtatttttagtagagacggggtttcaccgtgttagccaggatggtctcgctctcctgacctcgtgatccgcccgccccggcctcccaaagtggtttttctttttttcagtaacttaatcagcatttctagtgagtttcgcctatgtcagtctatcgaggagagtgtctgaaggcagtcaaagaataattttcaaaaagttaaaaacaggattcttatataaaaaatagaatgaagcacatgtgaaagattctattagactcactaattaatgaagaaatcaggaagatagtaatcaggcattcagagtccatgagaaaagacattctgaaataagtttgccaagttatagacaaaactggttaatgtcctacaggacaatcaaactatagcctttgaggttagtctaagaattctgcctcctttcatcttcacatctaccctctgtccatcctcattagacagatgagaacactgagcctcagagaggttaa

SEQ ID NO: 586652 - DNA, 4001 bp, Homo sapiens
tgtactcagttgaatcacagggtgtaccccagggagaggaagataacgcatttccaaaactttagcacagctcagtccactcgacagccccaagagagggggcgtgtctttgggatattagcactgctttctccttcaggccctgcccacctagtcactggtgagtccaaagccttccccctcgctctgtcgaatctcacgtacacagcccttcccagatcgggatgtgtgttctgaatcaagtaattcgctatggcatgcaaatcattatatcatatagatgtgtttttcaaaatctgattaatggtcagtgcttgtatatcttatttcccatttatgggaggtaaactttattcacctgtgtgattttgagaggcagagaagcattttctcctcacttttcattctttttgctttctaatttgctattaagctgttgcatatcacaaactaagagcatgattgctaattccattagaagagcagatagtagtgggaatccttgacctcttaaaaagtgccaggctttctgggcacggtggctcatgcctgttccgagcactttgggaggccaaggcgggtggatcacctgaggtcaggagttcgaggccagcctggccaacatggtgaaaccctgtctctactaaaaatacaaaaattagctggacatgttggcacgcgcctgtaatcccagccacttgggaggctgaggcaggagaatcgcttgaaccaggggttgggggagtggggaggaggttgcagtgagccaagatctcaccattgtactccagctgggcaacaagagcgaaacttcgtctcaaaaaaaagttccaggctttggagggcttgggaaattgtccacggagtgtcctcaaactgcgagccctcgtatggtagtacaggctcatcctaactaccctacttttttctggaagctgtcattttggtcattgtggtaataccatatttaatctgtttcaactccagcgagatttatagtctctgatgttgcttttgattcttctcatgtgttgcctgcttatttgcaaactggtcttcttaatccatgcttaaactctgcatatcaattagtctttctttaactataataatgaaactgtcacaaactcatgcatatttaaacctattttttaaactcatttgcttatcagatctattttaagagcatggtcatattcagttttgccttctgtcccaaatcctcactctcctgtaacagtctccatttaaatgtttacaaaggatttgtccttttatatattttgcacattattttggtactccagagataaaacctaaaagcaacaatacactctgcaaatttggtttcacttccaaacaatatgattgcctcccccacctcacacacaccaaaaaagctttatcccagtcaactttcttaaatatctaggcaaatattattgaactattaatactttcacttgaaatgtattacaaggtattaaatgtattgtgtgttaccttatataacactgtagtctcctttaattaacaggtagagagttaacagtaaagttaaatgttgaacatctgcaagaagaagagttgaatttacagttttctttgtcatagtggcttaagaaagatttgagagaacaacggaagtataatactttccttcctctcttttgtcttttcaggcacttccacaacttacagaatcttagtttggcttattgcagacggttcacagacaaaggcttacagtacctgaacttggggaatggatgccacaagctcatctatctggacctctctggctgcacccaggtttgtctttcagtcttctctttgctgcggtgtgtgaggaagttctccagagaatgggctgcattcagccctcacgttatactaatgctgtgcacggaccgcagcacacttttcagaggttttaaattacatggccccagctgctgaaattttccccaggatcgctattataggctcttggcttccttccactggagtgtcacacagacaaacaggcagagctcattggatgaggaaacggaccacttttgtggagacagtctgagcacaagtctaaagcagagtccaagtcctgaaaactctggagttgctaccaagacacaaacaaagagaatgttttgagggagaattttgcatgggattcctgaaaagtcaattaactcccacatgggtttttttttgggggggggggggtaaaatgctataagtgataaataggaaaagaaaatacaacaaaaactcataatttaaaaaattgcattacaccgttgggctgaataacatgaagatttgagatctgcgtgggaaaatattttaagtttgagggaacaggacttggaaagttgggcagaaaattggatcaagttgcagaggatagggcatggcgctttggatgtagctactgcctcattgatagtttcttctgctttaatttcaaaagatttaagccataattcttttaacttattttcttctgcctctctgtgtattttattaatttggtgtcatagtatgttcattattctatgagaataatagcataggtgagaactggctgaaatattgatagttatcatttcttgagtcattaccatatgccaagcattgtgttgagtgctatacacagatcagatttacttctgatacagtgctgtggtggtatgtatttactatgcttatttacaaatgaagagaccaaggctcagggtggttgaataagttgcccaagtttgcacagctgatgaaagcacatggtactagtacagttttaagcatctgttgctagatactggggcaggcagagttccctgggatagtgggaaatacaggggcagcatgggtttctcccccagggttcttgaatggatagaattcttacctagtcacctccactgacatcttgtggtatcctgatgccctgggtggtctggagggagttggggcaaggaggggaggattctaagttagggctgtaaacatctaacattcatatttgtttaaaactgatctgctgatgtgtagctttttaaacatcaacatctaccataactttatgactgagatggcattgacgttctcctcagcatgactgaattttagaccagcttcttactgactctaggccctgacttcttgttttcttgtttcttagagcatttgttttagaaaacttggaattataagttctttctctgcctactttgagatgtctttttaacaaaagcttcttgacagttttacaactcaggaaagtcttcctcaaggacctgggatctatccctttgatatataatcatcaaagaagatatctctcagttcctgtgggtgggtagaagcctaactttgatgggcaccaattagcaaatgccaatggcccaatcacagagaaaaatatttgcaaactcaggaacaacttaatgtgcttgacatatcccactgataagcctgccccttaactataaatccttcagtacttttctaactcgccgttgtgcttaaaccctcctcatggtatgacttacctccttcttcttatcaatttctcagttaccatgaggcaattattgtagcaacaacacacaaatgtatacacaagtgtcctaaggataaatattctcagacacagtaaagttgaaatgagaggcttcaaatctatgacctactgcccagatatgcatacaaaacacacataattggaggaggtgaagcaagatggtggaacagaaggctccacccattgttccccacccaaggacaccaagttaacaactatctacagagaaaaaacacctttgtatgcttttaggctgggcgcggtggctcatgcctgtagtcctggcattttgggaggctgaggcagaaggattacttgaggccaggagttcaagaccagcctaggcaacatggtgggacccacgtctctaccagaaatgcaaaaaattggccaggcatggtggtgcatgcctctg

SEQ ID NO: 586653 - DNA, 4001 bp, Homo sapiens
cgggcggctgtgactgtactccgctgctggtgccgcttacgaagtttatagaagacaatcaacatggcggcagctagcagagtcactgccacaaagcagccaatgatgatcttggtggtcttcatgacttcatccaggctggtctgcatcttgtcagtggtgtctgtcgcgggtactgccacctgcttgggcacacgggtagtctgaatgagcaccgtggtagaggtggtatatgccggctggtaaccagtggacgtggtaggaacaggcttgtactttcgcgttgtgtcctcaggcgagatctccgtggtctccactgttactgtggtgaagaagctgtagttggaggtgttaagctcagccgtgctcacattgaggtaggccgaggcgttggagttgcctgcaacattggtcaccatgcatgtgtacaccccagtgtctgaaagcagcacgtgggaaaagttcaaggtgccgtcgttgaggacagagatccttgggtggcgggaggcgtggctgagcactgtcccattgggcagcaaccacttcacggaggacatagggggagtccgacacttaagttctgccatccgaccctcagaaatgttgaggtctcgaggtgcgtccatgatgaagggggcagagcactggaaggaggcctggtccacctccacgaggtagcggcctcgcatgtgcatgggagcatgacagcggccacagcaggtggaattggtgggtatatactctcgaagccaccaggctagccacagaatgtcacaatcacagttccaagggttgtggtgtagatgcaactccaccaggtacctcagcggggtaaagaggtcatggggcaaagaagagaggttattgtgggccaagttgagttccacaagtgaagccagcccgtcaaaagcattccgctcaatcaggctgacctgtgagttcatgacccagagcttcttgagggagctcaggccatggaaggagccaggcctgatctcagggaagtggttccctgacatctccagctcctccagccccaccaggggggtgagattgggcatgtctttaatgttgcacatgcccaagttcagatacttgaggttgaacagcccctcaaaagctccctcagagatatactccagcttcttgagctcccccaagtccaggcgcatgagggagggcacccggttgaaggcgtaagaggggatgctttcgatggggttgttgcgaagccagagctcccgcagcttggacaggtattcaaaggccccgctagggatgactgtcagccagttgtcgaacagctccagggtgttgaggctggccaggccgttgaaggcccccacctcaatctgccggatggagttcctgcccaactgcaggacctccaggtggtggaggtggcggaaggtgtcggcctggatcatctggatgttgttctccatgaggttgaggtaccgggtgttcgagggaataccctgcgggacctcggagaggccccggcgcgtgcacaccaccttgctgaactggttactgcacgagcagacggaggggcagttctggggcccggctgaggcggcagcagcgatggctgcacacagaatccacacttgcgccgtgaggtagacgaacgggagcaggatggcattccaggtgtggtggtgcacagttacctgccacaagagcttcatggtgtggcacgttcataattcaccatcgcctgggattttggctcggaaaggagaaccagccctaccccggcttaagtgagctaggagctcctctttccatctggagaaggaggtggggagggggcgattagagagacggagcggatcggccgaaaaaaatcctgccaaactcgagcggcccctggtctcccaacccaccctcaaggcaagccctccgaaagctacgactctcccacactgcaaccgtccccacccagttcgccgtcacctacctcggaaggaaggcaggaaagcactggcgtggtgtccttaagctttctccacgggagctgggcacctcgttcccattccgacttcttagttttaattaacaaaagggggaagtggtgggggcggggagggcagaggggaggggaggggaggggagggaaggggtgggggagacaaaatggcctctagtaaatccggagccggagccggcgaagccgcggagttgaggcgcgcctgggagagccaaggcccggcgggctatgcaggtgcatgcccccccctccgcccaaggagcggcgccaccagcgcttcccggctttgtccttggaccctggcaccggctcgctccagccgcgggggaaggcgcttcatcgccaaagtgcgctccggcggccccggcccgctctgcgggccgccgccggagggagtgcgggggcgccccgaagccgcccaggccgcactcgctggatgctgcgctccctctcccggcgtcggccgctccgggccggcggcagctgattgcggtcgtgagctcgcggagcggcgagagttaagaggaggtgttcgcggcgccttcgccctccccagacacacaccccctttctcctcgcctcttctcggagggtggaagagacaaaaacggggggtcagttctccagtccgccggctgccggcacgcggggcggcgctccgtccggcccccgaggaccagcggcgtggcggctgcgctcggacccggtccgccggccggaggagcgcgcggcgcccgcggtcgcgcccgcaccgcaggccccttcagagagtccgggggcgggcgcgggtccggcggcggcggcggccgcagcccccggcggcgcgcaaccgcccgtcgccgcccgccgctgcccggcccccggcgcgccgccggctccggctttgtgcggagggagcgagttcgcggcttcggctcccggcgccctcagtggccgcgccgccagcggactgctgcagcggcgtgagcagcgggggtcgcggctgcgggaaacgctccggagcccaggaacatagtccccgctggctagcggcggcagcagcagcagcggggcccctgcgcgcggcgcccaccgtctcctcctcgcgccgggctcgcggtgttgcaggcggcagccacgcagactgctctctcatccttttgtccttcagtcagaacgtgaatgtactgctgacgcatactgttctgggagaagattagcgtgatgcagtgctcttatgtattagcgccgctccccctccgtcgcctgcctcgcggggttaacgccggcgccttccagcgccgcgccggccggcgccgcgcagccccgcgcctccggccgcccgtcttcctctttcctccttccttcctcctctcttcctctctccccctcccccctcccccctccccgggccgcttcctccccgccccctctagacgagcggagcggggccagggcgagcgggcgagcgagccggagtgagcgtcaagtgaggggccgcgcgcaagtcgcaggcgttcgcagctattttgggccggtcggagggagcagttgggtggccgctgataggctggagcggcgcggggctgcggcgggagagcccgcgccggcccccgccctccggcccgcacccggggccccctggctctgaagagcggggctcaggggcccggcggcccgcggcggggctgctgcatttggcctgcctctcgcccggcccgcgtcatcctcacccccgctgactgctgacggggcgcggactcgcgttcggagttcggaactgcgtggtggggactcgggggacggcggccggggccacgaggctcccaggaccgagagcccgggcttcgctgctgcactgccgccagcccctccttcgctttgcctcacccctcctgtgctctcactggggctttaaatgagggtttccttaatgagggttgcgggggcgggaaacagtggcaggaatgaccaagtgtgatgagctggggaatggcaacctgggacagcacagaggccggcaggaagg

SEQ ID NO: 586654 - DNA, 4001 bp, Homo sapiens
ggagagctgttcaggaggtggcccatgcctaagcctcaagtggaagaggaggaatgatggagagcgcctccacagtgagcctctttcctcatacaggtccatgtgggctattttggggcaaatcttcaggcaagtttctagagaaactgaaggaaaacaccagagggggctgcccaggtaatgctgacaatacagggaggtgagaggatgagcagatctcaaaggtgactgagaggcagaggggagagacaaggaaaaaccaaagtaaagtgaagttagggaaaccaagaaaagactttccaaaagcagtggtcagcggggtcaaaggtcccttcagtgggcggtacagcaggaagtgggggagaagcaggaaccgggaatgctggaggtggggatgggagggaaaaggcttggctctgtccctaaacagagagaaggtgacctgggaagagcggggaggctaactacacagggaagagaagcttcctggagaaagggatccagggcacaggcggtggaagggattggcctcaagagaccaggaagaactctcatttttcctgacagagaaagtaggatgggtctggtagcaggcaagtcctggagtgctgtgcagaagggaagtgaggcagcttatgcctgagagccaggcatgttgattgctcacggggagccgtacatctgtaaaggcagccagcggctggctgagtgatctggcttagcctgggctgggaagcacctccgcacactggctcaagaaattagacctattcttctcgctgctctcaccaagccttttcccaagtgcgtgcccagaaggaaagcggccactcttctacttctcttgtgcctgcaagagaagtagaaccccaccctgggcattccatgattatgccaggcctttctcactccgcccagtccctctccagcccctctgctctcaactccagcactgcagggggacagagtgtctactccacccccaccaggcaggggattttaagcacctgctgggccctcaagtctcatcttcctccacaacatctgtgagaagattgaaaggtggtgagagaaagggataggaggagatgaacgtgtgaaaggaaaagaggagagcaagccattgcatgttttggggttttgtcccacacgcaaatttgactacttataaagtctaagcaagatgttttaaataataatcatgcatcattaggtttcatactgtgcaaaaaaaatgacacaaagtgagatctgttacaaacgacacggcagcactctgctactttctggaagcttagggctaacaatggagtcagagcatggcatccagagcccgtctctgagcacggccgtgatcctgctccagcacacgcctcggtttcctcgtctacattacgggaatagtaacagcacccgcctcatgagattgttagtgttaaacgagttaattaataccacagtatttcagggcagttctcggcacagagggagagatgggtaagggctggctgttccggaagattctggcctctcccagtgtgtttcggcgcgagggcaccgctggcccagcaggtggccccccggggccggcacgggccccgacagccgcccccttccctgaacctcggcggcccagtccccgcttacctgaggggtggagccggcagcctgcggagccactggccaagctgggaagtccggcgcaactccgcaccgcagagccggcgcctcctcggcaggtaagagccgcagccccgccgcccgccgcctggcggcccctgacccctgggccgcgtgcccaccacccaacttgttggccagcgtgcttctcccagcgccgcaggcctgagctcccggaacgcgcccagggggcctggccaaaggccgtagtgggcgctctggattccgggatgcgccaggggttacttccggaagcgcagcctgcgggggtcttcgcgcgcaccccccgcctcgcagttggtacgttcctcctacctgcggtgcctgagtgcgcaggcgtgggcagcgaggcggtgcggccggaagcgaaggggccgtgaggtcaacagtcggtaatcgtttatcggtgcggccttagagaaaggacctccaagcccttgttcaatacatgttgggtggtggtcacaggtgccagtctccggacggatggcggcctagatttcctcccggactcggtggcacccaaggccccctgcacgccggcgctgtgcgtgccaggctgaccgcccgagtgcgacccggacctcgtccgcacgtgcagatggaaggggccacaaagacgataaggatccaggtctcccgcgtggaaggctcatctatcggtcggttcaggaaatccacccagggtgtctcctggtgttatcagaaaggggtcccgatccaggccctaagagagggttcttggatctcatgcaagaaagaattcagggcaagcccatagagtaaagtgaaaacaagtttattaagaaagcaaagaagtaaaaggatggctactccataggcagagcagctccagggctactggttacccattttttggttatttcttgattatatgctaaacaagggttgaattattcatgagtttcagagaaaggggtgggcagttcccggaactgaggcttcctcccctttttagaccatatagagtatttcatgatggtgtcatggcgtctgtaaactgtcatggtgcttgctggtgggagtgtcttttagcatgctaatgcattataattagtgcataatgagcagtgaggaccaccagaggtccctcccattgccatattggttttggtggcgtttagccagcttctttactgcaacctgttttatcagcaaggtctgtatgacctgtatcttgtgccaaccttctgtctcatcctgtgacttagaatgcctaacctcctatgaatgcagcctcattttacccagcccttattcaagatggagtaattctggcttaaacacctctgacactggggcaaatgcctgctgcctgatgactcccacaagtccttaacacctaacccagagaacatctgggcctgcatccactctggtgctctgccactcctgcagctacaaattgtgtgggagccgaagaagtcatgttccctggacgagcacaaaatgcctgtttgtcccatgttggttccacatgtgcaccaaagtgaacaacttttgtctccctggctaccttgaacttctttccacctcctcagttggacatattcaaggggctggcccgggggcaggcttccctagtcttcccaggggcaacctcagcttttcccatatctttcagatgacccttctcctgccccaagcaaattaatgccaagccagtctagttctccagcttgggctacagctgggacccctgcccaagaatagtgatttttatctttacactttatccaagttttttatttttatttttatttttttgagatggagtctcactctcttgcccaggctggagtgcagtggtgtgatctcagctcactgcaacctccacctcctgagttcaagcgattctcctgcctcagtctcccaagtagctaagactacaggcgtgaaccaccacacctggctaatttttgtatttttagtagagacggggtttcgccatattggccagggtggtctcaaactcctgacttcaagtgatctgcccgccttggcctcccaaagtgctgggattgcaggtgtgtgccaccctgcccagccatatgcaagttatttttaatttcagttgatctccatgcctcggagatggaagtattagtttctccattatatggatcagaaaattgagactcacacagcatgttacagtaggaaatggcactaaaagaaaaattattcaaacaattgttaaggtgagagactttattcaagaacagctgcaatagggattatgcaataggggcaaaaaaatcaggcttaacatcaaatacaaggacaggtggagatttata

SEQ ID NO: 586655 - DNA, 4001 bp, Homo sapiens
tttcctccttctctgttagtgctcttgctttgttggtaccctgaaagcacagaactaactattgggtgattcagcattatgctcacttctggggcaataggaagatattactggatttttgaactagaaaaaacatgtgacaaagccaggcttcaggaagatgactctagcagtgatgtgtatgggggcctggtgtgcagtgagaactgcagacaggaagcaagactgcctctgggaaacaaagtctgccagctaatgagcctgccccctcagggtgggggcaggtgtgagtgagcagtgaacagatatgacatggggtgtgtttagggagaatgaatgggaactggcaagtaaatggaggcagagaattagcacgagggaagtcacaggtgatgatgatgatgatgtgatgacttgatgagaaagatgatgggagggaagacagatgcagctgagaaatgctgaaattgaggccctggtggaacagactggtcaaggcgcccaccagaaagctgcaagggtaaatgtggaactcatcagagatctcatcagggcagctgtgcagatctgataagtcagttaaccagaggagagtgggatccaaggaagatcacgatgaagtgtctacatggagagaagggagagggaaacatgatggaaaggagacagaggaggatgattgtcaagtgaggtagaagaagaaaaggacagcaggaggcagaggagcatttgaagaaggtagaatttcaatctacaacattgttttggctggtggaggatgtcactcagaaaaggtactgaatttagaggcctgaatttcagtagcttgaagagggtgaaaagtcggattttaaattagttggttaacctaaaaggagaataaaaagagtccatcacaaaattgggatgtgaacagttctagcatggggagaacagcagctgcttcttccaccacccgatgcctgaggatctagaatcaaagggaaaaaaatgtttgaaaatggcaggattattaaatcctagaagaataaggtcagtattaaaacctatagaagaaaatgccctctctgatgataaattcttatacctccatgcaacacgcaggcacaagttaggacttagtgtgaagagctttcaattcattacagaactctcggcctcgtttaatcacagcagccccccatctttgcagatgagtcagagaactccagaaagccttgctaggtcttacctggcacaattctgagatttttttttccccacccaaatatccaaatattcttttaatcattatcttaactgctctcgactctgcttgtagggctcatcaaataacgttttctcttcaaggtgttgatttgcccttgctgggaacaatatattagggatacacacccacacccacatccacacacacacacacacccctgttggagaatcaagactgcgaaatttacttaatctccgtttcacttaatctgcaaaccactataattatatacgcagcagatgctgagtggtaaaaggtcagtgtaagtctactggtgtggactgggaagtcctcaaaccccacccaggggattaggacctctagcccaggcagagatgctgaggggggttcgccaccgctcgtagctgttcacatcccaattttgtgctggattctttgttctccttttatgttaaccaattaatttgaaatctgacctatctccgtcttcaggctactgaaattcccctccaaattcagtacctgcctggagtcctcaggcaggaggtggggccctggggcagggggccaaaggggctgatggcttgggaaggcaggtgccgcttacccggcgactgctctgtagggcagtttcggatgccctccgtaggcgccagcatcgcaaggtacggggcacggggttcgggtcccaggacatcaggacacatgggcggccgaagcagcggtgattaatccggcctcgcccgccggtggcaccgaagagagacttggcttggtgcacagctcgttgttctgttaccaacagttaccgcattcccgttgactaaaagccagtccacactgggaaatatttgaagccaaacgctgacttttgtgacgtttgagcgtgtggccctgcaacacccacccttgtgcctcggacacacgcgtgttacccctgctcatggtgatgcgtccggtggatgccggagagcgggggtcagctatgtccgggaccaggaggaggtcagagcgcctcaacggcagtcacccagtaatcatcactttgattcgagatatgaatatcaggaaatttaggtttctggaaattagacgtgtgtgtgtgtggacccctggcctcatgtacgggctgggggtgaagaggtgcgctgcagagtcgctgtggatcttgacgcaagaggaaaaaagacagtactactgatcgtgtctctaaaagtttgaaattttgttcattatgcatgttatttgcatacattttgtttttttttttttaatattgcattaagatatttattttgaggtcgggtgcggtggctcaagcctgtaatcccagtgttttgggaggctgaagcaggtggatcacccaaggtcaggagttctagaccagcctggcccacatagagaaaccctgtctctattttaaaaaaacacaaaaattagccgggcatggtggcatgcgcctgtaatcccagctatttgggaggctgaagcaggagaatagtttgaacctgggaggcagaggttgcagtgagacaagatccagccattgcactccagcctgggtgacagaaggacacgctgtctcaaaaacaaacaaaaaaaaatatttattttgaatgctgagtttttggtgcttcttacatctgggtccaaggccactgccttacttgcctcatcatagacccacacctgggatgaaggtgggggtggtagaattaaggctcctcaagagtccaggtgcacagaaaaatggaaggaactctctactgacttcattggctaagaacaagtacatattgtttcagtagctgagaaatcctttctctggcagaaaatggacaaattgagccactatttggccaatctttccaaccttgttttttgtttttgttttttgaaatttctgtctcctgtaactgtattggaacctctagtatagattatcttgtgactttatttatatgaggcttgttccctctagcttgggtaactttggaggcaggatcctgtttaagacatctctctcttctgccagagcttaacggactgcgcttaattaatgttgactggattaaacgagttggtttcttggctccaaatttgaacctgaaatctaggaatcaaatgtagctttctgaaatgggtcaagctacttgcatttaaaaaaaaatgctggtgttgaaatgaagcattaaaaaatgtctcagtggggaaatcaagtacacattgtttcagtagttctaatatgtatttggggctgaggtgggggtaaaagctctccaagttattgtggagggattaatcatctaagaactattgtttaagtagtttctatcctggaaataaaactcaaatgagagaaatggtccactgagaaggcatatataataattcattggctcatttttgctgttgatatgtgttatagcattgcagatattattcacgaatatgctacatgaaaaaatggaaatgcacaatacttgttcagttttctacattacacaaatgtgactttataaccatatgcaaaatagttttaaagagcatcttgcagatgtaaactagtcaccagttaatttctactaaaatcacattaaaaatttttattcttatttttttagcattttaccccatattaaaaaggtaattttgaaaaaaaccttattcttaggaaaggaactcaaaactcacttattataaggtcttaatgtgttccttcttcaagaaaaaattaactgatcacgaaggctaaaataaagcaaattta

SEQ ID NO: 586656 - DNA, 4001 bp, Homo sapiens
gtctcttacctttctcccttttatctgacttatattcagctgttccagtgattgaagttggcacagttcaataggaaaatgtataaattgattgcttgagaagtttaatttctggattccttttaaattacagatgtctgaagagattttctgtaattggttttccgaaagatcaagtacttgcaaattttctaaagtacacaattctctagggaaagtttcaaatttattacagcataaaataagtacgtggagtgatatcatattagaaattgatgctggaattttctttatttggtttttaccaagatccaggtatttaagattaataagagaacaaaagtgctcagaaaatatgaggagtttgttttcactcaattctaaatgaagcagttgtttactgaaagatatatccacaggtatttctgaaatataatttccattaacactcaaataataaagagaatctaaagcacacagtcccaatggaaaatacattattttgttataactcaattcaattttaattattttttggcagttttttatttcaatgggaacatctgtgattatgtttcctgaaaattctagactgcatatgttattaagatgtgagatacagtcagttatttttaccatattatttctgtttacatggagttttcttaaattgttaagcttatggatgtacttagggagttctgttaatttattatcactaagactaaggcattccaacattgcacagcaagatattttctctggtatatttttcaataaatttttatcaagtataagaatcctaagttccctgaaattctcaattttgtgtgaaataacttccaatttattgtcggccagttggagttcttttattttgagtaactgaaaaatttctacagccagaaaggtaagcttattgtgatccattaaaagtgtttctaaatttttaagctctctaatttcttttggcaaactgcttattaggtttccagtaaggtctagtgaaattaactttggaaggaagcagagagctttaggaaatgttgttaactgattatattccaaattgagaaccctcaaggtttttaaactaggcagagtatctggtatatgtcttaacttatttttacccaaacttaaaatttccaagtttccaagacattctaagtcagaaggaaaattttcaatgtaattgttataaaaaaagagttgtctgatattcccaagctgagatatttctttaggtatatgtgatatgtggttatgactgacatttaatatccttaaattatgaagtaactgaatttcagatggaagtgatgataatccattttcttgcagggatagaatttcaagtcctaacagatcacctgagtctgccccttgaaatgttttgatttgattcttgtctaaatatagatattttacatatttgatttttaaaatgtccttaggaaattcctgtaaacccttggcctcaaggttaactgtaaagttatctgcccctaggccaagttgtttctgattttcttcagagacttgtggactaacttctcctactgtttcatgagataggaagttaaccaaagcctgatattctgcagtcctcccagttagtgatgataaactctgtgaagttcctgttctagtgcttgtttcagaaaattgaagatttttcttttgttcttcatttctcttagacttccttccagaggaagatgttgactctaatgtattctgtctaggatgtgtttcataaatctggttagaagatttcccttccaggtaatcagaagcttcgtttatcaaatttgatgtttctttaataaagccaggctccttcattgactgtgatctagattctttcctaaattgactaatagtatcctctagcacttctgacataccctccttttcagacatcttatttgctgatatgttttatgccaatacaaaattgtaacttgattttaattttcatgttttttcctttgaatctacaaaacaaatgttgaaattaaaagatgtaagagatgtcaaaatgacaaataaatcttaatacaactattttattttataagaaataatttaatacaaatacaaataatacatttataacaaactaattttatatataattcctgattaaggatggtttattgattgcatgtacttatcacatgttactcttgaaatcactttaaaattacagaaagaaacaaaaaagttcaaagaaaattagaaaaaagccataagggactgagaggattcagcaaatttcatggaaaacataaaagggggccgggtgcggtggctcacacctgtaatcccagcactttgggaggccgaaggggcggatcactttaggtcaggagttggagaccagcctggcctaacatggcaaaaccctgtctctactaaaaatacaaaaattagctggatgtggtagcgggcgcctgtaatcccagctactggggaggctgaggcaggagaattgcttgaacccgggaggcagaggttgcagtgagccgagattgcaccattgcactccagcctgggcaacaagagtgaaactccatctcaaaaaaaaaaaaaaaaaaaaaaggtaacataaaagggagagccagtggcctaccatgacaggtaaagagtaccattctcactgtgaacatggatgtttacatatggtactagtgtcttgctctaacaaattcagtacattatgacaattttcctgggggtagaagtgaaatgtcttaaggaagggtacgctttctgtaagagtaaactagacatcaaatagtccttgcgtggattgcaaccttcctgagacttctgagtgactcctgtggtaccagcaccagctgggtagcaccactcctcagaggtctgggtcccagctctgtaagtccctccttcaagcttgcagtttctaatgacccagtattttccctttgtccctttagccttagggttggtagctacttcctatgtttactatctctgtgttgctgcagttccatctttacctttttagttctccagtacttgtctaagcaacttcttatattaaatcctgtcaaactggcatggtttcagtatttcacaaactctcccagagagtagaaaaagagggaacattttccaacttgttttatgaggctagcactaacctcaatgtcaacaaggacaatatgaaaaagaaaattacaggccaaatttactcaagaacaaaaatgtaaaaattctaaacattagggaattattctaaatattataaagccatcaatatataaaaagcatactacttcatgagtcagttgcatttgtcccaggaatgcaagtttggatttaacaatagaaaactaatgtaatttgccacattaagagattaaagaagaaaatcccatgtaaatattgcaatagatgtagaagtacttgataagttgcaacatttttcataatttacaaagtaggaatagatgggaatttctttaatctgctaaagggtacccataaaaatctgcagtaaacatcatatctagtggtgaaacactgaaaacttttgagattggaagctagaaaaggttatgctcatcattacttctatttaacattgtactgagatagtaattagccagtggcataaggcaaaaagaaaaggtatatggattaaaaggaagaaataaaatggtcattagtcacagataatatatatgtagaaaatccaagctcatctacagtaaattattagaataaataagaacattgagtaatattgctaaatacaaagtcaacatacacaagtcaattttctttctttttttttttttttgtggggacagtcttctctgtcaccaggctagagtgcagtggtgctatcttggctcactgcaacctccgactccctggttcaagtgattctcctgcctcagcctcctgagtagctgggactacaggcgcacgccaccacacccagctaatttttgcgtttttag

SEQ ID NO: 586657 - DNA, 4001 bp, Homo sapiens
tattgtctttttgctttggcttatattacaaactaggaaaccaataatagctctgaaatcacagttgtggaaaaaaataacccacagtttcaaagaagctgactctgttaactgtgtggttagttgaactaaaagaaggcaggagagagctccagaagatgaaatacaaatgctaggtttcttttactgtctttccaggacccagtaaagagggcagtgaatgtttccatgaatatcctcaattggtgttgtctgtttgaaagcatattctaagtagctggcttccctttacaagattggaagtaaaaattaacccacactgaattccatgaatcatcaatacatggatgctcatagagtttactgagagtaattctgtctcaaaggcattgcttctgaaactaaagatgagaaatatatcagtaatatttatggtaccagagcacactattttctaggtagatattttgaacctttacttctatttttgttttcacattatccccttttcactaaattaggacggttctactcatattcatagcctgctttcactgaaattagaggcagagaaacaaggacatattgttaaaaatgaataaattagagccgaattaagccatccagctcaacaacagcaaagggaatatagcagttggttagaacaaacaattttcttaaataggaaatgtactttaaagccatcctgctgtgatcctgttaattaccaaagattagaactcttctggttcatgggatcctttcacctagtgtgtggcagttccagctgcattagcaatcagacatttgcactgtcccttcagaccagcgaggggatgttattaaagggaagtcatttaccccagtccgtaagatgtagcctggcagaaattcaataactgtttgtgatatgctcattctgctactctgcttagtggtttagctcttaacatacaacagcatttgccttaatttgcatccactggatgagacaaaataaaaatgccccatttggtgggttgatttcaaaacagagaataatgtgtgatctgcttttcactacaaataatgtgaagaaaaaggaaaattgcaccccatcacccgtgactctcctctcctctctgtctcctctctgtcttctctcttccccatctccttctctctccctctcctcctctcttctcccccactgttcccttctcttctgtctccctcctttttctcctccccccaacactgctttttctctcccactcacatcctctaatgggcattcaagctagtaaaatgcatgttggagaatctcacaaacacagctaggcacacacagagccagctgggttttgcatgtgaatttcttctcaaaagtgcaataaaagaaaaatgctcttagaattcagacaagaagaagacatcaaaggaggatttaggtgtaaaaacatgatcatcgaagagacaagaaatagaacgtattttaaaatatatgtgtattttaaacttaccttgaaaagcagtttcagtgctagcccacctccgatgtccttgcgtgctggattcctcagttccttggttgagataatcacatggttgtgttcttgcccggtataaataggtgcatttgtgtgtctgtgtaacaaagtgtacaaaatatatactatagatatgcacacatgcacgcaatcttatctctctattttaaaatataaaggaaggcaggaggctgcagccgggattccttctttttcctggaactctttttctcagtcggcaggctgaggctctcaatccagtgaagagagatcctgtgagctggctttatttttccttgtttccatggtggttagtggtgcatcgttcacccgatcagttgtcacactgacatggtgctgcctgctcagcggtcattaataactgaacaccctccactccccagagaggagccaatcgcttcagacagccaagatgtagcactcgcagctgctccagtctggttggctgaaacaaactgtctgttctatgacactgctgcttaggatacaaataaatgaaacaggcttgcatgttttcctaggtatcattttccttcttttttttcctttctgagggaatgttgggaatttttgacaagttttctcaattttaggttatcagtcattcagagaaatatgttttcagtctgcaaatagagaggacacactactgataaggatttcctaaatattaaaaacacctggtagagactcaaacctccaactccgtctctgaagttcagcaatgactgcattatttaagaagagaagcttgcaactgttttgagtggcatttggttctctatagatcctacttaatttagcatatgtgcttggtgttcaataacacttttttttttttttttttagcaatgacatttcttgtctggattgaccagatttttaaaataaagcatatatttgcctctctgtaattcacaacattggcatttgagggggtactttttaaaaatatgtatttctaattatactcactgacttctctttatatgatgtaataaatctaggagctacatatgaatgggtacatgtgtaggtgtgtttgtgtatctgtgagtgtgtgtgtgtatttaggatgtattttttaccactctggggaaatatttcgattgtaataagttaaattatttaaaagactatctttattcttaggcctattaactctgaaaggatatttcccaggaaaatatactatataagccatacatgtaaaacatttttattaattaccagaaatttggaaaacacagaaacacatagcagtgcatatttctgaaagaacatacatgaaaaatcaaaaagcagttttaaaaatgcatgttttacaaccttaattagtatactagagaaacatcttgttgaggagaatggaacatgaggattaatatatcaacaggtcaaaagcaggctagtcatgactccaaccccagttttgagagactaccctctagtggagtaaagagaaatggcacttattagatttacttaggaaaaaaaaaacaaaaccttcacatctaattgctccttaagtgcttattgacatgacatagaacaatagtttgcagttattataataataataataccaggaaaaattttaaacagtaggcttgtctttaaatactgaatattttcactctgtagttttctagaaacagttcccaaatgtttttttctataagaatttattcaaatgaatcaaaataagttcaagataaaagtagcatctcatttaacctaatacttatttcagaatattattgtaaggttttattatttactggatactctagtatttactcagaaagcactgagtcagttctgtatgttagggatcatggttgagtgttgggatgttgtgttagagtatatttacatataatttaatgtacttttaataatagtaataatcatccttcttaccccttaattttaatctagcaaatcttagtttctttaatattccaaattatttcagtatctgcaggatttatttccacatatggaagaataatcttaaaattgtgataattatttgtaaaaagagaatttttatttatgccatggtatcttaagtgattaattttcattgattggtattgactgtataattgacaagtccagtaatcaaaccaattataatgcactcccataatgaaggtaagttgtgatagtcagatacatgattaaactcctctcttggtttttaaatgaaactgcagtcatacctaatatcttaaatttcagtctgtttcagaaatcaagaaaaaatcttttcagttttgattcagttagaattgttaaaggtagccatttatatgttatcttacattatttcataggaagttgttttaactaaatgatcactcttttgaaagtgggagatcagagtgctcttcctgcaattgtccttttaatgtaggtacatgataaatttaaaatattttatac

SEQ ID NO: 586658 - DNA, 4001 bp, Homo sapiens
ccagacgtggtggcatgcgcctaaagccccagctattcagaaggctaaggcgggaagatcgcttgagcccaggagttggaggctgcagtgagatacgatcacaccactgcacttcaacatgggcagcagagcgagaccctgtctctaaaaaaaaaaaaaaaaaaaaaaaaaaaaaaaaaaaaaggtaaaaaagaaacaccccagaaaaagctacttagaagagtcaggccgggtgtggtgactcatacctgtaatcccgacactttgggaggccaaggcgggcagatcacctaaggccaggagtttgaggccagcctggccaacatggtgaaaccctgtctctactaaaaatacaaaaaaaattagctgggcatggtggcaggtgcttgtaatcctagttactcgggaggctgaggcaggaaaatcacttgaacctgggaggcagaggttgcaatgagccaagatcgcatcactgcactccagcctgggcgacggagtgagactccatctcaaaaaataaataaataaataaagtagcacatcaggctaggggctgttggggcaaagagcctctatcagtcaccctcctcaacatcctcctgatgtccaattctatcattctcccaatgcccccacagctcctaagcacacaataatcctctcatccccttaccctgctggtcagctcccgattcaggttctccacctgagagtaagttgaggacgcatccttgccattgaccttacggagcgtgggcaggagaaaggagactttcaggttgtcattgacctggggaagagagggtgaagagcagtggctcaggagatgctgagcctgagcccaacagagtcctggccccaggtatgaagctggtgggaggctcccacttaccgtcaggaaggggttgccctccaggctgagttcctcgagcttggggaactggcacaaggcagtaacatcccccagctggttgttggcgcagcggaggacacgcaggtgggacaggcccaggttgtccggcagcgtctccaggtggttgttagacaggtcaagctcctgcagctgcgtcaggcggcacaggagtttggggtccaggtgctcggaaagcagctccaatcctgacaggctggagttgggggcagaaggcttagggggcgggcaggctttgcaccctacaccaatctgccccgggtacctcagaaggctttttcacctgacatttctcgtacaagtgtagccgccccgcccatccccccgttactttatttttagagacggggtgtcactcagtcgcctaggcgcgatcatagctcacagctgcctccaactcctgggctgagggatcctcccgcctcagcctctcgagtagctgggactagaagcgcgcgccactactcccgactccacaccacttaacaaaaaaaaaaaaaaaaaaaaaaaaaaaaaaaaaaaagctgcaactactttaggactcgggggcatcctagccccctctaggatgctcttcctgatccttcgggggctcgtctgtgcttcccaggccctctaacgatagcggcaggctgtgcccctaactgtccgggctcccttcaggggatgaggcccctcggggctcccggcgagcgggtggggccacgatctcccaacaagaagacatttggaccactctgccgaacccagagggcgataacggggacaagcgggccgttggggagggtccccgctcttctccccgaccgcccggccccgaggacacagcctcacccgctgcccggctcttactccagactccggatcttccccagccggtcgctcttggggcgcccgcgctgcattagcagccgcgccgagagggggcccatggcgaggaggcgcagcccgcgctgacccagtcggccaccccggcgtgtggcgtcgccctgcgtctcctggagcccggcactggcgtccgcggtaactgagcccaggaggcggcgccgcgcgagcccgtgggcgttaacgaccggaaggaagcggaacccaggcctcgtgcccccgcccggcgcggactacaactcccagcggcccccacggccgcgcctgcgcactggccacgcggacggcgcgatggcggcggctgccgccgagacccccgaagtccttcgggaatgcggttgcaagggcatccggacctgtctgatctgcgagcggcagcgcggcagtgacccgccctgggagctgcccccagcggtaaggggtgggagaggggccgcgcccacaaacgtcgctctgcatctggggaaactgaggtccagcttggccatgataggggccgggatcgaagcctgtgagggacccttacggtaggggtgatgcagggtgaggagatgagggctttaaggagcgggcttgggagtggggaaggagctggaacgtgggtgggttcgattacaggtcacctcggggactctggggggatctgcctgtaaacctcgacgtagcctctcgggtctggcgctgggagcttcacgggcctgcagggagatgacacggaaagggtcgatcgagggtgctgaataccagtccaacggtgcctgaaggccgtggactgcaatgggcaaggagacagtgaattccagttaactaacgaaaaggaactcaaggatcgctgcaacccaggagctggaggctgcagtgagctatgatcgagccacctcacttcagcctgggcgacagagcgagactctgtctcacaaaaagaaaataaataaaaaaagaaaaagaactcagcgcctttgggctggcatggaaggactgtggttggttgcaagggcattccaacccagaaaactgcgtggggtaggaaggtggattggtgatgcctcaggtgagagagatgaggctggagaggttgtggggggggggaggtctgatcacagatgctccccggtgcatcagctgagcaggctggacttgtcccaaaggccctggagagctcttgaagggttttaaaggagtgatgaagtcaaatgtgaattttagaaagatcctgggaagggaacgggcagatatgaaggtgtggaggctggtaagccagtgaagactgccccaacgtccatggtaaaagtgcccaaggtcctatggaaacagcatggcatgcctcatgaattaaacatagaattacccatgatccgcaatcctgcttctgggtatatatccaaaggaactaaaagcagggtctggaagagatatttgcacacccatgttcatattcacgacattattcatgacagcccaaagatggaagcaaaccaagcatctatcaagatacctgggccgggttcagtggctcacgcctgtaatcccagcactttgggaggctgaggtgggcagatcacctgaggtcaggagtttgagacctgcctggctaacatggcgaaaccctgcctctactaaaattacaaaaacttgccgggcttggtgaggcacatctgtaatcccagctactcgggaggctgaggcaggagaatcgcttgaacccaggaggcagaggttgcagtgagccaagatcgcaccactgcactccagctcaggtgacagagcaagactccttctcaaaaaaaaaaaaaaaaaaaaaaaaagagatgacttgatccacaaaatgtggtgcatacacatagtagaatactattcagccttaaaaaggaaggacaggccgggcacagtggctcacacctgtaattccagcactttgggagaccgaggcaggcagattgccagagcccaggagtttgagaccagcatgggcaacatggtgaaatcccacctctacaaaaaaattaaccatacatggtgacacgtacctgtagtcccagctacccaggaggctgaggtgggagggttgcttgagcctgggaggtcaaggctgcagtgagctgtgatcacgccactgcactccagcttgggcaacatagtgagaccctgtctcaaaaaaaaaaaaaaaaaaaaggacattttgaca

SEQ ID NO: 586659 - DNA, 4001 bp, Homo sapiens
cgtgctaccaagtctggctatttattttttattattttttgtagagatgaggtctcattacattgctcaggttggtctcgaactcttggactcaagtgatctacccaccctggcctcccaaagtgctgagattacaggtgtgagccgccatgccccacctatattctaaattcttaagtggtccagtctgtgtatttagagatgaaaaaaatcctggaaattcccttgttcactttctgtctcaattttcccagtaactaactttttctttctctctctctccctttctttatttttttgagatggagtctcattctgtcatctgggctggagagcagtgcagtgacaccatctcagatcactgcaacctccacctcccgggttagggtgattctcttgcctcagcctccctagtagctgggattacacacaccaccatgcctggctaatttttgcatttttagcagagatggggtttcaccatgttgcccaggctggtctccaacttttggcctcaagtgatctgcccgcatcggcctcccaaagtgctgggattaccagcatgagccaccacgcctgaccctctttttatatatatcttttttttttttagaggaaatctcgctcttgtcccccaggctgaagtgcgatggtgcaatcttggctcactgcaacctccacctcccggattcaagcaattctcctgtctcagccgtccgagtagctgggattacaggtctaatttttgtattttgtactagagagggggttttaccatgttggccaggctggtctagaactcctgacctcaggtgatctgcctgccttggcctcccaaagtgctgggattacaggcgtgagccaccacacccggcccttatatacatctttaaaaggtgttcaattagacagtaattttagccatgccaattgtggaaaatatcaagacaggttatatcaagaaaatattaatagttaacacatcacacagctgacagctcaaaacagttaatatattaagaaaacagttaatatattctgcatacagggagcaatatagttttacacagttttcttagccaatgccaataattttgtaatacagaaaagaaatgtatagcagcatcttgaaaaatgtctgcagtattagcattaaaacagttctactgaatcacagaaactaaatttgatttaggaagcctactgtttttctcagctatggttagattagaacagagctccttacttttcaagaccagaagtgcaaaatatcacagttactgtagtaatctcgaattctatttgaagcagacacctatcctttaggttatttgaaaactgtcctagataagacttgttaaatcttttctataatgcactttaaattgacatgagattcactgcttaaaaaagaattgtagtacaatcagtaaaggaattaaaaaaccctggtgacaacagagcccatatattttgtattgaccagagtactacacccaaaatgagatggaatgaaaagaatattcttataaaatcgcaggactagaataatcattttacacgtatccaagtaaacttcctttgttgtcaaggatattctgtttcaggttttaaatgcgtctcagattcctacacataatatttaaacgaagaaaaaaaaactctagaaagaaacaaacaagaattctcgagtaagcaagtaatttaaaggctgaatacacagatacgcaacctcaccagtatgctccatgttactacatatttaagaataaggacgggggccacagaggcaaaggcaaggaggtgaaggaatcggacactcggagagtgaaccgaaaagatgtgaaaaagcaaggaaaacagaagagaagagggaagtgggaaaactttgaggaaaaagagaaggcaaaagagaaggaagtgctttgagattgaatccagggaggaaaaagcaggtgtgccacgccgcacctccaggtcccgcggacaccacaggctctgcaagcccagccgcccgggtcacgtaagccccaccccgccgctcctcgtcaagtcccacccggacccgccctccccccgctcctccccccgctcctccccgccccacagagtcgatctctcctctcctagacccaccccgctcccccaggctccacctcggcctctcagaccccgccccgtcagggccctcccggccttgcccagccctgcctcgccggcggcggccgccgtgtcaggtgacagcccggaagctgcggaagcggatgagggaagggcggccgtggccctgggggcggcgggagctgctttgcctccaccgatctccctgtgcggccctcatgtgctgtgctcgctgacacccgaagtccgcggctttccgcacacggtggggtcgtcagacccgctgcccttggcggtcgaagtcgtcgtgcgggcccgcggcggccgcccatggagaaggccaggagaggcggggatggcgtcccccgggggcccgtactgcacatcgtggtggtcggatttcaccacaagaagggctgccaggtgaggaaagggcccgcccccgcccccagccgttcgggcgttcgccccttccggggcccccctgccctgcttctgtgtgctcagctcgcgtcgtgcagtcctccccacagcgcctgcgacccttcgcctctcaacctgactccttttgcagctcctcccacccgccccacatgaagcccagcccccacaacctcttccttctgcccctgaaaaatggttgagcagcggaggagctggttgatacgtgtaggttgtaggtttttaacttctgctttggtggagtgggaggaaagcatcgaagaccggccccactctcttccccgtccatcattgtctccactggctttctgggtgtccacctataatgggagtctagaaaaattcagtgcttggactctgctttcaaggtaataggctcagtgggcttgcatactaatgcttcaggtagcttgcagcacatgcagcctccgtagaaaaatcagcttcctttgtttatctgatggaagccttggaatctctcctgttaggtacggttgtcgattgactttgcctcccccttcccattggtccttagttttgctatttcatcttctccagattttgccttttggtgagagattaatctctccatatcaaccgcaataagagaaagtgtattaccaaaccgttcaaatataaaggcgtttttcagcagcctcactgaatcattaatgcagcatctgaaatggaatatttgcaatctatgtattgaaggcaagagaacaaaatagaaacaggattatttaatgagcaagcaaacactggaagggaatgatgtcataatgtgctagtgaacagtaaattgaaatgcttttttgaagtattaaaaatagtaattgccaccactagctaatgaagcatttagtttcttgcattccacaggaaatgtaacattttagaagacttattggcaaaaattaagttctctagggaataagagaaaagtgatgggagtgaaaaaatcgtgtttgtgcgtaattttgaaatatatcctcacacctggaatgccagcacttttagagactgatatgaaaggctcacttgagcccaggagtttgagaccagcttagataacaaagggaaacactgtctccacaaaaaaattaaaaaattagttgcatgtgatagcgcacttgtagtcccagctactcggtaggctaaggtgggaacatcgcttgagcccaggaggctgaggctacagtgacccttgatcccaccactgcactccagcctgggtgagagagcaagaccctgtctcaatcccagcactttgggaggccgaggcgggtggatcacctgaggtgaggagttcgaaaccagcctggacaacacggtgaaaccccgcctctactaaaaatacaaaattagctgcgcgtggtggcacatgcctgtgatcccagctacttgggaggctgagg

SEQ ID NO: 586660 - DNA, 4001 bp, Homo sapiens
aaactgtgtctccactaatattctaggcgtttactaataattacattaaggtaataacactctgatccaattttacaagcaaacagataaaacgtctatctttaacgttattccaccaagaggtaatgttttctcataaataattttactcaaaagtagtaaaactgtctttaattaagaagagattccccccaattctttaacactactcacaactcagtgacatcttccagtaccatatctgaaatttggtgttaagaaaataaatacagaatttactctagcttctgcctttgttcagcttttgttttttgtttttgtttttgttttgagacaaagtctcgctctgtcatccaggcttaagtgcagtggtacaatcacacctcactgcagcctccaccttttaggcttaaaggatcctcctgccttagccccggagattagctggacccacaggtgtacatcaccatgcccagctaatttttgtaatttttgtggagacagggtttcatcatcttgcccaggctggtctcaaactcctgggctcaagcgatccacccacctcgccctcccaaagcgctgggattataggcgtgagccactgggctcgcctgttcagttttaattacaatgtttaatacaatggctcaaattcaaaatgcttgttgttgataggaactttaccgtctttcaatacatacctcttaaaacattatcataagttccctgagaatgaactgatttttattataataatcacaaatatactgattgtctatagttcttatgttattacttaagaaaaacctataccaccaccaccttttaaaaggatactgacaaagtcatcaaatcctagaagagtaccaacaatttccttatcactcttcatcacgatgtgaattcttgatcctatacatttgtccacaagctctgaggagggaaaaaatattattttaccattcattatttcaacaaatatttgagtgcctactggcactcttacttgcatatagtgaaagaaaaaccaggaaaaacattcattcaataactttaggtcttataatacaaatctcagttcaagcacagcatctggcacataatgagccttccaaaagagtctgtggcatgaaggaatgaaaacttttcaatcacggccacgaccactagttcaatcactcttcaccaactacaaaaatataagaggagataggtataattatattcaccggaaactctccggtcactgcttccctttcccaactctgtctatcctctgtgctctgacggtagcttgaacatctctttagctagcctagcattatgtggcatgatgtctacttgtccagtgttctctcctccactggcttgtgtgctatttgaaggcaatggctatggtttatcattgaaaaatgcccaggcacggtatctagtgtatagatactcagttactacttattgaatgaataaataacaaacagagctggtttccagattcctcatttaaggctcattccggaccagggtgttagtgtcactaaccaaccacatacataacatggtctatctaatctggggatcgtaaacgccaggctgagaagtaggcctactacctataacactgcagaggcgggctcacaacaaagtaggccgacgacgcgttcactaaatgtggaccttttccagtgaaggtctggtttgagaagtcaaagtccttgcctggaggagcccgaccacgttaaagagcaggtgcggcctgctgtcgcgaagacttggagctcagagtcgaaccgcatttggtcttatacatttccccacactcggccagggcctgcctcggaacagcccctcggcccccaatcctgaatgtcagctccctgttcctgctccccaaaggacggcgattacctaagggcagcagctgcgacgggttggtagtagcgttagccgccatggctacgccggaagtggcctgccttcattgatggtgggacgactttgaaaagcgcgcttccgctttttccgcagcccaaacaggctcgaccaatctgaggccgagcgcacgatctagtcagctgcgtgggtcgcgttcactggcttttttccccggcaagtgagatccggtgaaatatttcctgcccactggacattttaccatctcggcagatacccataatgcccttgaagttttggagagacgttgaagatattttgccttgtgaataaattgttcctgtaacgtttgagtcttcttcccccgtaaagttgcatttcctctcaagccagaatcttcaaaccagtataaatcaattcgtatttcctgccatcaattaactgttacaattttcgttacaactactcattaaggaatctattgtttctttttaaagtccagtggattgaaaatctgcaactagcattttttaaaatttttctttagtgaggatttaagatatgttttttaaactttttactactttaattcatcgttcttatctttttatgtctggtagtcttatttattataggcttttaaattcagtttcttcaacaattcttgtctcacaggcaaccaccagatgtcactctaaattattccagaagtgtaaaatcatgctttccacttctgtgttgaaaacagcaaagtatcggccctagtctgttttatatttgtatcctaggaacttaaacctgaacagtctaggtcaggcgcagtggtaacgactgtaatcccagcactttggaaggccgaggcgggcggatcacctgaggtcaggagttcgagaccagcctggccaacatgggtgaaaccccgtctctactaaaaatacaaaaattagctgggcgtggtggcgtgcgcctgtagtcccagctactcgggaggcagaggcaggagaactgcttgaacccgagaggcagcggttgcagtgagcctagatcatgcaactgcactccagcctgaacaacaagagcgaaactccatctcaaaaaaaaaaaaaaaaaaagctaaacaataaacatgagcggccacaaagaacgtcattcattcatacaacaaatggtcattaagcacccatcattccttcatagactgagttcctcaaggctgagaattatgggaagcagtagtttacgtgattaaatttcttcattttgaattaaatgactttggttcaaattccatggtcagttatttgacaatgggcaagttattttaactttttaagtctcaatatacccattggaaaaaatggggacaacagtatctactcataagattaatgtgaagattaattgagataatctatgaaaagtggtcagcataggacctggcacatagcccttttaaacatgagctgttattacttatccttgttttctaatacatgatgtctggctcagagtgaagctacataaagctagcattgctagctggttttgcattcatcttatttttataaccagacataagccactttaaggaagcaatttcttattttatacactgtgcacactacattttcaggcacactgtagggcgcctaatgaatattctttaaattgattctcactatttcattcacacccatcaacattctccttactcttcataagattttaaatacgaagtaatgccagatttgtttgtgacgcttctttctttctctttctctttttttctttttgtccaatcctcatttggttgaaaaccacctcttttcctggttttccttttctattcctattttattttccccataccatactgacagtatgggagaattcaaaacattgttgttatttgatagagtttttaaaaattagaaaaataggctgggcacagtggctcacgcctataatcccaacactttgggggccgaggtgggcggatcacgaggtcaagacatgaagaccatcctggccaacatggtgaaaccccatctctactaagaatacaaaaattagctaggtgtggtggcacacgcctgtagtcccaggta

SEQ ID NO: 586661 - DNA, 4001 bp, Homo sapiens
atatgcaaaatttcaaaaaaattctgattcatgtggtgctgaatggggaaggaaataaaaatggaagaagaaaagtaagtttaataaaggtctacagactaggagctctctgagggcagaatctattattctagctccgagaaaccttgtaggtaacacacaatgtttattagtgaggaaaacatggattgacagcaaagtgataaagagctgaattataataaaattgcactacgggtgtaatgtgctgtctaggcattagagattagaggtttcacataaaacttgcaaccaataaacctacaggaaagcagagaatgaaaattccaaagacttaccacaatcattctcccatctgatgtaataacggcaacagttcctgataactgaatcaaagaaagtgtttcttagggaatgcaaattgaaaacagactctggcaagggaatgatttgaatttttagaataaatatgacaactaggtataagtattcaacacagccactaagttcactacataaaaacgttaaaagtttcttagacgccaaggcaggaggatcacttgaggtgagaccagcttgggcaacacagcgatacccccatctctattaccctggcctggtgacctatagtcccagctactcaggaggcagaggcagaggcaggaggattgcttgggctcaggagttcaaggttgcattgagccatgatcaagccactgcactccagcctgggcaacagagtgagaccctcgactcaaaaaaagaaaaaaaaaaaaaaacttaaaaaaagcttctgtttttgtctttgtgataattacatgattaaaaaagggaaaaaatagaaaaagaaaacctctttctgtatgtgatcggtgtatcttatctcaaaatatcctggatttttgacacttttctactaggaaggttaccaatctattatttcaggcaggatatttcgtttcttaggcctgtttatttctaaaatgaaaagtggatgagtactaaattaatcgatgttggacgattttccagcatgttaaaaaactgtcttccaggacaggcttctgtaattcaaaagtaaagaaactatataagcagtgtcacagggtaccaataacgcatcattaaaagcattcggtatttaatttttgtcacccagtttgtacctgagcttaacgtagtgtttttgtcctaagactttaaaacggtaacacttgtaaagtctattttaagacttcccatggggttgttacttgctcctcactataatccattacaacagcaaccattttttttcattctaccaacaagttgggacttcaagtggtaaagggacagaaacagtctgtgaaccatcgttaaactttttgctatcctcgaacgagcaaattatgtgaataaaacaagtacaaagatttgcaaaactgttgtcgccgccaggacgactgttcatcttattcacaaactttaacacttatgccatagggaaatagtaagtaagaatcaagagcgtacattttttttaagacagaaaagttcggaataatcacactgggtttttatttgggttttgcaggcaaaatggaaaggacccctgggcccgcagcagcgggaaggctcgaggcgccgccggcgaactctgggtcgttccggggccctcatctcctcgcccgcccccaggatcccgccgaggccaggcctcccaacctcccaccgatccccgaccgcggcctctccgcgaccccggctcacgcccgcggcggccagcttgaggatacggttgatgtagttctccaaagcggacgtcatgctgttcggcccggcggttccgggtaacgcagcggtgccgacagcaagcagaactgaaagggcgcgccagaacccggcagcggatagcgcctgcgggtcgcagcaaatatcgtgagagttgctgctccgcagccctgtgagtcggaaattgggacgaactggccaaccaaacagaagccgcacagcggtgacgagagagtgcgcgtgcgcagtgtgttttctctgtaattctgggccgtgttccggaagcctcgtaagacaaaagcgaacgagaggcggaaaaaaggaagacgcttcctgaagttgggggtatgagacagaagttgggggtatgagacagaagttgggggagagtgggtttccaatccgagtaaaaggcagtgtggtggaagttaacaagagaaaatgttgagacgaggtagagcaggcaggaataaacgaagtaaggtgtttttattaggagtgaaggagagagacgagtgctgttgtgtgaaacgtaggtgcgggtagttgaatccctagttttctgcagcagaagccgaaaataacgctaaaaataagttcagttgcccgggacagagttgcgcacgttataaccacacggtgtacgcctcttaagaactcagcagtgaaatacactttcgtatgttctgcttttgtctctaaaagtgttccaaaatggaggtgtttttactttttaaagaaactaaatgcaaataggcaaaggtgtgtgaccatcccttagaaaacgaatgtccacgcttctgccacgccaggatggtctacctttcttcagggtgaaattagtaagtaaaaggctgctgcagcaccgagaaaggaccgatgcaggaaggatgcaggaaggcaccaaacttggttctaatcttggctctgctaacaaattggtgtcattgcacaggtcacttcaattcttctgggcctcagtttcgttagatagtcccataggtatcatttcagatatttcccaatgcgatactgttcccacttcatttactgttgccctaacttgagagagcttgaagttagaaagagatttatacacaaaacaccagcaggagcgatttcccttttttgcaaaatatctttataatttcagttaaacatgtattttcttaagatttgtggctttgtaataactcttgcaatgtcagcagttttcctcggaaaaggaagcatttcttaattagagcatacccacaagatactcccaaatagttaatattttatattctggaacttattcctatctgtttgaaatcaaatgtagtcaggaattagattgtgaatgtctcatattctcagggtaacaaatgaaagtgtcttccgctaatgaaagaacaaagataattgtgtgatttgcaaatgttaggtgttgaaccaaaacccaaagactaattaatgattaacgaggtgttaggagttttgttaaaaaaagaaattgctgggcatgttggtgggttcctgtaaccccagctactctggagggtgaggcaggagaattgcttcaacccgggaggcggaggttacagtgagctgagatcacgccattccactccagcctgggcgacaaaagcgaaactccatttcaaaaacaaacaaacaaaaaaacctctgtgtgatcttataaaaatgaggccgggtgcagttgctaacatctgtaatcccagcactttgggaggccaaagcgggtggatcacaaggtcaagagatcaacaccatcctggccaacgtggtgaaaccccctctctactaaaatacaaagattagccagcatggtggcgggcacctgtagtcccatataccagggaggcagaggcaggagaaccactagaacctgggaggtgaagtttgcggtgagcgaagattgtgccactgcattccagcctgggcgacagagcgatactccatctcaaaaaaaaaaaaaaaaaatgaatactccctatggcttttcatcccttagagtgtgcttttgtaagtctattgccctgtgtagttgtcattaaattaatatgccagataaataacagatgaacagtgtttatggagcatcacaaaatctctttggctggaaacttttttacatgtgtcttaaaatcgctatattttctgtagtctgtaaggatcacagatgtagcgagaaaacctatggataaataaaagtcggtttacta

SEQ ID NO: 586662 - DNA, 4001 bp, Homo sapiens
agcactttattgacattactgaattccaaatatacttcatagagcattcctaaggaaatgacttgatatgacaattaaaaaaaattaaaaagcagcagcaaatagagtaaaagggccttagaggtcagtcaaatcttatccttttgcagttaaaaccaaggccccaaaatattcactcatgcatagtcacagattttaaaacaattcttttagatgtgtttcatattttatcatccatttatactaatatttgaccaaacagtaatatgtgaccaggaaaaaaagttttatgtgtcacatcacaggaccactgttctgcacacagcttctattttaggtgtggtaactgaagcatggttcatttttggatctctgacttaatagccttgagccttagcttccccttcaggaatgtatctgctgttgcttcaatttcatactgaggcttaatcaatgtttacaaaatagagacctagctagaaaatcatggccacaaaaactgactttaagagtacagctaataaaatctccatattactggtcttgctatctactcaaaaggtgactccaaaaaaaactaagacaacaacctagtgagccatgacgtgctttgaaagaaaatgtcttctttagagtgaagtcacaatgtaaatatatgctattccaatatttttttaatgagctgcaacacgcaaatggaaaaataaagaactagcagagaaaactgagttgggtgctgttccagggctccaagagcctgcaaatgacttgcaaatgactcatgaggctgctagtaaagggatacaagatcacatggccttaaaaccaggccccacggctgtttgacacccagtagttgctatctttggcatctccaaatgagggcatctaggaacaaccagcaaggctggagaagccagtgttactagcaattcttcatcacactaacttgaccctcctttcaactccagtgtgcaaatttgcttattcaccaagattggctaaagcagcatccctttaacagaaccctttcttataccttgactggaaacatgtaagtaatttcattttcctctggtttagatcactgctaacagttgattttttgtcatttaagaattctttgactatttacaaataaatattccaacaaataaagataattgtctatgaaaaattgcctggtgctttattttttaaccaggcaggtgcttggtatcaaaccacagaaataactcacaccagtattgcttgccacaaaatcagaattgttataatagggcataattcaaagctaataagcagtgttattgaatgagtcatggtaatttgttctttaatttcatttcccagtcaatgcctcttcacattcaggaagtaatttttaaaatcaagtctaaatcatttctatcaaaaatgaaaaacacagagcacatgcaacaaaaacttcccagactcgagaatcataattcagtctcagtagagtaatagcatgcaaattacttacaaaaatgtgagctttgactgctaggttaccagaaaaacaaaacaaaacaaaacaaacaaacaaaaactaattgttcagaagcaactacaacaaaacttttctacaaattctgtagttctctctttgcctttcttcagcatacgggtgctcctatgagacccataagccccaggatgaaactgttggtctatattgtgtcaatttagccaagcagtgtaagattccaaatcctgacttttttcataatgtctaaggtttttagtaaatatattactaaaactatgctttaaaaagaaaacaacaaaaaaacaccatgccctgatttagttggtaactgatgaggtttttattggactgaagttaccgtccttatctggctgaagcaactgttagctgacaccacctttccagcactcctgccatggtatgcttccatatataaatatcctgtagcaggcggaagctgccactatgatgactgacttgcaaacactccagacaaaccagagaactgcaataaacacggacagaatatgattatgacatcataacaaggatgatggcaggtcagacgcctagtgcttccagtagctacaaaaagcgattgtgagtgggcgatttcatggatacagacccaccacaggtgaaggaagcactccatctcatcggccgcctttcctttacaaaggctttgttctgtgagtgtctgcacatcctcctttctcaggaataacagccttccatatatgtggttccctcacatacatgccaaggagcttctgccctctgctgtacataaaagatgctacagtgatgaggagaccaactatctcagcaggatactaacagtgaggttgtgaacaactgtgcaatcctttatcatcctcacttccattgccatagcttgatggacattattcatctttgaaacatttttcatgtcagtgagaaaataggtgttccacaaaattttctttgagacagagtcttgctgtgttgcccaggctggagcgcagtggcatgatcccagcctactgagaccttcctgcttccagattctcctgcctcagcctcccaagtagctgggattacaggtatgtgccaccatagctggctaatttctttatttttagtagagatggggtttcaccatgttggtcaggctagtcttgaactcctgacctcaagtgatccacccacctcggcctcccaaagtgctgggattacaaacttgagccaccatgcccggcccaaaattttctttacacctatatcccatacggacctcactctgctttgggggaagaggaatgtcattttttttttcccttcacactacctagtctaagagggaatgtcattttttcaagcctcatctgtacccaaagactaattcttggaggaagacaatataactagtaacttttctcagaaacatacgttaaaaagctatgtcaaatttctctgaataatgaaaatgttcatgttagctattatgctgtttttaagaaatctcccaactacctgatctgccttgagccatgtatcctttgaagatataatagaagtaactgcctcattttggggcgtttactacttttcctctcctgtaacttctaactttgtggaatattaacttcccctgaaggaggaaggaaatggagactaaggaatttaattgttgagggatacactgattataagtggcagagatgagatgtaaacccatacctcgcattcaagtctgaattgaactatacaccagtgagggggataagactgcctttagaccagttagacttctggaaagccacttaagaacaaagcaagacaacctacttcattttaactataacatacctgcaagaccacctttaagaagagttttggggccgagtgcggtggctcatgcctgtattcccagcactttgggaggccgagacaggcagattaactgaggtcggaagttcgagaccagcctgaccaacaaggagaaaccccatctctactaaaaatacaaaattagccgggtgtggtggcacatgcatgtaatcccagcaactcaggaggctgaggcagattataccattggactccagcctgggcaacaaaaacgaaacttcatctcaaaagaaaaaaaaagagttttgggtcacaaaaagagatattctcacatgaagtgtctaatctagggacattctcaagtatttgctttttctttcatatattacatctcagggtatctaaattcactcccaggaaatttagtacccatcaaagaggagtcacagacaatgaatacttcaaaatgcttgagcctcaaaataatgaaagcgggcaaaattaatcaagaatcaagcaatgaacaactagtctataacacaacatttttctactttcaagaaaacacaagcattcttacacattgaacacccagccacccttgtctagcagttaccacaagtttcatgaataaagtcacctgcatataaat

SEQ ID NO: 586663 - DNA, 4001 bp, Homo sapiens
atgtgctaccagaaccctagctaagaaagtgagctcaaaaagtcatggactaaaaattttttttagggttaaaactaaaaaagtgtgtttcacttatcttgaaattttaattaacaagaacaaacaattccctgagttttcagataagatactaccatagcactttattgacattactgaattccaaatatacttcatagagcattcctaaggaaatgacttgatatgacaattaaaaaaaattaaaaagcagcagcaaatagagtaaaagggccttagaggtcagtcaaatcttatccttttgcagttaaaaccaaggccccaaaatattcactcatgcatagtcacagattttaaaacaattcttttagatgtgtttcatattttatcatccatttatactaatatttgaccaaacagtaatatgtgaccaggaaaaaaagttttatgtgtcacatcacaggaccactgttctgcacacagcttctattttaggtgtggtaactgaagcatggttcatttttggatctctgacttaatagccttgagccttagcttccccttcaggaatgtatctgctgttgcttcaatttcatactgaggcttaatcaatgtttacaaaatagagacctagctagaaaatcatggccacaaaaactgactttaagagtacagctaataaaatctccatattactggtcttgctatctactcaaaaggtgactccaaaaaaaactaagacaacaacctagtgagccatgacgtgctttgaaagaaaatgtcttctttagagtgaagtcacaatgtaaatatatgctattccaatatttttttaatgagctgcaacacgcaaatggaaaaataaagaactagcagagaaaactgagttgggtgctgttccagggctccaagagcctgcaaatgacttgcaaatgactcatgaggctgctagtaaagggatacaagatcacatggccttaaaaccaggccccacggctgtttgacacccagtagttgctatctttggcatctccaaatgagggcatctaggaacaaccagcaaggctggagaagccagtgttactagcaattcttcatcacactaacttgaccctcctttcaactccagtgtgcaaatttgcttattcaccaagattggctaaagcagcatccctttaacagaaccctttcttataccttgactggaaacatgtaagtaatttcattttcctctggtttagatcactgctaacagttgattttttgtcatttaagaattctttgactatttacaaataaatattccaacaaataaagataattgtctatgaaaaattgcctggtgctttattttttaaccaggcaggtgcttggtatcaaaccacagaaataactcacaccagtattgcttgccacaaaatcagaattgttataatagggcataattcaaagctaataagcagtgttattgaatgagtcatggtaatttgttctttaatttcatttcccagtcaatgcctcttcacattcaggaagtaatttttaaaatcaagtctaaatcatttctatcaaaaatgaaaaacacagagcacatgcaacaaaaacttcccagactcgagaatcataattcagtctcagtagagtaatagcatgcaaattacttacaaaaatgtgagctttgactgctaggttaccagaaaaacaaaacaaaacaaaacaaacaaacaaaaactaattgttcagaagcaactacaacaaaacttttctacaaattctgtagttctctctttgcctttcttcagcatacgggtgctcctatgagacccataagccccaggatgaaactgttggtctatattgtgtcaatttagccaagcagtgtaagattccaaatcctgacttttttcataatgtctaaggtttttagtaaatatattactaaaactatgctttaaaaagaaaacaacaaaaaaacaccatgccctgatttagttggtaactgatgaggtttttattggactgaagttaccgtccttatctggctgaagcaactgttagctgacaccacctttccagcactcctgccatggtatgcttccatatataaatatcctgtagcaggcggaagctgccactatgatgactgacttgcaaacactccagacaaaccagagaactgcaataaacacggacagaatatgattatgacatcataacaaggatgatggcaggtcagacgcctagtgcttccagtagctacaaaaagcgattgtgagtgggcgatttcatggatacagacccaccacaggtgaaggaagcactccatctcatcggccgcctttcctttacaaaggctttgttctgtgagtgtctgcacatcctcctttctcaggaataacagccttccatatatgtggttccctcacatacatgccaaggagcttctgccctctgctgtacataaaagatgctacagtgatgaggagaccaactatctcagcaggatactaacagtgaggttgtgaacaactgtgcaatcctttatcatcctcacttccattgccatagcttgatggacattattcatctttgaaacatttttcatgtcagtgagaaaataggtgttccacaaaattttctttgagacagagtcttgctgtgttgcccaggctggagcgcagtggcatgatcccagcctactgagaccttcctgcttccagattctcctgcctcagcctcccaagtagctgggattacaggtatgtgccaccatagctggctaatttctttatttttagtagagatggggtttcaccatgttggtcaggctagtcttgaactcctgacctcaagtgatccacccacctcggcctcccaaagtgctgggattacaaacttgagccaccatgcccggcccaaaattttctttacacctatatcccatacggacctcactctgctttgggggaagaggaatgtcattttttttttcccttcacactacctagtctaagagggaatgtcattttttcaagcctcatctgtacccaaagactaattcttggaggaagacaatataactagtaacttttctcagaaacatacgttaaaaagctatgtcaaatttctctgaataatgaaaatgttcatgttagctattatgctgtttttaagaaatctcccaactacctgatctgccttgagccatgtatcctttgaagatataatagaagtaactgcctcattttggggcgtttactacttttcctctcctgtaacttctaactttgtggaatattaacttcccctgaaggaggaaggaaatggagactaaggaatttaattgttgagggatacactgattataagtggcagagatgagatgtaaacccatacctcgcattcaagtctgaattgaactatacaccagtgagggggataagactgcctttagaccagttagacttctggaaagccacttaagaacaaagcaagacaacctacttcattttaactataacatacctgcaagaccacctttaagaagagttttggggccgagtgcggtggctcatgcctgtattcccagcactttgggaggccgagacaggcagattaactgaggtcggaagttcgagaccagcctgaccaacaaggagaaaccccatctctactaaaaatacaaaattagccgggtgtggtggcacatgcatgtaatcccagcaactcaggaggctgaggcagattataccattggactccagcctgggcaacaaaaacgaaacttcatctcaaaagaaaaaaaaagagttttgggtcacaaaaagagatattctcacatgaagtgtctaatctagggacattctcaagtatttgctttttctttcatatattacatctcagggtatctaaattcactcccaggaaatttagtacccatcaaagaggagtcacagacaatgaatacttcaaaatgcttgagcctcaaaataatgaaagcg

SEQ ID NO: 586664 - DNA, 4001 bp, Homo sapiens
tgctaactccaaattagccttcaggtccctgattaatttcctccggaaaaccttccctaactaccccttctttataccccagcccctgttgtctacaccttgagcacttatttatcctcagtactttactgtatggctccttaggtgggcagcaagtgtcttaaggacaggacacatgtgcatctgattcttcctgtttagaccaggttcctagcacagaccctaacgttgccaccttttaaaaactaggtgaatttgagttctaagattttacattctgacgtccgtggctcagaaattcgacagttgatcgttctccctttccccacattgctcaagggcagcaagtttccttccctaaagcccagttgttcttttccgcctcaaaaagaaatgcttcttagaataacttttctaggggacgggtgaggaaattgttggccagatgctgtggctttaagtctagcaacagtacacccttcaactccatcttcattgttttatccccagcattgaatcctccattccactttcctgactgccctccgcagaggcaacagaccagccaatgaaatccttcgggacgggtccgcccctctgcaggacaggctgacgtccccagagcgactctgcgcccccccccgctggtcctttggtccccgagtttatgccagagcatggagcctagggcctgggttggtttggtcagaaccagggctccgtgggagggttggcctcagaaatgcaggaattaaacaccgtgctccccaccctagcccagacccggctcttcctccctccccagcacgtagagcacccgggacatggctcccgtacccgatgtgcacggaaagccttcacaaggtaccgataggccgcggtgtcgcgatagggtcggccggtggccgcgctcaggtagcgcaactcccgcagaagtcctcgaaaagtgtgcgacggggaccctaaggccgccattgtcctgtccttctccgagcgtggtgcccaacggcgtcctacgaccctgaaaacccctcctccggcccaggcgcctaatggtacggtcggacagactaccgactccccctatcgactgacgagcagtggaaccgctcacttgtccgttgaccgaaccttattaatcgaaggcccaggggcgccgtaacaaaatcaaacgaaacccgactgttaactgaaggtaccaggacctctaacccagaacaagggtttggggaaacaggggcttttcttcactgcgtcattgaagatgcccgttagccgaccaaccgctgagtctcaggagaagcgggcccggcggggggtgtgggtgtggatttgatatggaacacgctgagaagacatttttaaatgatttataaaagggatatcaaaattcaacgtattgacgtctccccaaatcccaggggacctgcggctcagacaaaggacatgggtgtgtgcagattctcgaaaattgcagcccaccagctagtaaaaacacacacacacttcccatttaaaaaaaaaaaaagtaaagttggcatatttcgctttgtttagaaaggggaaaaaaggacaaaagtcacaggccaccccagatgggactcgaacccacaatccctggcttaggaggccaatgccttatccattaggccactggggcttctgcaaacgacgcgctcacacaacatattcaactattttcctctttggtacgtcatcgtcacttcattttcgccttaccctatcccacgaaaccacacctagcgcccacgtgaggggtgacgtatgctgggagttgtagttagagaacaaaagtccacatcaccgcgccaaaggctttaccctcgaaactgcaccgatgctccggacgttgaacgggcgcgcgcacgcttctgcgtacgcgcttgcctgcgcaatagtctccgcgcctgcgccgtagtccccgcgcctgcgcaaaagcgggcatgcgccgtcgcggagcacagcgcgctgggcaaattggccggatcttcgagactcgccctctgaacgtcagctctggtgggtttttaccggaagcagccggaccttttccggtgttgcgaatttccaggaggagctttgctccagcggccgttagatggcgcctgccgcggtcaatttctgcttccggttgaagcgttgaggccatttccgcaggccgggcgtggtggcgcacgcctgtaataccagtactttgggaggccgaggcgggcggatcatcttaggtcgggggtttgaaaccagcctgaccaacacagagaaaccctgtctctactaaaaatacagaattagccgggcgtggtggcgcatgcctgtaatcccagctactccggaggctgaggcaggagaattgcttgaaccctggagtcggaggttgtagtgagccgagatcgcgccattgctctctagcctgggcaacaggagcgaaactccatctcaaaaaaaaaaagaaacatgtgccgtgtcctttgaattggtgcgtcagcgataaacatgggacagcggggaagtaatagtacattgattaggaattaattttaaaaattagcagttcattttttggttctgttcctaattgtataacgaacaaatcacttcggagtcccagtaaacttacccttatagtatcacaggggcttcccattgtccctaagataaagctcagacgacataaattgatcctcgcttgtaccttaatcttcatctctcacttttcgcttatcaccctctgctccaggtatctccactttcattgtctcttccccaccacacaccttacctgatattccctctgcctgaaacttaaccatttgtattaatatgcctctttaccctttgggcttcagcttactccagaagtctaggttagacgcttctccaggcccttgaagtcaatacggcaaggtgaaaattattcatttcacctcctctggtcccctgttgctccctttatttactcatcgtaaataactcttaatgtaggtacatggccactactccatactgtagttgtcagtctcttccatcagactgggaaattgttcagctccgaaagccctgtgcctaacagaaaagcctgtttcttcaccaggcttattccttggtagcatagtcataacagcttagtctgaagctcctaaagggattggcactgtctggccccagtggctaggagacataagctactgagcaggaatgacaaacaaatggaacatcaattgttcattaatgagtaaagctggcttggttggaaacctggtgaactggacagcaactagcccacctgtccagggggcagccattactcacctccactgattgttgccattttaggaaagcaaatcctttaaaaacctttttttttttcaggaaactctggaaatctgttttaatgctatagatttccttctaaatattggccactaatgaatactttaaaagtactgcatgccaaacagcccacagacttctagtctgtaaagaaagaagaaaaaaagggcgataggatttgaagttaagaaaaggtaaaaaacatgtggcgtgcctagttcgtgggaaaaaaagctggtttgatgatcctgcctttttattttttctttttagaaaaatttttacaactatattgtctttttaagtttttaaatgatttttttctttcctatcatctccttagcctgataccctgccttatctttaggaaaaaaatgctcctgataataaatacaaaatataataaactcatttgtattaacatgtgagattctgttcaaaacccagcctcattataggtcactcttcagcaccctcagctgattaccacactggctaaattaaggaacttacacatcttaaacagccttctcaagattaccattttaaatgttccccactcttggccgggtgctgtggctcacgcctgtaatcccagcactttgggaggctcaagggggggcggatcacttgaggccaggagttcaaga

SEQ ID NO: 586665 - DNA, 4001 bp, Homo sapiens
aacttaattttattacacagattagttattctgttagctaggatccaatgaaacccgttcccaataccctctctcatgttggaaaaggaggaatgttaagacatgctgcagtgataaagtaaccattcttatctaaacgtgagaaatgataacagttaaaagtttctccagtggcattttaagttaatgttaactttccatacaaaactcatttccttcccaatctttcctctctacacaaccacaagtaggtttgccatctacacctatttgtctatatattctacaaataaaagttcccaatatgggtttttattaaaactgaaaatgtgaacactgaaaagccactctacgcactgctgaaagatttgaatgcaataaaatttttaaaatttactcatattttgctgtaaagcactcatgtaaattaaaagagtaacttaaaaactaaatttaagacgtgccttttctcttaaatcaatacacttaaataacttctcaagaaaaaaagcatttccttagtggctaagaaactatctgcctaaagaagcaacacataaaaactaccaaggattttgctgtgttaagaaagtaatgaactagacctttcctacatatttgaatgtatttaagttgaatttgagagtacattactaattaacatcaccaaaaaagcaacagcatttcatcattttatttagaaattctctttatgacaaaggataatccagcaattaagggctctctatacagattctaaactaaacgcctgaaaggatctttgttctcctctattctacttcactgggtaccaaattttcaaaatcgttctgttagggacatgcaacatttgtcaatatttactgaacaaagcctctattaaattgtctaacaaaatggaggtctctcggaaaaacaggccataacatgttccttctcacaaaatggggccaaacacacccacttaagaaaccatggtttgggtcagattttccataaaaatggttgtttctgtggggctcgagggtgcatctctgagactgggttagtaataaaggtttcctcctgacccaggaagaggagggggaagcttctctctaggtactctggaggacggcggcgagggatgatcccaaagctctgggttaaggaattatatcgggggtggaggccttagctttccgcaggtacctaaccagcgacaaaacgggccccccaactacgcaacagagacgcgggctctcccgtctcagccaagtcaacattaaaagcacaaactctcctttctgcctccaggccccgcctcaccccattggcagcagttcccgccaatccgcatggtcaccgccccccctgcccgcctgccgagccctgattggatgggacgggggacggggacctcgtgttaccaatctgggagccccttactcagccacacgcgcgcgcccaggtgcgccctcggaaccccttcccttcgccgtccccgtcccctcccccacccccagggccctggcagagacttaccgtcccgggaggtgcccatcaactggtccagcatcgcgcgcatctgggcctgcgccgacatggcggcggcgtagcgggcggacgggcgggggtggggcgcagaccgggcccttttgggctgggggataaggggaagggatgggggaaggtgcgctgctgtctcggtggccgccgccgcctcgaggcgtgcggaaagggagccggaggggttgcgggaagagtccggactgcgctcctcacgacgacgtgtacgtggaagacgacagcccccgacagcgaccctcgtgccctcactctccgtccggttcttgggacagaagcgacacgggccaagcaagctctcgccttcaacaccgccacccgccagaagccgtcaaccccccctcaagctctgacgccgctcgccgccaccgtcgccacgacgggagcgcgcacgctcctcgcgctcagtcgtttcccgcgggggctccaccaactggcgtccagctgtatcactccgcccgccccgcccgagtggagttccaccctaacggctctgggcgcgtgcacgcgcgctcctcccgcccctttaccccggatctcgcgatactctggttccttaactgactgtgcaagccggatccgccccgaggcgccaaaccttacattacattccctcccggctgtagggctggcggctaaggctgcgctgcccgcggtgatggcgattcagacccaaattagcaaaatgcgctagaggttagcctgggcggaaagtaagtagagaccatgcccatcgtcgaccggactgcggtcagcctccttggcgtctgaggtgggcgtgctcggggcgaacgcccgccccgagtggcgtggacgcgtcctggttctcgtgcgcctttcccggccgggagcaggcctgtctcgccgccgccggggccgcgttccttccgctgcgtggggctttaaggctcctcggctgggaagtgtcaacttcaggagaaagcgcccgaaagcagtaccctaggaaacaggcgcgccgacccattcggattcatctttacctacaaggtcgcgggcggcttagtctgaatgtgaaaccataaaaactcagcgtattctcagctactggggaggcgatctcggggagcagggagccagcggcgctggccgcagggaagcctggattctgaagcccggcccgtgactggggccttggcttcagttctacccctcgtagggctggtggaggtggtcacacgtctgctatggcgtggctgttagaacaaactggaataaaatacttagccctgagcctttccctggtgtttctaaaaactgttttagtaaaatattaattccttgccgggcgcggtggctcacgcctgtaaaccccgcactttgggaggccaagggaggtggattgcctgaggtcaggagttcaagatcagcctggccaacatggtgaaaccctgtctctactaaaaatataaaaattagccgggcgtgatggcgggcgcctccccagctactcgggaggctgaggcaggagaatcgtttgaacccgggagacggaggttgcagtgagtcgagatgacgccactgcgctgcaacctgcgcgacagagcgagacttctaaaaaaaaaaattccttaagtaagacataggtcagtgtgcaggaagaaaggttgcttaaaaagaaatctaaaactgtaagaaaaatgaatgagttaataaaaccaaatgtttaagaagacaggcactttctagatactttgaaaggacataatagagatttgtgttccattaacactgtatattcatcgcctaaaaagaaatttaaaactgtaagaagaatgagttaataaaatcaaatgtttaagaagacaggcacttcctggatactttgaaaggaaataatagagatttgtgttccattaacactgtatactcatcgccttggaactgttattagcagatcaataaaaaacatgaatagtagtaatagtcccaaaattcctttaaatgtatattgcggctgggagggatggctcatgcctgtaatcccagtactttgggaggcagaggcgggcggatcaccttgaggtcaggagttcgagaccagcctgaccaacatggtgaaattccatctctactaaaaatacaaaaattagccgggcatggatgcgcgtgcctgtaatcccagctactcggaggctgaggcaggagaatcacttgaacccgggaagtggaggttgcagtaagccgagattatgccactgcactccaggctgggtacaaagcaagactctatctcaaaaataaatgcgtattgggccaatgaaaatttttgaggtcggacgcagtggctcacacctggaatcccagcactttgggaggccgaggcgggcgaatcacgaggtcgggagtttgagaccagcctgccaacatggtgaaaccctgtctctactaaaaatagaaaaaatgagctgggcgtg

SEQ ID NO: 586666 - DNA, 4001 bp, Homo sapiens
ctgtaaaatgggaccaataataggacttacttcccagtattcacaaggatgacataaaataatgtgtcaggaaaacactaaatacattgtgttattttggtagctgtaagttcagttagtacttaatcaactttttgtatttcaagtatatcaaacaacctaggttccaccatgacaggaaaacaaaagcccacttacttccagagtattgcagtgtcccaccactggtaagtgtaccaaataatttctaccttttagctttatattgaaatagccaataagtcaagtttcagttggctaccagctgagaaggcagtgacgagaagacagcctgtcctaaaactccactgcaaaaaactaagcaggtaagcagcatccaaaaagtctaaattgtaatggcattaaataaagtaaaaaccttcagcagtttgccttgcacaatcctgtaagttttaagaaactgcttcgcttacttgcttcctaacacagcctctgaagcaaaaacccaggtcaggtcctattctttgaagagttaaaatctagactgggttctcacacttttagaaggtgagcaagatgccatccgtggttgtcataaaattatacttgttttggaagattcattttagattatcactaaattaaaatcacatgttaagttctctcataattacaaaggcacagtttcaggatggaaagacaggctagcttggaattttaagtttcccactctgccacaatgtcgattcagttttatatttggggctgaggtttgagtttgtctttcttcatcatgattttaccccccaaatacactgccactaaactgcattgctatttactacacatgtaagcatttcaggtgaaatcagggagaagaatggaataactgaagttaacatgcttgtttaaaaactattcagataccttaaacattcccagatgccagttgacaaccttaccacttgaagcaaatatgtatttgttgtggtgggggaaaggaaaaaggccacacccaaagttaagacaccacagtgaagtgatactcagtttcagaattttaactatttctattttcggtactcttttcacggtcaatgaattcttcaacttcacaccaggccgagagttaaaaaacatgttcctctgatcctaattacttaggttacttcatttagtaatgggtaagtccaagatggagaattacctcattcaaagaaaggtttaagtaactttggtgtagaagagggccaaactcaaatgatcagtgcgcagaagaaactctggatgagccagacaccactcctcccctcccccaagaggccaggaagtcaggtagcgcctaactgtattaacgcagcagttacctgacacagaacgctaccaagttacctggacccttctttcagtttagctcctccctagacgcccctctctccttggtgccgcctccacccaggaagtctctcctcccgcccacccccatccccgcagtccagctcccatcagcttcctcagcctcatctccagcccacctccgtgttctcgcctactcttctcatccccgcttaccttggccacatagtctttcacctcatccaagtctccgtttttcagggcccacatgaactccttgtcgcacatcactgcagcggggcaggccggttggccgggcagaagatgaggaggcggtggcagcagcaagcggatgccgccgggcgagagggaggcagggccgcgcgaagccggagaggagaagaagagaaggagggttaggctgccaggcgggcgaggcagttggccgcggcgaccgttcgggcgggagaaagaaagttcttttgcggccaccgggcccagcagagaggttccgcctggccgaggagaggcaggaacctttacacttccggttcactccccgctaggaccctcccccaacttcctcttcctcttctcctccgcggaacgcctctctctgggtccgcggcgcgaacgccactagtgcgcatgcgcaatgtacaggctgccgggaaggctagagtggagggtaggagccggcgacaagtgggcgggactgggaggcagaatgaaggaggcccgggggaggtcaagacagcgaatggaggaagagtgagagtactttcgatgggattaggacgcttctgcaccaccattaatgggaaaaactttactttttaaaaaacataatcttggagggcatcttgctcagcttctaaaaatgtataggaagagtgtttaatttgaattccttcttccttgccttttccccttccctccctccttttcacccctccctctctccgtcatccagtctgactgggctaaaaacgatggaataacgctattcctgccctccaggaaatcttcaacactaaaactacaatgtaaattgagtgtgttaacactatgtataatgttccctggagcaaaaaacttaagtgtgtggcaggaaaaaaaaaattaactcatcttcctgaccagcaaatgacgtccaggcattcagtttgatgccgtaaagtggagcaaaccaaactgtctagtacaatttgcgttttttaaatttactgtttgtttttaatggtttgaaacttcaggactgttctggtgaagtcagttctgttcttcctagggtttagttgtaatgccatagtgcatagctaccacttgaattgttcctcacaaccctaatgatccaggcatgcgcacatgaacatagatccaataaaagctcttattggagctagaaatatacgtataatatatatacatatataactattactatatataaaactcatatatataatctattatttgtaacccactaaacacattaactaagctactttaccaccattgccgtacagtgtaggggttccaaacagactctggagccaaattgtttagtttgcgatacaggtcccacttcttgctaattttgtgtcttcttgggcaagttactgaacccccttctgcttcagttttccacttgtgtaaaatggggatgtcaatagtgtttggaaatgtattttttttttttttgctatcatttagagtagaatagcaaatgggtttcaaatcagaagaaatccctccaaatattaacatctacctagattgtcatttgttaattttactccctgataattagaaatacaaatccacatacccaatagtgatacgatttctggaaacaaatctcaagggggaatttgttaggcaagtcctagaatctccatctcttctccaacacactcccacctgtgtgatttctgagttacatcatgctgagagctcttgatttatatctttggccgggtgcagtggctcatgcctgtaatcctagcaccttgggaggacaaggctggaagatcgcttgaagccaggagttggagaccagccagggcaacaaaatgagacaccatctctacaaaacacaaagattaaaaaaattagttgggtacagtggcggacttctgccttcccagctacttgggaagctgaggcaggaggattacttgagccctggagtttgaggccacagtaagctatgatggcaccactgcattccagcctgggtgacagagcaagatcatctaaaaaaaaaatctttaactagacttttcctatgtgatctattcttatatttaacttcttactcatttggatttctcaaacttaacatgtccagaataggatctggtctcctgtagatgttaaacctagttgtcccccacatatctctgtaaatggcgctgccaaccaccctatcactaaaaccagaaacatgggagtcataatcactcttcccattctcaacttttctcttattcaatccatcagtaaatatttcaaaatatgtcttaaatttgttcatttcttgccatcttcactattactactccctgcaccctcacatatcccccatccctgtcactgtcatctctgtctacactgctatgatgctatgtgctatgatagcc

SEQ ID NO: 586667 - DNA, 4001 bp, Homo sapiens
gacacttcctagagacactacaccatagacggcacttgacaacaacaaaaaaagccacccttttagaagtatacagtgttcagtgcctctgcagctttcctccacctttggagaattacaagtttcattctaattctatcctggacttgctgacatagggtttacatttattaatatatggcatatcacatgtaaaactctgcacagtcatctgaaatgctggttgttatcaccttcacttatcaccaaatgccataagggatgtttagtcttaatagacacctaggcatatgtgtggtctttcaagaaagaattctctaaaaattcaacagacatgtcttcaagttcaaaattagtataattccaaaatgtcttttgtcctccaaatcagccaatacattttaagataagatggtgtttaacaaactttgccttaatagtttttattatctctaaaacacaaacagataaaaatattctatttgtaaattagctacaaggaagttgagaaaactggaataaataatatttttgctttaagttttaaaaatgagtcataactaaagcttttaagcaaattgtaactaataattatgacttcataatttctagattctgtacactacccatgaaatcatattaaaaatcgctattatgaataaaagataatcatgtaattaagttcaggggggcataaaagaatcaccactgaggttaagacaactttaagaatatacctgaaattcatcattatcacccagtaattgctatgtaaaaaccagacattaacatagataagtcaatatcaatcctaaattagacccactgaatatagacttaagacatttttaggaaattaggaagacctttaataaatggaaggcattggaattttcactacatgctttttgatcttaaaaataaattttttaaaatctatctttattaattgtggtaaaaaacttaacatacaatttaccatcctaaccatttgtaagtgtttacacttacaaattttaagttcaatagtattaaatatatttacattattgtacagtctccaagtgttttcatcttgtaaactgaaactctatatccattaaacaactctcatttctccttcccccaagcccctggcaactaccattctaagtatcatttatgtgagtttgactactccagatacctcaggtaagttgaatcatccagtatttgtctttttgtttctttggtgtgttttccaagcttaattgaaacttaattaggatgaagccaagttaccctccatcatgtatcatctgtctattcagtacaatgcactgtgctaatttaatgacccccttaacttaattacatgattatcttttattcataatttaatgctattaacctaatgaggtaggttatgcacacacactttacagatgaggaaactgagactttgcgaggtgaaacatcttgtcaatggtcataaatctaataagcagtggggctgctgattgcaactttatctatcttcaaagcacagtctttttaacatacctgtatgctttttgagatatttaaagtttttaggggatttcagccatctacatattttaagcaactcatagagtgttttgtttttgcctttgatggttaatgtgacctgggttcctccttttttttaaaataaactactttattctaaaccatgtctcaaggtattattctattctatgtcatgaggtttattctaacacatgtcccataagcccacagaataccagttaccttccctttatttaagcagggcttgatttgttaagcagctggtttgttacatttttctggaaattatacaacttcctagtgtgtagcacatatcaatagtgaaaggaatattatttttaaaaaatcagcacttacatttgtggaagtgagcccaagcttcttcagttcagacacatggttttagtgaatagaagtcactctaccaaacccgggtactcttcaaacatgccttgctccgtatgcaggcaggcaactgcacccctgcttcctgagccacctgggacttgaagttctaccactgtggctccaaagctgcccaactagaaaccccaaaaggcaagagaactacgatacccacaattcaggctcctcacccgaaaccagaagagggcgtatggctagagtttcaccctaagaagaaaggggaagcaggtggaaaagcaattaaaaaaaaatcaggtgagtatatctaagaaccatctgtaaatataatcttatttccatgaaaggaaataaaagtggtttaatgtttgccagggagtaagaaggcaccctcagtgttagcaataagtaaaaaatatttatgcaagcaaatcctcatgcagctggaacttgccccaccagattctctttcggtgattcagagctgaaggtgcctcactgccctgtggaacaggtgaataaagccttcccaggtgagtgacagtgtctaactagttccccctttccctctacatcagcactgtgattgtcactcaaagacatagacatatagacataatggagaccttttggcatttcatcttctaaaatgctctggatttttaagataacactttaaaatgtgccttttaaaatataagcaagaataaagttttcttgatattttcttccattttactttccatttctgtgttttgtgttttccttctgtgtattttgttcaaaattcaagaaagagaaaattaggggaaaggggaaaaaaggtaaaacttagtgaaatgaaatgtgcaataattgtttcacatttttttccaacatcagcaacagagaatgtttaaaacaaatgtgtttctctatttgttcatacagcatctctctctagcctattatctcctgttagacacagcccagaaaatgaatagagacaagtcctggctgggtctgggttcagaaacataatagaaggattcatctaatgtaagtagatggcagaatggtgacaaagaaaaagtttcctttcccttttctgcactttctctcctactgttctaaccaccccttcctccctgatgcatccctggcttcatgctgccagatcacctaatccacccagattccctttgaagtttccccttgactcatcccacaatccaaactgagctgttctgtttctttttgtcacaggttcctcaactctctactagaacctagctttcctttatgtcattatattatttccaaaacaaatggttcttaatttccccaaaccctacagagggcattctgcatggcatttctcctccctgaaaccatttttgctcatcttgaaatgttcagagatttcattttttccaaagctcaatgaaaaacactcttcaagatgtccttctcagtttgtcttaatctgagttattctcttcctcctaatcaatttcataatattgcatctgctcctctcataacacattgtatatctcatttcattggtttacatgggtgtgtgtgtacctatgcagtcttacattcctatttgaaggcaaggcctcattgtatccctacttcattaactcattaatgtacaagtagatgtttgtgataaacaatcaacacataaaataactgagatgttaactctaaggtgtgtgtgtgttaatgcctaatgccatctttatgtctcccggaaaacatttacatttaaaaagctacctaaatgccatgcatgagtactgttatcagaatccccctgcagtctggtctggtgtggctcccacagcctttatttgcagaaaggcaaagcattaaatctagcaattgaacccttgacagtacccgaaatgaaagccctagtgggtcagcactcactgtttaccagctccaatccctgctgtgcacttgcctttctaacagctccccaaggactgggctccctagagtcctcagtcccatggtcctggaaacctggccctacctctatctatgatttttgattatcagctccagcattt

SEQ ID NO: 586668 - DNA, 4001 bp, Homo sapiens
aggtttctaggaattcctgaatccagtcagttgatgcctgaaactacctaccaggagcactcacagcaaagtctggcctcttgcccaggcagggtggttcacgcctctaatcccagcacttcgggaggcggaggcaggtccggagttcaagaccagaatggccaacatggcaaaaccccacctctaataaaatacaaaaactagccgggtgtggtggtgtgcgcctgtaatcccagctactcaggaggctgtggcacaagaatcgcttgaaactgggaggcagaggttgcagtgacctgagaccgcaccactgcactccagcctgggtaacggggtgagacagtgtctcaaaataaataaatgaatgaataaataaataaataaacataagccaggcactgttgctcatgcctgtaatcccagcactttgtgaggccaagatgggcagatcaccacaggtcaggagttcgagaccagcctggccaacatggtgaaaccccatctctactaaagccagatgtggtggcgtgcacctgtaatcccagctactccggaggctgggacaggagattttcttgaacccaggagatggaggttgcagtgaactgagatcgcgccactgcattccagcctgggtgccagagcaagactccgtttcaaaaaataataataattaattaaaaaaaaaatctggcctctgggaatcagaaacgaggcatgcaacagtgacagtaaagatgatgatcatcacagctgtgctcattttcattgtttatttctagtgacattaataagtactactactattttcaactaggtatcagaaagaaaggtatctgacatttccgagcaccgagacttcttgaacttcagtttcctcatctgtaaactcatgacagtgaaatctacttgcaaagttgtggggaacggggccaatatccctcaagtcttccaccgctagatgatgggaatacggctgcaggttgaccagcactatatttgtaagctcagtctcaacagggtggtgaattaggtctttttacacagattctagagatgatgaaaccgaagcttcaaaaagttacagaacggagattggaacttgggtctgtctggctttggaaggctgaagacaaaccgcagtaaagaactttgcacccccaacaccggcgcttactatgggctcatggcaggccggcccaccagccacaactagggaacagccaagcgcgtttaaaagccaaaggtagaacttctgcagctgcacagtttctgagtttccatttaacaagaaccttggcctggtgcaagcagaggcctgagctccccaggctgccagccccgcagaggcaggcccgcctggaaggaggctccacagcccaattcctccattgcccaaacgagatcagggtggcccttgccatccccgaggggaaaccgggcccacacgcccccttcctgagagcggaccggcgcgagccaccaggatgccaagagcccctgcagccccgacttctccaccaggcgccagctcaggccccttcctcggcgcgccggcaccctagcccggggacccacacggtaggcagcgggaccccggggctgggaccacgagcacgcgcccctcggccgcccgccctggcacaagggacggctgcggagacccaggcgaggggcccgctgtccccagcacagcccaaagggggagtggggacaggggagtggggagaggaggggagagcacagagaggagagcgcgcccatgggagacggggcgggcgcggggtcctgaggcacggggtctgggtcgttgtgccccaccctggcgagcacacccggtccgggccctcggcccctcccttgccattcccgggacccccgggaccccgggaccccgccgcccgcgcgagccgggccgcttacctcagccgctcgcagccagcttgccgccgccgctcggatctccctccgctccgccggcgcccatttatcgcgacacttgcgcctgcgctctcgcgagacctgcgtggcaatcgggccgtaaagaaccgagtctgcgcaccggctgatcctggggactccgcgtccgcacccggagccgccacccctgggagactccgcacggaaaggactcggaaccgaaggctgagccaaggcgcagtcgggggccccccggctttgcgcaggacgcgcttccactaaggctttcgcctcgcgccgtaatgtgtggaatagccgcgcccacggcagcctcctcggacaaacttgcaccgttgactcttcccaaaattttgctactcagtatcagcttgaatcaatccgttattttgcttttttctgggcccactagaaatgcaatttatgctactaggctaccttcccagtgctctgcaagccagggcacagcatccaatggggtgaggtcaggccccaccattattatggtaacctttgtctatccttcaaattggagccttcctgagaagagtgtgccttactcgtttccatattctcttcctctcctcctcccgtctctgcccagcccctggcttccctctaagaagatgctgttcctaagggtctgcaatgaattttccttctttcagagaaagacttccaagttgtgtgccccgggaatgaaatggaataagagaacgaggtggagtagggcaagagtccctggacttaacaacctgactgcaaccagaaataaaatgaaaagtcaaaacatctggcggccgggcgcggtggctcacgcctgtaatcccagcactttgggaggccgaggcaggcggatcacgaggtcaggagatcgagaccatcctggctaacacggtgaaaccccgtctctactgaaaatacaaaaaaaaaaaaaaaaaatagccgggcgtggtgatgggcgcctgtagtcccagctactcgggaggctgaggccgaatggcgtgaacccgggaagtggagcttacagtgagccaagatcacttcactgcactccagcctgggtgacagagtgagattctgtttctcaaagaaaaaaaaaaatcaaaacatctgacccgcagtttccttcggggagctggacagagccccagattcctgatggagattcctgggtttccagacttcccccactggtccttggaatttaatcatagtcaacaaactcttcttgagggatgagtacacctccaggaaatggctttgaggaagccagtttaaaaaaaacaaaacttcaaagcatgaaagtaccttaaaataatgcaatctctattattttattaaatataaagctgcgtcaagttcctagatgagtaaaagaaaataaacacaccacatcactgcttgctttggcaattacatttatgttcttgggagcccagacactgatataaatttccagcaaaaaccaaagcagacccactgcctggataaattcagaccatacgtcttccctaattgttccgggaacttttgctgcttgaagaatgcgtgaattgctatattgttcaccagaaagacagaagttaatccccagatggaaatttcagatttttcttttggtttgctttttggtttttcatttttgtagacatggggggtgttgctatgttgcccaggttggtcttgaactcctgacttcaagcaatcccccagcctcagccttctaaagccctgggtttacaggcatgagtggcctcacccagcccccagattttctactttaaacagccacactaagaactggaaatctgtgcgtggtgctctcagagcaggggtggaaagcctgtttgtgtgtgacagtttaacagtctataagatgaagtcccgtcaaggcacacatgggcacacccatccctgcctcggcggattccttctgatccttcccacagtctgtttttctccatccttccatcctcacctctttctcttgataactttctcttcccaaatcacaatatagcggactttttcattttccatggcccctgaacttagttttg

SEQ ID NO: 586669 - DNA, 4001 bp, Homo sapiens
acaaacgcagccatcgctgagccccgtgggtgaaagcacacgccttgtagacagcgaagtggcccggaagacggtctcccttaacagcagcctcccgggtgcacacaaaggctggcgccccgacaaccctgaccctcggtaaacgctggctcccgggtttaccagcacctggggagtcgacgctgcgggcaaccagcccctcaaagccctggctcggttcaaggataaaaggcaggagaagcctggtttttctgctttaataaatgtcttattttggaataatgagaggtctagttttaaaagcagactccctctcccaaggtcaaactcagacattcctactgggttacctaagaaagggagatgttctcataaatggcactggacgcccaaatagggtgtaggtgtgtcccagacacctgcacagcccacctatgttctccagaccccgcccacggctcttttaatgctccatgtccctgaagacattgggtttggagaagctgcatagggcaccccactctgtgttggagaaccccttacaacaacacaccgtgacggtgaaacctcagtgccagtaaagagacctggcagcccaccctggagaatcagaggggtgggaagggcgctgccagagccgaaccacacagatatcccctagaccacgatggggggcggtggggggcgttttgagtctcaggatcttcccaaggccaggcacctggccagagattggctggctgcctgtgggtcacctggtgaatgaatggtgagtggatctaatttctgcctcagctacaagagctacttaagaagcaagaaaacagcatgctcagggacgcaggacaccaggagagggacacgggaggccccgcgaacacggacacacacggtgtgagcgcgagaatgcagtgcagggccactgctgtgtcccaggcggacccaggtcaagggccaaggccaggcggggtcctggctttctgggtttctcggtggcgcctggtcccaccccccaggatctagaggctgtgcagacgcagacacacacagtcacgggcacatacacagtttcctgaacttgacagaggcacagaagaactcacgcagtgggagcgggaagaggccggagcccctgccccacacgtgagcaaagggacgagccttggggccactgtcacctgcccccctcccgcctccccacggccttccttccagcaaccctggcaggtgggcggctgagagcgacaccagtcccaggatcccgcctgtggggagacccggttacccccaccccgttcccgggcacgcgtgaccccagccactgggccagagcgccgcccgtcaccgggaggaagcgcggggggcagtccggggccgcacgcggaagccacgctggggcggaagccgcggagaatccacgcgcccgcgccctccccgcaccgcccgcacgtggcgcccgccccgccccgccccccgcaggtgtgaaggcgcgggcccgatgcgcgccgccgacccgcgtggatcctcgtcctcccaggtctggggtccgcgccctggggcccccggcgcggcaagcatggcccgggcggcacgtgcaggggagagagcctcgcgtcccggggaagcccccgggcctgcggggcggggcccacctgggcaggtgcccgggccgcgccgcgggccgcatgagggtctcgggccccgcgcacccaaccccgccaccctcggcccgcgcccccaggcggccgtgactcagcggccaggtagccccggccccgcgccccggtccccgtccccgccgcggcccgggccccgctgccccaccgcccctcacctggcgtcgcgcggagggcgcgggcgcgcggcggctcctcgcgggcacgcgctgtcctcgcgccggcgctcactgtcgcgctcccctcggccgccgccgccgcctggcgctcgggctccgacttcgcgaagaacaacaagtgcccccgcgccgcccgccgccaccgcacccgcccgcccggctccccagcatctgacaccgcttccgggatccgcggcgcgcgcgtcacaccgccctgccccccgggccacgccccctccccgccccgcggccacgccccccggccacgccctcctctcccgcccggggggccgctggccccgcgcgcacctgcaatccccgcgctttgggaggccctgcgggaagatctctggaggccgggagttcaagaccagcctgggcaacatagcgaaacctcccttcccccattctctgtctctataaacataaaaaacattaaggccagctgggaacggtggctcatgcctgtaatcccagcactttgggaggccaaagcaggaggatcgcttgagcccaggagttccagaccagcctggacaacacagtgagacccccatctctacaaaaaaattacaaaaattagtcgggcgtggtggtatgtgcctgcggccccagatattcaggaggctgaggcaggaggatggcttgaacctggaaggtggaggctgccatgatttcatcactgcactctagcctgggtgacaaggtgagaccctgtctcaaaaaaacaaaacaagcaaaccagcaatgtaaaaatggggataagcggctagtgatcacagcctctgtgggtggggccagcccccttctaaagccccagctggtggttgccaggggacacagcaggcccaggatggggttagggcaccactggcccaaggagtcctgtgagggatcctcaggtgggggcgggcccctgagggagctgcctctgcttcctgtcacaggtggaggacaggctggagaggggatccgtctggagccccttgccacgcttctgggtccccaagtcccgcccccctctgagcgctgcaggaagaggagtttcaggcctgggcaaccgagggccccccaggacacccatggcatctgcccggggttctgggaagcctgttttctcagctcaggtgggacccgggagcctgttttctcggctcaggtgggactcaggagccagtgcagggaggtctgtgcatcttctgggtgtcgtccttaccaccatgtggctggggatttaggcagcagcccagtggcctcttgctgtggagcgcgggggcagcctcccgggccatctctcccccccacttgcgggttctgcactggccacctgggaggcccctccttgctaaggcccacacggccgtctggggcagctagccacagtgatgcctgcaacctggccgcagaaacaggtgccaagaaataactcaacagcagcagtagcgacaatgtcccacgtccccaggatgtttgcagaaagacatcccccggggatgggaaaggtgcttcccttgtcctggcccacactctgcactcggggtcctgggatgcgctgggagcctccagagaagctgtggccatctccgcgggactctttacgttactcatggtgtcgctcctctaacccaaatgcattctttccatagcaggcttttgttactaatcacacacttttattatctctttaattttttaatttgtatttatttatttctgagatggagtctcactctgtcgtccaggctggagtgcagtggcaccatctcggctcactgcagcctccgcctcccaggttcaagtgattctcctgcctcagccccctcgagtagctgggatcacaggtgcccaccaccacgtctggttaaattttgtttttgttcttgttgctgttttgagatggagtctcactctgttgccaggctggagtgcagtagcacgatctcggatcactgcaagctccgcctcccagatttaaacaattcttctgcctcagcctcctgagtagctgggactacagatgcctgccaccacgcccggctaattttttttttttttgtatttttagtagagacgggtttcaccatgttagccaggatggtctcaatctcttgaccttgtgatctgcctgcctcggcctcccaaagtg

SEQ ID NO: 586670 - DNA, 4001 bp, Homo sapiens
ggaaaacattttcttgtatggcaatttacatttaagaaaccttgcccagtacttctttttatcttgtttattttaaaacaagttttttagagaataatttaacagtgcggtacatctccgtaaaagcatttcttagtagttgatcatgattaagcggcaaaatgcaggtaatgacatgctcaattccacctttgagtcaggacaaacagtgtacatcgacgacaacaacaaacccttatgctaatatgcctgtgacgcaaatatccatacataccgcacacgaattgtgcagtgagctaaaaaagaaaacagaaaagaaaaaagctactactttattctacttaaagttgtcctctattcaaacttttatctcactcttctctccttctgcaccataattttctttcgagcaaagacagggagttctggatgattccaatctccccaaatccacatcacagcctccaattgaggttcatttaagtcaggttggagctgagggagcctgggctggaaccggccagggtttcatccagctcctcccccaaaacacgccccccaaatcggagccagaggagagcccaaccacagaggacttccactcaatgagggcaacccctgagtaaagtccatgcggacaaccattcatctcctccgacaaccattcatctcctccgacccccgcccagcactagactgcgctcctagcaccgcgccttcttccggagcctcctcccccgggctggctaggggtgagcgcaggggttagtcagtacgcacgtgacgcgcgatgcccacatgacacgaccgtgagcgggggagggggacacggagtgaagaaggggaaaagttacagaagacccgtcaaagcgcccaaagcaatttgtcccttcttttcttcgccagcggtggctcacggatccctaagggacagctggggacccaggcgcccccagcccagccccagaaacgctggacgcagttctccgctcaccccaccaccttctcttcccagacccgctggtgatgccgctgcaccctgaagttgctccttccttctttccctcccttcctcccattctttctttcttttcttccttcctcccttccccaaaagctcttcatccgcttcgggtgatgccactgacgcacattcaatttgccccagcagctctgaggaggtcagaccaggccgagcaccttccaaaggggagggtctaactgagcaaacaaagttgcacgccacaccacaacctgcccctcccctccctttagcccccaagtcgaatccccggcgaaactcacttgcactgcgggtgctctctggcccccaccccatcatcgcgcaacacacccccttcaacatgcgcggccaccctttcattgccctgcgccccgagcggtcccaccgcccggcaaaacactgagcaagccgctgctctcaccttgcttgacacacttgagccggagggggtccttgcagtgtttgatcacggccagcacgtccctgatggtgagccccgccacgggggtctcgttcacctccagcagcagctcctccgacaccaatttgctgccgctctcataggccaccttgccgggcttcacctcccccaggtaggggaactgtccattctcggcgccccccttcagttcaaagcccagctggccctccgggttcctgccaatgacactctcatggactttgctagtccagtggcttttctttttcaagcttttggacatggcagtggggcgagtcgcctcagttcctgggctccttggggttaggggggctggtggtgagagaatgaggatggaggagcaagggggcccagggggaagaacagcagactttgccttcgcccccctctattcggtgctttccctcttctttggatggagtgtggacgaggaatggggaggatgagagggacggctgggcagaggtaggagagcttggatgaggttgtgctgtcccttgaatgacactcaaggctgtggccccgcagcagaggaagcagtggtggtggcgtcggcggcggcggcggcggcagccggagcgagcagtagccgagctggtgagcgggtgtggtgggggtggggaaggagggtagggatgccgggggccactcctgcgtggtgcgagtgggaacgcgcgcgcgcgcctgggtgtgtgttgttagctgatatccatggcagctgcagtggcagggtgcgtgtgcgtgtgtgtgtgtgtgtgtgtgtgtactagttctactgtactggcagacgggaggaggcaggggaggaggggcgcgcgcgccgggtggggagccacggagggcttcgccgctgcctccctccctccctccgcagcttgacccggtagtgaaggcagagagagaggcaggctgggtccgcctggcagcctacgggaggaggcgggagccgggaaggaggggagcctaggcccggcgtggggaggccggcaggaagggcctcgagcccagtgcggacctttcttcagcctctgtgcgaccgagccgcgcgccaggctcctgtgcgaggaggacgcgctgactccctccgacctgggctccgatggagcagaaatagcgggacctggacttgtggcgcgcctggtgccacatctcgggctctgcgagcgtcctggcgcgggatcctgccgtgagaaggagttggggcgggggacccggcggggcattgcgggagaaggcctgggatccctgggagccttgtagcgtgggggagttcactgtgtagagaggtttcatgtcttcatctatatagtcacttatttgtcttaaagttctcgaaattccctcttagagaaggagaaagttagagaactggaggctgcgtaccctgattacgcagaagggaagcagcctcgcattccccggggcaggcccccgcccgcgcgtcccgccagtaggggaatttagcggacggctgcggttgtctggtgaaaggctatccaaggataaggggcttcacttttcccaagtaggggaaagagaaggggtctacagggctaggggtggagggagcggatgcagtgagcagcctccgcagagaaattgacaatttaaccagggacctgcggcagagacaaggcggagacactcccttgcccaggaaagccgccagagtccggcttgtacctggggaagaatccttaagacggtctggcccaacactcctttgctcacagagaaaggggagaagactcccgagggtgaaaatggtacattcggagctggaactcagctcgctgaccccaagcagtgttcccttcttttcgccaggtttgcatccaagagaggggaggacaggggcaaaaggatgcagggaggctgctgatttccactgaagagctaatttcctgtgagacattaacagtgatttaagaaaaagattcctgtaactggtaaatgaatttcatttgcttaacttttagatgatatgtttcaggcaaaaaaaaagttgtgcacccacttatctctttaaagcggaggatgaaaagcattgaataggtaggattcttaatgtctgagatgaaggcgatgtaggaggcaaacaatacggttaaaaatgttgagtcgacccaaacagaaagaccaggtttcaatccagactctgcggcttactgagaatatgatcttgagtaaactgcttgaccttcctgagcctcagctttcttagttgttaaatggactttaacaatactaatctgttaggactgtggtgaggatgaaatcagggaaatcagtcacagcagtgctctcctggcacaggtgagtaggagttcgaaatgataattccctcctctttccctcttaggtataacttactacttggggatgagggggatcaaatgtagtcagaactggaagagatcttaaaaaaagatgatttgtttaaccttgtgtctttttttcacttgagaaaacagatcctccgtaagttggctgcactagttgaagcttattcagtga

SEQ ID NO: 586671 - DNA, 4001 bp, Homo sapiens
gccattgcactccagcctgggcaacaagagcaaaactccatctcaattagaaaaaaaaaaaaaatcttccttgcggtcacaagagaaaagattttgatatatcctaactcaatagggctggatatttgctcccatatgtttcactatcaaagaacataaaatgaattcatgcaaattctgaaaatttgggcttcttctgtaactttgtatgatgggtttaccctctaagtgttgctccttggcctgatgcactgtcactattccactcagttaatggtccaaaagagaaaagaaagcatcctaccattttcacaacgtagaaggccatggcatgtaagtgtcgggtagaagttccactaacaatcacaaagtaatctgtatatctcatttctggaggaacctggatcacacaaatgtctcttgcattttcttgcctcagaagtgaaaccatcatatcgatgtcaaacttgggaccagtatgatctgaaatgcacaaatagttgtttgtatcaggatggccaagcagatagacgtgtatgcacccagagatgccggcagctgactgttcctccatgagggtgtttagatccaaagtgtttttacagatagcagggtaaaggcctcctggaaggtgaacctgggcagtagtatcatagcaccgctcaacttttatggtcagggtgctcagattacgcagagccactatacatccttcgctattaaccatatgcaagtagaaccagacaccagtgacaaatgactttctactaatacttaaaaggagcaatacaccacaatcacagaaatgctgtgcaaagaaaaacagcaccacaaaatgggtaggaggtgatatcctggagcatattaaattgaatctcagtcataacgggtcacagaattgtgagctggaagggctcttaggcagtatctggtccacaaccttcagttgagagatgaagaaactgaggcctaggagaattactgtggcctaagatcagtcactgaaagagctacatttttgagtaattattattttgaaccttccagttttcatataaaaccaccgggttattaacaactgttacctatgaaaatctaattttttttcccgtaaagatttagatattctgatcttcagcttggagtattacaggctgtaaatttaaaagctcgcccaagttctaaagccgactccaaaggacctagtagctaagcccactaaggcctctccctctcatactctacattcttagatgtgatctgtttaccattcttaagtttctaaaaacgtcagcaataactagaggatattaacttggacccatctcctactggcgcttcctacgcaccccttcgcacccagaccctggctcctcagaatcctcaagccccaacagtccccacaaacccatttcccaggatcctaggaagagggtaaaaggaagtgaggacggtgagactgtgatgccaagggtgggagatggccgtccgggaggctgggattctgcagttcatctcttgccctcaatttcttcactgtgaaacgggaaggttggcgccaacaacctttgaagtcccttccagctctggatgtgcaggagttttgtgactccaagagaaatgcacatagaggggaacccagagccaccttggctgggacctgactccagactgcccggagagggtcgccttcgttcttctccacgcccgtacctgccgcgtccgattctgggcgtccctcgttgaccgtcccctccgcccgctcctccagcccaggctcgctgtgcaggccgcggacaaagtttggggtctggcaagcccggcagaacgctgctcctacgggaagccgctgcacggccagcagccgaagcccgggctcggctccaaccgcggaccccgccaccgaggaaaccgccctgcgccacattagtggggcgagcagccgcgccacacggccgcccggccccatagcagcagccttgcgtcggcgtcgcgggtgggtggtacttcatggagcccggccgggaaattctacgtcgatgcgtgggcggagtcaaggcctgaaggacggaccatgggcggagtctggagcccgtgaagactgcagtgacccggaagagctacttggggattagggcgtgcgggaataaagaactagtgttgcttgcccaccttgctttgctttgtgtcgcagtagcgcattacgttgtcactttttttttggactctgtccactaatgtgaggctcatgaaggcaataatttttgtttcatttttaactcttctctccacagcacctaaaacagttcctggtactgaatgtccagaagttgctgttaatctgattaggctgggattaggacatataatctaccctctctcattaccagaaaatattcaagattcccttgcaaatttgaaattgcgcgaggaaaatctgttatcctgggctagagtggggtgggaggcagaggtgtaaaggaccatttggaaaccgttcttaggtcagcccatcatctacactccctgtatggaggagtttacgcccaggggcggtactgtggggaccagctctgtaagaataaggaattctgaggtgccagctgcggtattaagtcacaggacttgagaactgcgatagattcctggcacgggtgggggggtggggggttttgggggcgtgggacgccgcagggaagcaacttgcccaggtcatacacttactgactgcgtcagaatcagaagccagtttctggcttctgaactccaggcctgctaactgctgaaaggaaggcttcatagagagcaaatatttcaaatgcctgaaacagtgccagacacatagcaggcactccaaaaatgtttgctacattattttaaataattccaagcactaattttgggaagttttttaaaaatagagaaattaagcatttgtgtatatcacaccagatatgtacaaccacttcaagttatttttgaaaagaagaaaaacattacagattaagtttcctctgtccaattttagccccatcctcaattccatttttccacaggcatgaacttggcttttctcccagcttctggcatccattccgtgttcccacccttctctgaacatcccagacctgctttaccacctgtatttgccagctcatttaatgggtcattatcccttcaaaactcccaaaccctagacttcattcagtccaggatcttcatacaacaaacgaatctgttgtcaaaatcctgcttatgtgacctccaaaatgtttctgtgagttcagcttcttgtcttcatttccactgtttcttccttagtccacaccctcattagttcttgcctaattacagagactgcctcctacctggctttcctgtctccagtctgtttctactcttttcatcctccatgctgcccttctatcaactacaatcattttcgctttatctgctttttgctgtttttcaaactcaccatacccttttttatttttattttttaaagagatggggtcttactcttgtcacccagactggagtacagtcacacaatcatagctaactacatcctcaaactcctgggctcaagcggtgctcctgccttagcctcccaattagctaggactacaggcatgtggaaccatggccagctaatttttgtttttaatttttttaaagacaggatctcactatgttgcccaggctggtttcaaactcctggccttaagcaatctaccccactgtagctgtgagtataggcataagccaccatgcctggcaacctcaccatatcctttcaatgccaagctttgcatatactttttttttgagatggagtctcgctctgtcacccagactggagtgcagtggcaccatctcggttcaccacaacctttgcctccagggttcaagcaattctcctgcctcggcctcccaaatagctgggattacaggcacgtgccaccacccccagctaatttttgtatttttagtagaga

SEQ ID NO: 586672 - DNA, 4001 bp, Homo sapiens
agcctgtgtgacaaaaaaatatgaacaaatacataagtcaggtgactaaggggtcatctttatgccctgtaccttctctcagcaacctccatcctataagaaaggggcaattggccaaagtatgcctctgctgtagttgtagattaccatgtttgcacgattatcattgtcaatgcttcacatttacactagggcactatgattttcaatgcagtttccatttttattttggaggcccctcccacgaaccttctcccattttactgaggcccagggagaatgcacagggagctgagcccctcctttgatcttagtttggtggcagagacaggcagtgatactgacgatgtgatggcagtgtcaggtgcactctgtcttcactagaaaactggcctcctggaagggctggaagctcccacccttgactgctctgactctgtctccagcagctcttcgctgttagggcttccctgacaagagtgcagtccctctcgaggctgattagtgcagggcgggctcctcgtctccgaccaccggctcctgctggctgttccctccaccctccgtctcgggctgcgaggcttcccttaacactcgaaaggggggcccgtgaccaggtacgaccacgtcggcaacgaccaggaccctcttccggctccgctcctgggctgcggggtcttcactcagtgcctgccacgaatcctcgtccccatctcgctcaaacacatctcccgccaccaccacggtgcccagagccgtgccggccaccaccacgctcacgtcgcgctggcccccgtggcccggcgtggcccacacctcgagccccgggcccaggcgcaggggctgcccctcacccagcccgtggggcaggtagcggcctccgggaaggcagaagtcgtgcgagaccagcagagccgcgcctgggaacagccccaagttcccgatgtgatccgagtgcccgtgggtccccaccactagcgtcacgtctcccggggccacgccctgccccgccagcgcccccagcagcgcctcccgagcccaggggcccccggtgtccaccaggatggggccacgggccgcctcctccagggcggcctctgcgccgccactcccgcgcggggactctcggtggctggaggccgggccccgggtctggggtaggaccagggtcacggagccgtcggcgcgcacggcatcgcccacaccctctggctccgcgtagccctgcagcagaaccaccacagagtaggggtcgccgggcaccagcagaggggatgccccgcacagcggctcggtccgcatgaggctgctcctggcagggagggacgggctggggagaaaggaaatggagcagtgggcgaccgtcctgtccctccgcgatcccccacccgcgctcggccccgccactgcccctaagcctcggttctctgccacccgcctcccattaagttggtatcaccctcaacccctgcccaaaatggtatcgcccagactcccttcacacttgggcccgcccctccctcggcgtcctcggcccccgccccattccgttcgcggtacgtacgtccttgcccgtcaccctccaaaggctatcctttatgtttccctccatcgaatcctagccgcgctctaccttgggcctctgctaggtcttgcctcactcgaagaaagcgcagaaatcgaaaacgcgggtgagagtttgtcctctgcggttcccgtgtacccagatatggcggccgaagcggcgccgcggaggtagctgtagttccggcgccttcaccgtgtgcccgaggaggctgcctggctgggctccagcctcctggcggttctccgctccgcaaccccagcaacttctttgcactgcagaattttgaagcgccattagctttgaggagggttcatgctcagttgcccaggcaggagtgcagtggcgcgatcatacctcactgcagcctcaacctcctgggctcatgtgatcctcccgcctcagcgtcccgagtatctgggaccacagatgcgcaccaccaagcccagctaaggtttctattttttctttctctttttttttggagacacggtctagttctgttgccaggactggtctggaactcctgggctccagcgatcctccagtcttggtctcctgaagtgctaggattacaggtgtgagccaccgcgcctggtctttttttcttttgagacagtctcgccctgtcgcccaggctagagtgcaggggcaccatcatagctcgccccagtcttgaacccctggttctagcgatcctcctgcttcagcctcctggagtgctgggaatacaggcgtgcacgcccctctaaattttttttggttttttttgagacggagtcttgttctgtcgcccaggctagagtgcagtggcgtgatctcagctcactgcaacctccgcctcctgggttcaagcgattctcctgtctcagcctcccgagtaactgggattacaggcgcccaccaccatgcgtggcttttttttttgagacggagtctcgctctatcacccaggctggagtgcagtggcacgatcttggctcactgccagctccgcctcccgggttcccgccattcttctgcctcagcctcccgagtagctgggactgcaggcgcctgccaccacacccggctaattttttgtatttttagtagagacgggctttcaccgtattagccaggatggtctcgatctcctaatcttgttatccacccgccttggcctcccaaagtgctgggattacaggcgtgagtcaccgcgcccagccgcccggctaatttttgtatttttggtagagacgaggtttctccatgttggccaggctgctctcgaactcctacactcaggtgatccgcctgcctcggcctcccaaagtgctaggattacaggtgtgagtcactgcgcccagcctccaggctggtcttgaccttttggactcaagtgatcctcccatctccacctctgcagtaactgggactacaggcgctgcaccaccagccctgcagtcttctttgtgtgtgtgtgtgtgtgtagaattggggtttcactatgttgctcaggctggagcttgagcttaacaagacagcggccattctgggtgctgcctcatcgaccagctagctatgtgtgcccggctgttgtttgaaactttgggcccagctagtttttagaaaaaaagaaaaaagtttaatagcgatatagaaaattgagcacctataaaactatatggtgggctctgggttacattgagcttaagtagaccaagtatctatcccacctaaattatcagcaactccaggccatgacccagtgtcccattctccttcacggtttgctggtgtgtagcctcctggatacaggcaatgtatatagatcgcagagaatgtccgttctggcctcttccttggaagggtctaaaaacagaccttaaggagctaagtgacttccccaaagcccacagctccagtgccactgctgacttttgggtgggggtgggatcagttaaagaggaaagctttcagtactgtcagcacatacacctgccaattaaggggctggatagagttcatctctaggagcaggacctccacccccaccctccaccccagaagccatgtcatgctgtttcaccaggatcttgcctgaggttagatgggagagaacagctacaagcttgggtggagtcactcataaacacaccctgaaagctgtggagcagggagagtgcaggctttagagggctctccatgatcccttcccctcctgggggctcaaaggcaagggtcaaagatcttctcggtcaagtttggggtggcttcctgtcttggtcatcttgtctcccccttcctcttcctcctcttcctcctcctcctcctgctcttcctccccttctgttttctcttccccatctgtgatctcctttccagtccaagtttcctgtagacatgctagatcggatgacagaaaacaatttag

SEQ ID NO: 586673 - DNA, 4001 bp, Homo sapiens
aacaagccaagctgctgcttatggctccttaagcaccccgctccccattccctttacccaatcttagacttaccaactggttcccatacttgaactgcttcttcccgagttcatcatcctggtagaactcttgtaagaacttcttaaccttttctgtaacatgaaatgtaaaaccgtaagacacaaactttaagacaaatcttagatacccattttcgcttaaaacacgacctatgaactaattaataatatgagcatttaaataaacctaccgaagtctccccaaagtgggcataactctttttcacaagtctgtttctaaccagcgaagaataaagagcccgtggcagtgcacagggccatccaacatctccccaggggaattccggtccctactttagtttaaaattctagcgcccttccccgttggcccctcacactccggtctcaaggttctcagctttctttccacccctatgatcccccgccttctttgggtccccttagcccctgatttcaccgggacctccgccaccgcaccccgccaccgcaccccacccccgctcccgccatcgcttccgctcttagtaaacaaagaagcacatgggcccggattccagccgcttcacagctcgggattcctccgcccagggcgggagccagtccagccattggccatcacacccagagacaccgcgatcccagcccactgccgcctttcccgggcccgagcgaagctccggatcccaggcacgcccccccgggccgcagctctctccgcggccgccgcgcggaaggacactgtttacacgacactccctccagcctcctcgcgccacttccgcccggctccacttccgctcggagggcggcctcaaacggccaatcccggcgcgcagcggccccggcctgcccgcccccggggcctacgcgcgcctggggagggcgcgggaacctgggaatgcccaaaagcgcgaaggaaagcgggcacgggagcccagagcccttaagactctcctgaggtcctgggcgcgacttttccctgtgcagcccccagccgggttagcgcgcccccaagcccccaaccccacgaccctaacacctttaccaggtgggattactagcttttcttcaacatcgatggccccccgcacgcttcccaggccccgtgggccttagccaggccgcagctcgaccctgcctctggcctcgcgcaccccagaacccgccgaccccggtcccccaagaccccagctcacaccaacaggtgttccccgggaggctccccgcgcaggacgccctcccgggctcgtagacccgtacccttctctagcgcgtagtccttcagtgccatcgctgccgagggccgtgcggccgcgcttggcgggctcagaggtcttgctcctggggaagctgagaatctccgcgcggtggactgtggccggccaaccgaaattggcgcgaaacgtcgccccccacgtgaccggcgccactgcgtgcgggccaatcggacaaggcggccttcttcacctcccgctagccgcaagccaatcaccgtgcgggcctagaatgagtgacggggaggcggtgcgggcgtcggaagggaatctccgggcggggtagtgcaggcgccgggtttcccgcggtccgagctggcgcgggcggaggagaatcgctcttaaagggccagcgcacacgcgttcttttgttccggggccgcagggcggggcaggcccgactttcgccgtcttcttgtctactctccagaacggccatgatttcccaattcttcattctgtcctccaagggggacccgctcatctacaaagactgtatcctagacccttggggctgggaaggggcggaggggccgggcgggaggggcgcccagggccagcctgtgtcgcaggatccttcactgagtccttccacccgccagtccgcggggacagtggcggccgggatgtggccgagctcttctaccggaagctgacgggactgccaggagacgagtccccggttgtcatggtaaccagtggcgggaggcgggtgaggagcggggtcccgtcgggccgggtgggcgccagctccctcccaggactggttcattggtagattccacttggggggtgcattccgccaaataaagctaacgtgaggcccggcgcggtggctcacgcctgtaatcccagcactttgggagaccgaggcgggcggatcacctgaggtcaggagttcgaaatcagcctggccaacatggtgaaactccgcctctactaaaaatacaaaaaaaaaaaaaacatagctgggcgtggtggcgggcgcctgtaatcccatctactcgggaagctgaggcttgagaatcgcttgaatccaagaggcagaggttgcagtgagccgagatccggacaccgcactccagcctgggagacagagcgagactccctctcggggtaggtgggggtggggaaaaaaaaaaaaagagtcaatgggcgccagcaacacaccaggcccagctccctgcgtgactccatcctcagcaactcggggtagttagtgtaattaaccccctttccacattgggaagctgggcccaggcatatgtcatgtatctcccaaaggcactgctgttgtgactagtaagaggcatcgggatccgagctcaggtctcctgggttctgatcactccacctccctttttttaacgcctctcttctccctgcctgtgtctcagcatcaccatggccgtcatttcattcacatcagacacagcggcctctatttggtggtcacaacttcagaaaacgtttctcccttcagcctcctagaactgctctccaggtgaggagggttgggctgggcacctggtagctaggaggggtctgagaggaggagaaaatacacgctccaagtgtttcctcaggttggccacccttctgggcgattactgtggctccctgggcgaggggaccatctcccgcaatgtggctctggtatacgaactcctggatgaagtgctggtgagaatcaacaatccccttctgtggcccctacccaattcccctgaagatacatctgctcttctactgtgggatgccgtggttaggaggccaagtctacctttttttttttttttttttttgcttttagagacagggtcttgctctgttgcccaggctggactgcagtggtgcagttatagctcactgcagcctggaactcctgggctcaagccgtcctcctgccccagcctcccctgtgcctagctaattgtttattttttgtagagactagagtctcactgtgttgcccaggctggtcttgaactcatggcctcaagccattctcctacgtctcggccttccaaagcgctgagagtacaggagtgagtcaccatgcctggccccactccccctctttaccccttccctccactgatcactcagactgtccttcctttaccactaggactatggctatgtacagaccacatccacggagatgctgaggaatttcatccagacggaagctgtggtcagcaagcccttcagcctctttgacctcagcagcgttggcttggtcagtagagggaaagaggagggtgaggaaagagaagaggggttggctggggttgtcagacctgatgattgattgctttggatgctttacagtttggggctgagacacaacagagcaaagtggcccccagcagtgcagccagccgccccgtcctgtccagtcgctctgaccaggtgagggaaggatccatggggtcagacgctctggttttgctctgggatccgggagtccaagatcttaggtcgggcacagcggctcacgcctgtagtcccagcactttgggaggccgaggtgggcagatcacctgatgccaggagtttcagagcagcctggccaacatggtgaaaacctgtctctactaaaaatgcaaaaaaaaaaaaaaaaaaagaaaaagatcttggcacatctcccacccccccaga

SEQ ID NO: 586674 - DNA, 4001 bp, Homo sapiens
ttgaatcacattttctcttcatggcagacatcttgtaagtgtcaagaaccctctgaacttactctgggtcaacaacaaacacccagaaaataggtagaaagaccactacatacccaagaatgaaaggcgaacacacaggcaacttttacaaccaaataaaacaataggcatcacaggatcaaattaatctctacaaaacaactaatgggtaagtgctttcctgcttcttgctccacacgtaccggctggtaggtctctgccccacactggtcacaagtgtaagtggccaccaccatcttgggtttgacttcagagacacgagtgacgattccacgcacagttaccaacttccccacagagtcagcccgcacttcccggatcacacgaggcttgttgctgctagggccttgaaaatacagctcactaaggggagaaaacagtcacaaacaagatcctggagaaccaatccctacatctttcccgacagagaccactcacaatctgcgcatgagttcagcagggtactggttctgggggcttcggaccatcccagggtcccgactccgctgctccatcattagccgatgctcaatgtaaacgtccaggacatctttatttaccacctaaaggagaagaacaaaaaaaaaaaaaaaaaagagcaacaggatggggaaaggagagcacagagaacaccaggcagaagtgcccctcctttctgcctgctcagaaaacatcagtatctgagcagcctctctacagaagcttaaacgcctcgccctttgtttgccattgttctctaaccactcacttccctctccttgtactgaggcagcagctcttgtacggcatcagcaaagagcttcgcgtagcgcctggcattctcacaaattgagtccaccaactcggggtcatcctcggctacgtcgtccaggtccacatacagagccacctgttcccgatgagccagccgaacctcaagtggggaagagacagaaacacctcagagccacattcactttgctcaccagtgttcatatgtgaaaatgcatcactgagaactcagcacaggctctgggcatccacaggggagaacgcagcgccacacagagcgatactcgcttttcagccctcaaaccctctaattgttatgtctttaataaaacaagccaagctgctgcttatggctccttaagcaccccgctccccattccctttacccaatcttagacttaccaactggttcccatacttgaactgcttcttcccgagttcatcatcctggtagaactcttgtaagaacttcttaaccttttctgtaacatgaaatgtaaaaccgtaagacacaaactttaagacaaatcttagatacccattttcgcttaaaacacgacctatgaactaattaataatatgagcatttaaataaacctaccgaagtctccccaaagtgggcataactctttttcacaagtctgtttctaaccagcgaagaataaagagcccgtggcagtgcacagggccatccaacatctccccaggggaattccggtccctactttagtttaaaattctagcgcccttccccgttggcccctcacactccggtctcaaggttctcagctttctttccacccctatgatcccccgccttctttgggtccccttagcccctgatttcaccgggacctccgccaccgcaccccgccaccgcaccccacccccgctcccgccatcgcttccgctcttagtaaacaaagaagcacatgggcccggattccagccgcttcacagctcgggattcctccgcccagggcgggagccagtccagccattggccatcacacccagagacaccgcgatcccagcccactgccgcctttcccgggcccgagcgaagctccggatcccaggcacgcccccccgggccgcagctctctccgcggccgccgcgcggaaggacactgtttacacgacactccctccagcctcctcgcgccacttccgcccggctccacttccgctcggagggcggcctcaaacggccaatcccggcgcgcagcggccccggcctgcccgcccccggggcctacgcgcgcctggggagggcgcgggaacctgggaatgcccaaaagcgcgaaggaaagcgggcacgggagcccagagcccttaagactctcctgaggtcctgggcgcgacttttccctgtgcagcccccagccgggttagcgcgcccccaagcccccaaccccacgaccctaacacctttaccaggtgggattactagcttttcttcaacatcgatggccccccgcacgcttcccaggccccgtgggccttagccaggccgcagctcgaccctgcctctggcctcgcgcaccccagaacccgccgaccccggtcccccaagaccccagctcacaccaacaggtgttccccgggaggctccccgcgcaggacgccctcccgggctcgtagacccgtacccttctctagcgcgtagtccttcagtgccatcgctgccgagggccgtgcggccgcgcttggcgggctcagaggtcttgctcctggggaagctgagaatctccgcgcggtggactgtggccggccaaccgaaattggcgcgaaacgtcgccccccacgtgaccggcgccactgcgtgcgggccaatcggacaaggcggccttcttcacctcccgctagccgcaagccaatcaccgtgcgggcctagaatgagtgacggggaggcggtgcgggcgtcggaagggaatctccgggcggggtagtgcaggcgccgggtttcccgcggtccgagctggcgcgggcggaggagaatcgctcttaaagggccagcgcacacgcgttcttttgttccggggccgcagggcggggcaggcccgactttcgccgtcttcttgtctactctccagaacggccatgatttcccaattcttcattctgtcctccaagggggacccgctcatctacaaagactgtatcctagacccttggggctgggaaggggcggaggggccgggcgggaggggcgcccagggccagcctgtgtcgcaggatccttcactgagtccttccacccgccagtccgcggggacagtggcggccgggatgtggccgagctcttctaccggaagctgacgggactgccaggagacgagtccccggttgtcatggtaaccagtggcgggaggcgggtgaggagcggggtcccgtcgggccgggtgggcgccagctccctcccaggactggttcattggtagattccacttggggggtgcattccgccaaataaagctaacgtgaggcccggcgcggtggctcacgcctgtaatcccagcactttgggagaccgaggcgggcggatcacctgaggtcaggagttcgaaatcagcctggccaacatggtgaaactccgcctctactaaaaatacaaaaaaaaaaaaaacatagctgggcgtggtggcgggcgcctgtaatcccatctactcgggaagctgaggcttgagaatcgcttgaatccaagaggcagaggttgcagtgagccgagatccggacaccgcactccagcctgggagacagagcgagactccctctcggggtaggtgggggtggggaaaaaaaaaaaaagagtcaatgggcgccagcaacacaccaggcccagctccctgcgtgactccatcctcagcaactcggggtagttagtgtaattaaccccctttccacattgggaagctgggcccaggcatatgtcatgtatctcccaaaggcactgctgttgtgactagtaagaggcatcgggatccgagctcaggtctcctgggttctgatcactccacctccctttttttaacgcctctcttctccctgcctgtgtctcagcatcaccatggccgtcatttcattcacatcagacacagcggcctctatttggtggtcacaacttcagaaaacgtttctcccttcagcctcctagaactgctctccag

SEQ ID NO: 586675 - DNA, 4001 bp, Homo sapiens
atttagaggcaaaaaataatgataaatgtaattcagtttaacagccctgggtgccagaacattttaatttaaccaagatgttttctgcttttacctattgcagcttgaaagttaactccttctccaatttttgctgccttaaaaaaaatccctaagattcactacattagtacaagtgggaaataaagctatcagtttatgcctaaaatcaggggtatatgctaggtttttgagcactggaaaaattacttagttctgatatatcagtgacagaattctttagctcaaaaccatccttagagtaaaatgcattagaagtttaagaaccttcctctctgtcaccaatggaaacctaaagtatattgccttcaagagaagaaaggttcaactcgtttagaagcttgttatggaagtttcccagacacaagagtattttataggctgtgtgtgtttacactttggaagaacacaaagaagctaattcattcttggaaagtgtttcttataaaccttgtttatttatttcaaaacaaaccagttattgaaaacaagcataagccattccaaagctactggtcacagaaacctgaattatcaaccgggtggtagaggagccaacaagaaacagaaagatgaaatggagtaagtgcacgcttgttcagagagctgcggcagtcctggatctgctgaagagacctagaggagaagcgcttcagaacctacacattgagtcttaggcccaaacatgcatatgcttaagaaagaagcaatcctgtcatcctgtttcttcgcaaccaaaggaagggggagtggagggaccaacggttcccgccctcttacccggttgttgatctagggcaaggatcctgaagaacttgcctgagtaacgcgaactgtgcaaaagttctcaactacgagtgggagcccctcctcacagcactccccccacccctatctgtgcacttgtgagcaaactgaaaaatgcaacaatgacaaagaagcttgccacttgcaagcgcgcactcaccctgggctgtggagcccagctggccgccgcccgcctcggccacgcgctgcggccccacgggcccgggagcgagggcttcgcccgcgccggacatgggccgctccgccgagcccgcgccgcgccgctgccgcctagctcgccgcccggcagggcgcacggaggaagggctgtgaggtgctgggtgcagggaactgactgcttctggcggaaaaatatacaaaattaaaaaaaaaaatgtttttagagaagagcacaccacccctgcgggacgttccctccccctccacttccctccctcaaactccaccccggggaagttttgatttgaaacttgcgaagaaaactgttacagcgcaagttgacagcggcggggtcccaggggtccgaggtggacccagcggggaggggctggaaagagagatcgggtttgggagaaccccggggatggggatcaaacccctcctcttccccgcccggagaccactacctacctccgcatccccccgtagtcgctccaagccccttcctcctcctcctcctcctcttccgccccggaaagttagcgagcctccggcagcggccgcattttcgccccggtggcctgacgacggcggcggccgcccctgcgcgtcctcccgcctccctccggctcagcccagacgccgcagtggcggcaactgcggcagcggtggcggctctgactccgcgcactccgccccctctttccagccagctcactccagccggctcccctgcgagggggccttccccctctctgcctctctttcccctcttccactcctacaatcctgaaacacttctccctctgttgctctttttcatcacatccggatcgggaaggcctcgaactcttggctagcggccccgatgctgggagcggcgcgacccgggctcggccgcgcgatccctcgcgccctgcgctgtctgggtcaggaggccagagccggcctgggctggctcgggctccccacccgggcgctgcgccctcccggggctgggaaaggggagtgaatgggcaggtccctggctgcccagacgttccccccaccccgcccaaaaagtcacctcatcccttctccctactcctgcccccagaccgacggaggctttgggaatatcctgacgaaaacctttagggtggacaaggaaaaacgaaaacactgttacagtatcgaactttcctggtgggatagagaacgtgtgcgtttgaaaccttgacccctcggttgaacgtttactcacttcatctctggctcctaaattactctttggtcaaacagtattcctgatgtaaaaccagttgcagtttgcgcgaatctgctggaggcatccaggcaaacaaggttggcacccttgcggatgccgtggtactggccccagcctggcctatggcaagctaaatgcctcactggatcagtggtatctgaggggagataaacttgtggtcggaagtaaaaagctgatcaactttccgtttataaatgagacattctgattgtagcttaatctgatgagccgaggatagcaagtgtaaagtaatttacagatatatagtactttagtggtatactcagataacttttgctcttttatttcattgtgaatgaaatgcagaattcatttgtagaaagctagaacgaactcattcttcgattcttttggacaagcgaggaatcacagtaacgttatcaaaactgaagaaaatgtgcattggattcactgtctttctatgtgcatcattaataatatcccagaaatttcattttttcaaaaagctcattggaatttattccaattgattacaaagatttacttgttacctatgaagagacagtgcattctaacttgatttcaatgatggtaaaaaagccagccttcggccgggagcggtggctcacgcctgtaatcccagcactttgggaggccgaggcaggtggatcacctgaggtcaagagttcgagaccagcctggccaacatggtgaaacccaatctctactaaaaatacaaatattagctgagcattgtggcgggcgccagtaattctagctactgggaggctgaagcaggagaatcgcttgaacacaggaggcaaaggttgcagtgagaagaaattgtgccattgcactccagcctgggcgacaagagcaagactccatttaaaaaaaaaaaaaaaaaaaaaaaaacagccttcaaagttgctgatgacagtcattcagaccattctccccaaaaagacaaatgacattttgccccattacacataactaacatttttttttcacttggagatttcagaaatggtatgaaatcaagtgcattacctctcttgaaaacttatctaggagcctggactgtttggaatttgtctgatggaagcagatcagttctgaagatgacttcatcaccactagagaacaaacatttaggacgtctcagagttcactgcagcatcatctgcactcaaaggagttgtttacctgctctggaaaattctgttttatccctgtatcattccttgccctatttttaaaattctctcacaaagatgttaaagtccaataatataaagaagttacagctttcttctagaaagtcataatcaatgataagtatttgttcatttaatttcacacagtccttaatattgcacacgtggtgggtgattccatagatattccttaaattaaattttaaaatctttaatggagaagacataaaattaaaataacattaggagcaaatgagaagctgtagggtagcatcaccaaggttgtcaaatactgtacctcattcagctgtgtgactttggacagttagtcacccactctataccttggttgcctcataatatgagaatgaaattcttcatagagtttctttttgagcactaagtaaggtagttttcctataaaatttggaagactctcaagggaaaaggtgttcaaaagtatc

SEQ ID NO: 586676 - DNA, 4001 bp, Homo sapiens
tctctactaaaaacacaaaaattagctgggcacggtggtgcgcgcctgtagtcccagctattcgggaggctgaggcaggagaatcgctccaacctgggaggtggaggctgcagtgaaccgagatcacgccactgcactccagcctgtcgacagggcgaggcactgcatcaaaaaaagtaaataaaattggtaccctcttccctaacacaagcaccctacaatccccatttttcttgcatgttcatcactattttaagatactttataatgagtggggcaataagtaaaatatctagtaatttccgtgagagcagggacttctgtgttttgttcaccgctgtatttccagtacctagctcaataaatatgtcggatatctgaaggtcctaccaaaactcaacctctccctggacacccctgtcctctctttggttggctgcccctcccccacacctcatccctcctgtcctgtttactcattccctaagaccttcatcgcctccacctgtcctaagtttactcattccctaagaccttcatcgcttccacctgtcctaagtttactcattcctgtcccatatcaagtgtcacttctcacttatcttggtatcccctgcagcacccagcatagttgttggcaagcacaggtacttaatgtacttatctgtatacagctgggcccccacttcaccgcagcgcaaaagcatttggtacattcaacttacaatggggttgcctgtgggaacccattgcaagttgaaaatacacaaagttaaactcgccttttgacttaggatattaccaacttgcgatgggtatgggaagtagccatcaatccaggagcatttgtatttatttttcaaatgaactggatgtacaggaaactcgagaacttcgatgataaatttggattcccctttaaaattacctccctcttgggcgtcgtaattaaaaggcaatgcgagcacctcctgggttctcaaaattaggtttaattagattcacctggtaaaaatgcggacccccccccccccccccgcagtcttaagcttcttcaatgaacccagacgtctgttttttattagctttctggtgattctgacacactgcagagtttaagaaccaccattctagaagatggctaaaaatagcctaggctcctaggcttaagtggtcgcgggccaagtcaagcactgttaagacacctggcggcaggctcagtccgcccacagcaggagagatcctccaaaaaggttaagaggaagccgtcttcaggtcagaagcgctgaattctaatcctctggccaaatgactgtaaccctggcccagttctctagcctcggtttgtccatactatggaattaggaagtatacgatttcttttattcacgcacaactcacacggatgctgcaaggagattagctacgtcaaagcaatggaacgctgcagaaaaaaacgtaagtttactttcagatgcagagccctggtttcccaaccttgaaggcgtgcaagccaagagcaggtcctctgggaaatctgggagacctgggggaaccctgacaaatggaccggccctggagcgggactacctcgcccccttttccccggctttctcccccgcacctccaggccagtgtcagggcctgccccgggcgccacagtctccagccagtgccgggcatccctgcggtccaggctggcctggagagggtcagagctgcccgcgaaccggggacgcacgtggcccgggccggggggcctccgcctgcaggccgcccctcgtctggcctacctgggccgaggtgctgaagctgcggcggagagcagcgctggcaggccgggcgagggcggagagcatggctggagcgggaggggcaccgactggcaggcacaggagctggtgacggggaagtgactccaacgacctccacactgcccagcgcctgctctctggggcctcgcgagagtgaccggacttccggtcgcgctcgcctccgggatctcgtgagatcacggccacttccgggagtcggaaaggaaagctgtgggaccatcctggcaaccccggtgtttggctgggttctagcgtagccgtctgtgtggccggtgggggacctgcggtcggagtgggagggccagtctgcacccaagaggtggaagaggacgggctttaggctggaagcgccttagaggagccatttttccaggtggggccccaggcagaggctccgacagggagcctggccatagtcgcgcagccggggaggtggagcgcgtcccagacccgagcccccgacctcagccaaacccattccttctgcccttggaggccagaggggactctgagctccggaaaggtagggtcagggaggctgagagtccttaggcggggtgggaggaaggggccatctcctcagatccgggccgtcgtttcccaagttgcagagacccttgggttcaggtttagtgacaccactgctgataatggcgacctccagccctgcaagctttagaggaccactattctgtgttccagatgagcaaataggttgtagggacaacaacttccgtggtcatacagttcctgtcttctctcgcctgcccggcagtgctctgacggtcccactgtttctgctttacgaataaagacactgtggctgaggccaagtggatttgtagagtttacgcagacagaaagtcgagtagaattccttgctcacaatgagtttattacttaaatgtatgaatttatttatttttttgagacggagtctctctagcccaggctggagtgcagtggcgcgatcttggctcactgcaacctctgcctgtcaggttcaagtggttctcctgcctcattctcctgagtagctgggattagcgcaccactacacctggctaattttttgtattttttttttagtagagacggggtttcaccacgttggtcaggctggtctcgaactcctgacctcgtgatccacccgcctcggcctcccaaagtgctgagattacaggcgtgagccaccgcgcccggcctgatacatatttttaaaattaaacaacacccccaggcaaggtggctcatgcctgtaatcccagcactctgggaggctgaggcgggccgatcacttgaggccaggagttcatgaccagcctggctaacatggtgaaaccccatctctactaaaaatacaaaaattagcccagcgtggtggtgtacacctgtagccccaactactccggaggctgaggcaggagaatcgcttgaacccgggaggtggagggaggttgcagtgagccgagataaccccactgtactccagcttgggcgacggagaaagactctgtctcaaaaaaaaaaaaaaaaaaagccgggtgtggtggcttatgcctgtaatcccagcactttgggaggtcaaggcgggcagatcacctgaggtcaggagtttgagaccagactggctaatgtggcgaaaccccatctctactaaatatacaaaaattggctgggcatggtggcgtgtgcctgtagtcccagctactcaggaggctgaggcaggagaatcccttgaacccaggaggtggaggttgctgtgagccaagattgtgccattgtactccatcctgggtgataagagctaaactccggctcaaaagcgcgcgcgcgcgcgcgcgcacacacacacacacacacacacacacacacacacacacacacacacacacacacacacacacacagcagataagctgagacatgctggaagagtaggtgtttctcaatggaacattcaactccagaggagggaaagatcccttgccttggaatcagaattctcaaaggaggggcactagggcctgagcatttaacaatgggaaatgtttagacaggaaaggaggagaaaaaaggccaaataaaatcctagcgggaaaaaataagcataggccagtattcaggggacagtgaatagatcatttattttggagtggggacatt

SEQ ID NO: 586677 - DNA, 4001 bp, Homo sapiens
acatatgggattaccttctaggactattattaacccaattccacagaggaagaaaaatatgcaaatattatattaaacaaatgacaccttccaaaagtatttaatccaggttgcactatacccacgaaagaaaactcacaagtctcttaattttaaagtatcttttaacaattttataaaaatacaggtaggtaagagctttgaaaacttgtctggaaactttgagtttctctggattgctacaatttattcggcacgttgtgccttcaagcaccagaggtcaggaaggttccccttttgcatggctgctcaaattatccccactgaaatcagcgcctcctgcgcgcacccttgcatacccctttagacacgtatctaactaacagtacccgagttgctgttgcttcgcagtatttgtctctactaatacccacttggtagagggatttattttccacttttgaaacttaggttctgtaattagcttacaccacatggacatgtactattaaggttcgtctttcttccagtgtgagcatctatttatttacaattctctgacacattccttaaaatctgaattcctagataatgtcttcttccccaataaagggaaaattttaccatttgaaatagggtgctatttaaagaacgctgaaataagaatgttaaaaaaaaaaaactgaaacttttttttctcatgcgctctgccaagttccattgcaagttccaaacattgtgcaataatttggaaatccagttaacgatgggaaaaatcgagccactcagagtcggcaacttgcaagagaaaagtcaagaagcggcacccgcacgcacgcctgcccaacggacgctgcatccctgggcgcacgcccctccctccccagcgctgggatggaaggtcacgcttcacaatcgatttcacagccacttgtccttttttatcaaccttctggtaaactagtttaggactttggagggcttagagctgctggctgtatacgcattgctctcgaataaacacgtgtccccaaatatcaggaccaaagcttcaccgccgaatttggccgcaggaagccacagagggcaacacattcccatcttccctgctgccaccctccagtgcgagaatctcccctagtatctctccgccccttttccagcccggcgcgcactctcgagggtgcctggcgcgcccttacctgagctgtcgcttttcctcttgccgccgcttcgcttctccgcctccgcaggtgacagtgcctggcggccgtagtcccccggcgcgcacgcggccccagtcggggtgctggagcccaagctggaagagttggagcacaggacgggcgggctgctccccaactctgggggccctccagagtcgggctggaggcagaggctgtgccgagccgcactcggtggggaagacatctgcgggaggtgccagttggtttgcagagcctggtgctgctgctgctgatggtggtgatggtggtggtggtggtggtggtggtggtgccccctgtgatgctggctggcaaacatgccctcttcgttggggtatcccgcgattatgcaagatgaggaagaagtagagagctcggggtaagacatatggtcagatcttccatggagggcgagagaggattgggagaacgggtgcaagccttgcgccgtggcgtgagggctgcgcaggcagccaaagagcgggtgttccatagcatgcaagtttcgggttccaggcagaagacttcacggcggttccaaaggccaccaccctctgtcactttttcactggaaaccgtgtgattttttttttaacctcccaaagcaatagcggtgcacttctgcagagctcggataatcccggtcctgagccccagcggccagtctcctttacatatgaacagtcggacctggaagagcttccctgagctactcagatgtcaagagtgggagaggttgaagccaaaagaaggtggtcccagagaactgctttcagggggaaatggctctgagaagttataaatagagtgtaacgtgagctgggggctggcttaggagcccagagttgaccacatgcaaactccctccaaaactcccgctcagcctgcgccacgcgctcccagttccacttcctatctcctgctggacggacgtagagcgtccacgcccgcccagcactgccggctgccaggactacaagcggcacgccaacgtctaagtcccgcccgggagggcagcagctctgccctccagactctggaggcctgggcgcggcgcacaccacccccaacctagcaccctgattcctacctactcactttcctctcggggaaacgtgacttgtcagtgtcatttgggaactgtcacctgcagaaaagctagggatacgcctatcctttcaggaacacgaaagaagtaatagggttaaaggaaaagaccagagctagtttggcgcaccctcgaagtttttcaaactttgcatcttcccgtgccccgggcgccgcagcgcgcctaggttttcgcagctggtttctgtcggtgggttgttaataggctgggacgccagatctgaggttgcggggatgagcaccatggcctggaaaaggcggttctcagtgcagaaagaagacggacctggttgggtgggtgggaggaaggcgtgagtctgaaagggttgcagatgcctgctccctggcatcctcacgtgcgatgccaggtggaggctcccttccccctctttcccggtcccgctcaatttcctagccacttgtccaccaagaagaacttttcctgggtcaagaatatttccaagcgattgtgtcccggtcatatgagatgtgtagattgcacgcgcatttctagcctttcccctcaggagctagcccagatctcctcggtttcctccagaaatccactctcttctgctcaaaaataaatccgctaatgcattccttaccaccagggttccatttactgagaattcttacatttcgatagctcccaaaattcactcaccgtgggcacttggttacaattttgcacccctgaaaataaaatagaaaactcgcctctagtaagcatgcgagagcgagggcagggctttgaagctgctacttgcttggcgggcgacagggtccgctgggggcagagtcgtttacacacaagtgagtggcgctgtaatgagcaggaggaacagtcatgtcccatctgcgacctgtcgcatcaggagaatatctgtagtcacctattctgcccggggccccaaatgcgccaccagcagtgtcgccccgttttttcattgtctcaggtgtccagaggatgatgaccaggtctttgaagttgttagtgggattaatgggtacagcaaactgggctagacatctggtttgaattaggaaaaagcattgattaatctttgagaggtgtccccaaagcagaacctttcccctcctcttccagtccccttgcttaagcctcactatcttcttttcttttaagtcacactgcagaatagtggcttcgcaataacatccgtgtgaaagatcgaattgttttctattgctcagaggtggggtggagtgggggttgatcaggaattctgagatttgtaagcgctgctttctttaacggaaattgagctctattttgagggaaattagttttgcagacttcgtttaaaaaaaaaaaaaaactaaatcttttgttcaccagctgctcagcttttcagtctgggtctgagctgaaacctgctgcaagtctgacggtaagactttctttgccgatattttgggaatctaatattgttttagacttcgaaaaggggtgttgttcaggttgcacgtttctaggggctttaagcactcgcaggatggcgtccaggacttagatcttgagaatatctcttcctgccactccccacgcccttggctctttaagaataaaaagaggtgggggagttatagtcctccaatatcgtcggaatatttttttgtatt

SEQ ID NO: 586678 - DNA, 4001 bp, Homo sapiens
tcttgagtggcgaagcaagaactacatggccctcatcagtgcaagtattgagactgagcgggtcagtaatatctttggggatgaggatctccaccggatctcgccctttggccggaaggggggatgacttaggggtctccgcgttgagagtgcggctcacttcctcatccaggaggctattcaggttcaggggatcaaagatattgccccccaggaggaagttggagggtaacacagagtcacagtccgaattcacccgcctgcgcctcttgaaggccggatgtttgaagcctcccccgcctccccctacattacagctatttctcctcttgcccccgccccccccaggtggccggtggggctgatagccattgcggggtcgaggaggagcagggggacccagctctgtcccgccccctccccggcgctcctcccccacgtccgggggagcggctcgccccgggggatccgacaggcgggcctccccatgcgactgcgcctgggggccgccccctcggtgctgctgcgcctggggaccactggaggaggtggccgcggccccggggctttcccgaccgaccgcagcggctggggaccccgcagatggcgcgcaacgacccggaccacgctccgtcccgccgcggagctccccagaggcggcctcttggtgcggtggcaccgtggggccgccccctccgcccgactcatctttgagcggcggcggcggggccggcaccagaaacggctccttctccgccgccatctcgatcatttcctccccttattccgtgccagtcggggtaacgagggggatcagggggcctaaccccccctgcctggaccctgctcccttcccccctttcccgagtgcgcgcgcagctctgctcttcacgcctagtctcgcgcccaagcgcctccccgccaagtgcgccctactagcccgcgagaccaaaacaagaggcccgcgagacccgaactactcgaggactcaaccgcgcgtgcgccgacccctttctcctccgccactaccacccggccgcgagcgcgcacggtgagcgcgcgttcccttcgcccgggaaccacgcatgcgcactccgccaccaccctggttgcgcgcgcatcagactacgaaccaacttaacggctctgggagtttaaatataacccccccacagcccccgcaaaagcccaccaccccaaactgacaccctacttccctgcgcagctatgtccggccctactgatctcctttgtctctgccgcgcgatcccacccaccgtaggcgggggacgggagctggtgtgaaaaggtctccttgacacccgacccttgttcctgaggaatgagtctcagcggtctccgcccggctctaaatccaacaacctccccaccccgcctccttcctcccccctagtgggcagcgcctgcgcacacccttttgggcttgcgcgggtagaggcagcacgtgctgaaactggcgccccgccccccgtcttaggggttgggcctgtgacgtcgcttccttaagtttggtaaacgcagcgtgcgtcagcgcgatccggaggggcggggcttcctgacgaagggcggggctcatgaattattcatgagctgttggtagcaaacctccccccctctgcccaccttcttagaagcgcttccgagggagcggaggggagaccctacaaagccaaggaagggcgggagtggaactgggctcagtaaaacgcgataggtcattataactcaccccccttgaaaatattctctgctgaattggggaaaaataaaaagcactaaaacagccgatgttgtccaacttcctcttcccccgaaacggctgagtcgttctctggctcctctaccttcccccaatcgcaatcacctggagacgccacaccacgccttcctctccgcctcaacacccacgacccgaaccccaacgcatccgcccactcccgacgcccgctcactggcccgtcagttcgcgggcctctcaacacccaccgcggcgccacgccgacttatataccagcgagtgtgggcggggacgggggttcggtccgcgctgggcccccccagcttctgccaatgaggaagaagcgagtctacgccgttttcccggggagatgcgccgcccggtctccctgccagcggagtgctgggccgaggacagggcggcaggggtgacagtggggtccaggagagtctcaaaatcctaaggtgagggcgtgaaggagaccagcaggaagaggaggaattagagaacggaaagagggaggaaaaggcagtctgaaacagaaaagttagtagatgtgcttcaggaacaatcaggcgccgcggccgccgcctaaaaatatgtgacaccaaagaggattctgggatttgtagttttcccgggacgttcgggtggaagatggcggatttacctcagctgcggaaacgcagacgctgtttccagttgcgcatgcgcctcggccccgcgagcgcaccgccctcgggtggagctagtgctcagggcgtcctcgtgccttttcttggtggcgggaaacctgggttgaggtgtgaggggcttgcggagtcgctgcggcagctggttccgcccatcgcctttaggtcctccttgctcctgaaggtagccagctagtttctggttgtaggtgaaggtgctaggcgctgccagtcctggcacccgttgcctgaggagaaactttctcagggcgacaaccagcccttcgccctttttcctcagaatctgtcgcccccaagaaacagacaaaaaaaaaatagcccagtctcctggcgggcaccaacgatatgagtgagaataaggatcacggggcctcggcaggagtgggggtggaggggagattccctcatggtgggaggaaggaagggaggggacggggaagagagagggggacgtgtggctcagggacaccgacttgaaccgctatccctgagagagaataaggggtgagggaagagaggaaaaatgggagcgccccacaaatgggaagaacttctctgcaaaacttcttccctttggattgcaggtggatttggaattggggcttttttttttttttttttaaagactgtctcgctctgtcgcccaggctggagtgcagtggcgcagtctcggctcactgcaacccccacctcctgggttcaagcgattcccctgcctcagcctcccgaggagctgggactacaggcgcccgccactgtgcccggctaattttgtatttttagtagagacggggtttctccatgttggccaggctggtctcgaactcctgaccttaggtgatccgcccaccttggcctcccaaaatgctgggattacaggcacgcgccaccgtgctcggctgatttttttgtatttttagtagagacggggtttcaccgtattggccaggctggtcccgaactcctgacttaaggtgatccacccgcctcttctttcttgttaaaagttttaaatcgggcttgctgagcttgtgcacaaacacgaaggaagaaagcaagggagggaagggggaggaaggaaggagggagggaagggggaggaaggaaggagggagggaagggggaggaaggaaggagggagggaaggagaagagagagagggagggaggaaagggaggagggagggaggagggggaggaaaggggagggagggaaggagaagagagagagggagggaaggagaagagagagggagggaaggataagagagggagggaggaaaggggagggagggaggagggggaggaaacgggagggagggaaggagaagagagggagggaggaaagggggaagggaggagggggaggaaaggggagggaggagggggagggagaagggagggagggagaggaaggaagaaggaggggaagcagggaagggaggagggggaggggggtaggaaggagagggggaggaaagggaaggaggagggggagaaaggagagggggaggagggagggaagaggga

SEQ ID NO: 586679 - DNA, 4001 bp, Homo sapiens
tggggggcagcgatgggaccccggctggcagtcagcgaggctgggaagcagctcctctttcgaacggtggtggtcccttcctcaccctctgcccccgggtccccttccaaagtctggggtgggagacgcagctcctcggaaaggtagtgtcggatgttttggcgggcagaatggatgagccgggaatcgatatccaggcccaccatgcgggacgggccccacttgcaggcaatgctcagggtcagatggcccacattgcagcccagatctaggacgtcccggccccgaaaccactcaggcttcaacacccgaaggcgcccatcctcacaggaaggattgcggtacccatagtatttgcaataattcccatactggaacttgcgctgttgctttttgaagcctgctgcaggcagtgggtggtggtggtggtggcggcctccccaactccctcggcccttttccttggaaccctggcctccacccctagcccctgcctccgacttgctggaagtcctgcgacgtttgcgatgtcgggaggaggaagatgggggtgcagagataactgaggcagctggaggggctgatagggagcctgagggaccctgcagagcagatggaaggggagacaccacttcatccctgcagttgatggctgtgttgagttcatagggttggggggcatcccggttctggcccctgtgccgcggctgctgtgaggcgccctccccgtggagtaagggggtgagaggggctgtgggcggcacggggtgactctcactccctccggctgcctgctgctgctggtggtgctgtccccggtgtctatgccgcttccgaccagtcttgagtggcgaagcaagaactacatggccctcatcagtgcaagtattgagactgagcgggtcagtaatatctttggggatgaggatctccaccggatctcgccctttggccggaaggggggatgacttaggggtctccgcgttgagagtgcggctcacttcctcatccaggaggctattcaggttcaggggatcaaagatattgccccccaggaggaagttggagggtaacacagagtcacagtccgaattcacccgcctgcgcctcttgaaggccggatgtttgaagcctcccccgcctccccctacattacagctatttctcctcttgcccccgccccccccaggtggccggtggggctgatagccattgcggggtcgaggaggagcagggggacccagctctgtcccgccccctccccggcgctcctcccccacgtccgggggagcggctcgccccgggggatccgacaggcgggcctccccatgcgactgcgcctgggggccgccccctcggtgctgctgcgcctggggaccactggaggaggtggccgcggccccggggctttcccgaccgaccgcagcggctggggaccccgcagatggcgcgcaacgacccggaccacgctccgtcccgccgcggagctccccagaggcggcctcttggtgcggtggcaccgtggggccgccccctccgcccgactcatctttgagcggcggcggcggggccggcaccagaaacggctccttctccgccgccatctcgatcatttcctccccttattccgtgccagtcggggtaacgagggggatcagggggcctaaccccccctgcctggaccctgctcccttcccccctttcccgagtgcgcgcgcagctctgctcttcacgcctagtctcgcgcccaagcgcctccccgccaagtgcgccctactagcccgcgagaccaaaacaagaggcccgcgagacccgaactactcgaggactcaaccgcgcgtgcgccgacccctttctcctccgccactaccacccggccgcgagcgcgcacggtgagcgcgcgttcccttcgcccgggaaccacgcatgcgcactccgccaccaccctggttgcgcgcgcatcagactacgaaccaacttaacggctctgggagtttaaatataacccccccacagcccccgcaaaagcccaccaccccaaactgacaccctacttccctgcgcagctatgtccggccctactgatctcctttgtctctgccgcgcgatcccacccaccgtaggcgggggacgggagctggtgtgaaaaggtctccttgacacccgacccttgttcctgaggaatgagtctcagcggtctccgcccggctctaaatccaacaacctccccaccccgcctccttcctcccccctagtgggcagcgcctgcgcacacccttttgggcttgcgcgggtagaggcagcacgtgctgaaactggcgccccgccccccgtcttaggggttgggcctgtgacgtcgcttccttaagtttggtaaacgcagcgtgcgtcagcgcgatccggaggggcggggcttcctgacgaagggcggggctcatgaattattcatgagctgttggtagcaaacctccccccctctgcccaccttcttagaagcgcttccgagggagcggaggggagaccctacaaagccaaggaagggcgggagtggaactgggctcagtaaaacgcgataggtcattataactcaccccccttgaaaatattctctgctgaattggggaaaaataaaaagcactaaaacagccgatgttgtccaacttcctcttcccccgaaacggctgagtcgttctctggctcctctaccttcccccaatcgcaatcacctggagacgccacaccacgccttcctctccgcctcaacacccacgacccgaaccccaacgcatccgcccactcccgacgcccgctcactggcccgtcagttcgcgggcctctcaacacccaccgcggcgccacgccgacttatataccagcgagtgtgggcggggacgggggttcggtccgcgctgggcccccccagcttctgccaatgaggaagaagcgagtctacgccgttttcccggggagatgcgccgcccggtctccctgccagcggagtgctgggccgaggacagggcggcaggggtgacagtggggtccaggagagtctcaaaatcctaaggtgagggcgtgaaggagaccagcaggaagaggaggaattagagaacggaaagagggaggaaaaggcagtctgaaacagaaaagttagtagatgtgcttcaggaacaatcaggcgccgcggccgccgcctaaaaatatgtgacaccaaagaggattctgggatttgtagttttcccgggacgttcgggtggaagatggcggatttacctcagctgcggaaacgcagacgctgtttccagttgcgcatgcgcctcggccccgcgagcgcaccgccctcgggtggagctagtgctcagggcgtcctcgtgccttttcttggtggcgggaaacctgggttgaggtgtgaggggcttgcggagtcgctgcggcagctggttccgcccatcgcctttaggtcctccttgctcctgaaggtagccagctagtttctggttgtaggtgaaggtgctaggcgctgccagtcctggcacccgttgcctgaggagaaactttctcagggcgacaaccagcccttcgccctttttcctcagaatctgtcgcccccaagaaacagacaaaaaaaaaatagcccagtctcctggcgggcaccaacgatatgagtgagaataaggatcacggggcctcggcaggagtgggggtggaggggagattccctcatggtgggaggaaggaagggaggggacggggaagagagagggggacgtgtggctcagggacaccgacttgaaccgctatccctgagagagaataaggggtgagggaagagaggaaaaatgggagcgccccacaaatgggaagaacttctctgcaaaacttcttccctttggattgcaggtggatttggaattggggcttttttttttttttttttaaagactgtctcgctctgtcgcccaggctggagtgcagtggcgcagtctcggctcactgcaaccccc

SEQ ID NO: 586680 - DNA, 4001 bp, Homo sapiens
tttaggcattattagggcagtcatttctttttttctccaaagtacctgtccataagacggatagaaccatttggtcctacttctcaaggtaatactagaaatggttcaaaaaagtgccagaacatgatggttatatcacagttttcacccaacaatagcaggctgtatcccagtatctccttgaaaggtcagatgacaaaaaccattaggttttgacgatcatttgcccagccctatctgtcctgtacttcaatgtatacattttcatgtgcagatttcattactcctttcccccagtgcttctcatcgcattcatccccggggttccagcagctgaatctctgcagtgactcagcagagagccccgggaggggcggccagagcggcaaatggggaggcttccccgccgctgctcagggaaagtggggggttaaaaaacgaggctatcgaccaacatactccactcctggacacccccctccacaccctcctcctcttactccaagaaagcaaagaggcaacctctcagggggccattttttgtcttattacctcagtaaaaatgcccccatgaacttttaggatttttagaagtgaagcaacctagccgtcagtaggcaaaatgggttaagcaaacattttttggccaaaatcccaactatttgatgagccatgagcggagacaataagcaaactccagtaacaaactttccaaaaatttctgagccttgatttcttcatcttgtaaacagaaaaacacactcccgtaataataccacccaacctgccgcccacctgatggcgtcgccgcgagacgaaccactttgaaaacccgcgaaaccaaggtgaacaatccctgcgcaacatgacagtttggtcacatcgccgttctcactcgcgcttgttactgaaatctgaaaaatacttaaggcggctgacgggcactgcgagttctagtcactgcggtgactcccgccaccgtgatacctgggtcttgaaatcctaagctgcaccgcggcgatctcggcactgcgattatcccgttcttgaaatcctaaggtgcgccacggagacaccggggttctaaaaatcctacatcgcaccagggcgatgctggggcctatcctttaagtcgcaccagagcgatgctggggttctaaaaatcctacatcgcaccagggctttgccgggatctataaatcctaaatcgcgccacggcaacggcggagtctaagaatcctgaatcgcaccagagggaagccggagtctaaatatcctaaatcaaaccagggcgatgctgggggttagaaatcctaaatcatgctgcagcaatgactgagtataaaaatcctaaatcgcaccagggtgatgccaggatctaaaaatcccaattcgcatcagggtgagaccagggtcattatggatcctaagtcatatcaagatgacgctggggtccagaaatcctaaatctcaccacgacgatcccggggtctagaaatcctaacccaaggaggtcccgcgttctgaacattccattgcgggcaggagtgacaccccctcctcaagtaggcagagcgggcgcggaatgcgtgccgcctgtcggtagagttttcgcccagaggcagccccagctcggacacgggcacacagtcctccgctcgcctgcgccctagtcccagggccgccagccacaccccctcgttcccaccgcacactcacctgcggaggcgatctcggcgcaccatggccgcgttatcccatgccgcccgccgcagcgttgcagagcaccgggcgccgcagagcccgcagccgtgcagagctggccagcagcgggggcgcagcccgcagcccacagcccgcgcagggcggcgccgcgccgggcagctacagccactccggcgtgcgctgcggcactgcgcttgcgaggcgcagctgccgcagaggaggtgccggggtgtgctggttgccgcggcagcgcggagcgagtgggcaccgacttttagagcccacccgcgccccgcccctagcccgcccatcgccgcagaacccctaccgcctgctcccttgctcgccgcagagcccctcccagccgctctaccaccgccatggccacaaagatggggtgcccctctaacagtggctcctttagggggcaccttcaggggtgtcgagccccctccccaagaccccgctgctccctcgttaaccgccaaccctgagcccgagattctgctgcagaaaccctcccctgatgagttaaggccacgggcaaaaacagcagacccctgagtgccccaactctttccttagaccacccacaaaccccacaggccgcccacaaaccccacaggctgcccacaagccccacaggaggatggccgctcgaactaaggggcagcagggctctggggtgccggccgtggcgcctgctcccatccctcgttcgaagcgtgggtactgaaccgtgagaggtggcgagccacgagggccctatgcgccctaagcttaactaccggtaaccaccaagggcacgagcaagcggctagggagcaacaagctctgttggacccaccaccaagctagtaaacagattcatgggatggccactatggccaaagttgcacaaagtccggtttctcccgctccagccaccgccgctgcgcggggcaggtttcctttacagcagcgcgacgtggtcagcatgccagacgcctggccacagcagcgccctcgcagccccgctcgctgcatgcgccggtccgcgctgcacagaacagtgggcacaattaggagagcaaagccccctttatttacgtaagatagaatcacaatgcaagggcccagaggcacaagaaagagggaggaatttttctaatccataatcctttaaaaggcatcccttacgcctttgaaaagtgtagagtatcacgaagtgtctgtgttcattttctgaccgtaaactgaaatactggtgaacaaacgtggggtgcgagcgggtgagcggggcggccggccggtgcccgctgcatccagagggggcgctgcaggcctcccttcggctgcgcacggcccgggccctccgcggctctgcaactctgcaccccgaaaggttcggtgctggaccgcggggcatccaacccgggaccgggggcgacccacggacactgaggaaactaccgcctataagcctatcatcagaacctctggcacaacacaggtacacttctgcaggggtctggttgcccccagaaaaagcactcatgaaacaaatgctgatttagcacctacagggcactaagaaccgggggtgcgaaataaatgagaaatagccccggcccgaaaacaacacacgggccatctggaggggaagacagacaagaactgccactttgtaaaattttccttttaatttcctagcgacgtttgtggcagttgacccactcctccctaacgtgtaaggccctcagaggcagagcccaagtattattcaccttttgtagccccagagcccgccacggtgccggccacaaagctggcccctaataaatactgcttgaatgagtacaagaatttgagggcgcacaggggaggaagtaattaaggggaggggcgaagggtggtcttgaatgatgaatagacatttaccagagagacaaagaacattccagccggaggggacggctttcgcaaagcaccggaggctcagggccgcgtgtttggggaaaacggttagtcctttgagccggcaaaaaattaggatagcaagagaatttcatcgtagggaattaggaatttgttctagagaaaatgagaagccacagatggatttaaactctttatggccttaattggttacttaacaaaatttaaattagtctctttacaagtcaaagattacctattttaactaccactaccttttaaagactgaattactctgcaaaatctaaatcggttcttccaaaaaggtaaaggctttcctattttaataataacaataa

SEQ ID NO: 586681 - DNA, 4001 bp, Homo sapiens
tgcaaggtcttttcccatctgatgtaaaataaggctccaagatgaactggaacttggccagggtgatcctctactgaggggacaaattcacagctcagtcttccctagttatgtccctcagcccagaacccttggtacaacatgctgctttgtactgagggcaaggcaaattgaagacattatcatcaataaaatcacatcgagcccgctctcaaccaaattaaccaatgtggccgggcgcagtggctcatgcctgtaatcccagcactttgaggctgaagcaggcggatcacttcaggtcaggagttcgagaccagcctggccaacatggtgaaaccccgtctctaccaaaaatacaaaaattagccatgtgtagtggtgtgtgcctgtagtcccagctacttgggaggctgaggcaggagaatagcttgagtcccggaggcagaagttgcagtgagatgagatggcgtcactgcactccagcctgggtgacagagcgagacttcatctcaaaaacaaaaccaaacaaaaacaaattaaccaatatatccctgaagctactggtgtgttcctcttcaggcccatttttgagtaaaagtgtttggctgtaaaaagctcaaaagatgagtggcagacgagggaagcagtggaactgaataatctcttacccaaataagatgaacctaaatgacagatggttgtttctccaggtgacagtattagtgggcacccctaaactatcttcacacaccctctgcattactccacacatcccattatcccacagctggtacttcttcaccaggtactcctgccccactatcccacacctagaggacattttatccactcaaacagataaataggctgaaggattctaattaagtaatagaatcttgcatttttatagctctttaccctttcacatatatcatctcatttgtcactcaccacagtcccctaaggaaaacagctactttctttcagacaggcaattttctagctgcctgggagctaggaggaggaaagggcttcagcacaggcacagtcgctctttctcgcttttttttttttttcctgttactaccttcccacattagattatgcctccagccagaatgagtcaaccaggagcaggtgcttccgttttcctcgactgctctcctcacctcacaccttcttcagctgtccccctccctgaaccaggcccccagccgcgccaccactgccgctctccgccctggtgaccccagcgcctggacctggaccgacacctgcagctccgacccggaacagccacgccctctaccactcggtcacacccgtgtgcctgcgacctttccaacctccaaggctggctgtcccacaagtaggaaggcgcagcctcccaagaaatcgagtccccacgcccaggagggcgggtggagccagctaacggaatgactaaactctgtcgcgggggtcaagcctcggcgagggttgtgtgacttttgtgttctctacgaccccgaggtgctgggaggcgacgaccgaggctctcgcccacgtggccctcttctggaccggcggcggcgcacctcgtatgggcacccacgcgccccgggagccctcccctcgccagcacagcctcacgcctcctgggccacgcgcacttacctgcccctaggactggtgtggcccacgcacacgagccacacccccaaggagggctagtcccactcctggagcgggctgcgagggtgcacggggaggctccactccttccccgcccgcctcttacctgattcaggtaagaccttgcctacaggactccatgtttcggagaaccggttgcgcatgcgcttcctgaggccagaggttctcggccttcaccctgttcccagggaggacccggccacgaatacgcggctcggggctagagcgtcgccaggtccgcgcacaagcccatcgcccccgagcccagcatgtgctgccgccttctccctgccaggcgtcagcgccacctattgcaaagggtatgaaatggcaggccgtggcttcgacaatagcctccggcattggataaagagaataaaattgtattcggcctgatctgagtacttttacataataaaagtgaaggccaaagaagtgacattttgatagttattaactacctagagatcttcggcgagccttccgtatttcagcccttcccctaatttcgcaattaccctaaagatggtgtccatcgccagccctctctctaccccgtgctctcgatccttatatttgctgctttctgctgttcacatggcgaacacaggcatcacatactcaacaagggccaggtgaaattcactaccctttctcacctcctctttcccacactacaaactgacccctgtcctaagaactgacgcttccttctctagtctgtatcttggttaacgcacttctgtccacccctgtctcccacacactgtcaccaacccctgtggaacagtggaatgagaccaaggggtcgggtacccttagatacagatcccaacaagttccctcctccccatccttttcatcttacctcccaagggtctcttgagttcagcttgctcccctccattcctaatgccatttgcccttgttcggggcattatttctcacctggactactgcctcctaattggcttccaagtctccaccatcacacatttctggtccatcattcacaaacctgccaaagtgatttttctaaaatgcaaatctgatcacatctctcttataaaactctttactgacaccctattgctggtgctaaattcaagctcttcagctccgcatgcaaaacacttcaaaatctggtccttgccttgacttcctctagaatcttctatcttaccacctccatcttacccacccccaccaaaacctcatgatctgaccaaacattactaattatagttcctcccaaaacaccatgcagtttcctttctccgtgcctttacacatgttctccaggaccagctatgtcctgtcccacttgggctacctaaaaaattcctcctcgttctttaaaaatcaatgtaattttcacatcctcttgcaagccttccatgaaactttcctatggaaatgatccctccctcctctgtgctttctctgtccctctgttgccttatcacattgttttgtgatgatgtttgcagacctgtcttgtctctcctaccacagagctgagcttcttgaggacaaggacagcatcttactcatttctatgtcccttttgccaacccaacattttaattttctttttatagacaagagatctcaccctgtctcccaggctggagtgcagtggtgcgatcatagcttgctgcagcctcaaactcctgagctcaagaaatcctcctgcttcagcctctcaaatagctggtattacaggcatgcaccgtcatgcccagctcaacccaacattttataataatgatgataagaatgaataacagcaaatatttgttaatcgctttgtgccagactctgtgctgaatttctcatatgtacatttttaacttctgatgattaccctataaagaactattattatcctaattttactaatgagaaaacaggctttgaaagattaaggagcttgcccatggtcacagagctggtaaattgtggaatcaagatttaaatccagatctatctgctcatgtttatctattcatcagtttggtagaactaaaatatttgaaaaaccactagtcattttttaaagtattaatgcttacagagttaatttatcttttaaagggaaaacacatagctattctactctagtggatggaaatagagtgttctaatttaaactaatggtatagaaagccaaataaatactcttgatgtcaggctaaatgagaaaatgatcctacttttatcccatgtaatctgttcttattatatgaatgttacgagtatttttgcttagagattgatatattacaagccagtaatagattttt

SEQ ID NO: 586682 - DNA, 4001 bp, Homo sapiens
aaattgtagagaaacagatgtcgattcaacataaagaattttccaacataggggctgtctagagggattgggtggctcagccattttggtatgggacaaattctctgtccactgggggctgggtaaccctgtggcaggtatgcgagctctgcatgtaagacaatgaatgacctgcaaggtcttttcccatctgatgtaaaataaggctccaagatgaactggaacttggccagggtgatcctctactgaggggacaaattcacagctcagtcttccctagttatgtccctcagcccagaacccttggtacaacatgctgctttgtactgagggcaaggcaaattgaagacattatcatcaataaaatcacatcgagcccgctctcaaccaaattaaccaatgtggccgggcgcagtggctcatgcctgtaatcccagcactttgaggctgaagcaggcggatcacttcaggtcaggagttcgagaccagcctggccaacatggtgaaaccccgtctctaccaaaaatacaaaaattagccatgtgtagtggtgtgtgcctgtagtcccagctacttgggaggctgaggcaggagaatagcttgagtcccggaggcagaagttgcagtgagatgagatggcgtcactgcactccagcctgggtgacagagcgagacttcatctcaaaaacaaaaccaaacaaaaacaaattaaccaatatatccctgaagctactggtgtgttcctcttcaggcccatttttgagtaaaagtgtttggctgtaaaaagctcaaaagatgagtggcagacgagggaagcagtggaactgaataatctcttacccaaataagatgaacctaaatgacagatggttgtttctccaggtgacagtattagtgggcacccctaaactatcttcacacaccctctgcattactccacacatcccattatcccacagctggtacttcttcaccaggtactcctgccccactatcccacacctagaggacattttatccactcaaacagataaataggctgaaggattctaattaagtaatagaatcttgcatttttatagctctttaccctttcacatatatcatctcatttgtcactcaccacagtcccctaaggaaaacagctactttctttcagacaggcaattttctagctgcctgggagctaggaggaggaaagggcttcagcacaggcacagtcgctctttctcgcttttttttttttttcctgttactaccttcccacattagattatgcctccagccagaatgagtcaaccaggagcaggtgcttccgttttcctcgactgctctcctcacctcacaccttcttcagctgtccccctccctgaaccaggcccccagccgcgccaccactgccgctctccgccctggtgaccccagcgcctggacctggaccgacacctgcagctccgacccggaacagccacgccctctaccactcggtcacacccgtgtgcctgcgacctttccaacctccaaggctggctgtcccacaagtaggaaggcgcagcctcccaagaaatcgagtccccacgcccaggagggcgggtggagccagctaacggaatgactaaactctgtcgcgggggtcaagcctcggcgagggttgtgtgacttttgtgttctctacgaccccgaggtgctgggaggcgacgaccgaggctctcgcccacgtggccctcttctggaccggcggcggcgcacctcgtatgggcacccacgcgccccgggagccctcccctcgccagcacagcctcacgcctcctgggccacgcgcacttacctgcccctaggactggtgtggcccacgcacacgagccacacccccaaggagggctagtcccactcctggagcgggctgcgagggtgcacggggaggctccactccttccccgcccgcctcttacctgattcaggtaagaccttgcctacaggactccatgtttcggagaaccggttgcgcatgcgcttcctgaggccagaggttctcggccttcaccctgttcccagggaggacccggccacgaatacgcggctcggggctagagcgtcgccaggtccgcgcacaagcccatcgcccccgagcccagcatgtgctgccgccttctccctgccaggcgtcagcgccacctattgcaaagggtatgaaatggcaggccgtggcttcgacaatagcctccggcattggataaagagaataaaattgtattcggcctgatctgagtacttttacataataaaagtgaaggccaaagaagtgacattttgatagttattaactacctagagatcttcggcgagccttccgtatttcagcccttcccctaatttcgcaattaccctaaagatggtgtccatcgccagccctctctctaccccgtgctctcgatccttatatttgctgctttctgctgttcacatggcgaacacaggcatcacatactcaacaagggccaggtgaaattcactaccctttctcacctcctctttcccacactacaaactgacccctgtcctaagaactgacgcttccttctctagtctgtatcttggttaacgcacttctgtccacccctgtctcccacacactgtcaccaacccctgtggaacagtggaatgagaccaaggggtcgggtacccttagatacagatcccaacaagttccctcctccccatccttttcatcttacctcccaagggtctcttgagttcagcttgctcccctccattcctaatgccatttgcccttgttcggggcattatttctcacctggactactgcctcctaattggcttccaagtctccaccatcacacatttctggtccatcattcacaaacctgccaaagtgatttttctaaaatgcaaatctgatcacatctctcttataaaactctttactgacaccctattgctggtgctaaattcaagctcttcagctccgcatgcaaaacacttcaaaatctggtccttgccttgacttcctctagaatcttctatcttaccacctccatcttacccacccccaccaaaacctcatgatctgaccaaacattactaattatagttcctcccaaaacaccatgcagtttcctttctccgtgcctttacacatgttctccaggaccagctatgtcctgtcccacttgggctacctaaaaaattcctcctcgttctttaaaaatcaatgtaattttcacatcctcttgcaagccttccatgaaactttcctatggaaatgatccctccctcctctgtgctttctctgtccctctgttgccttatcacattgttttgtgatgatgtttgcagacctgtcttgtctctcctaccacagagctgagcttcttgaggacaaggacagcatcttactcatttctatgtcccttttgccaacccaacattttaattttctttttatagacaagagatctcaccctgtctcccaggctggagtgcagtggtgcgatcatagcttgctgcagcctcaaactcctgagctcaagaaatcctcctgcttcagcctctcaaatagctggtattacaggcatgcaccgtcatgcccagctcaacccaacattttataataatgatgataagaatgaataacagcaaatatttgttaatcgctttgtgccagactctgtgctgaatttctcatatgtacatttttaacttctgatgattaccctataaagaactattattatcctaattttactaatgagaaaacaggctttgaaagattaaggagcttgcccatggtcacagagctggtaaattgtggaatcaagatttaaatccagatctatctgctcatgtttatctattcatcagtttggtagaactaaaatatttgaaaaaccactagtcattttttaaagtattaatgcttacagagttaatttatcttttaaagggaaaacacatagctattctactctagtggatggaaa

SEQ ID NO: 586683 - DNA, 4001 bp, Homo sapiens
tgatttcttcatcttgtaaacagaaaaacacactcccgtaataataccacccaacctgccgcccacctgatggcgtcgccgcgagacgaaccactttgaaaacccgcgaaaccaaggtgaacaatccctgcgcaacatgacagtttggtcacatcgccgttctcactcgcgcttgttactgaaatctgaaaaatacttaaggcggctgacgggcactgcgagttctagtcactgcggtgactcccgccaccgtgatacctgggtcttgaaatcctaagctgcaccgcggcgatctcggcactgcgattatcccgttcttgaaatcctaaggtgcgccacggagacaccggggttctaaaaatcctacatcgcaccagggcgatgctggggcctatcctttaagtcgcaccagagcgatgctggggttctaaaaatcctacatcgcaccagggctttgccgggatctataaatcctaaatcgcgccacggcaacggcggagtctaagaatcctgaatcgcaccagagggaagccggagtctaaatatcctaaatcaaaccagggcgatgctgggggttagaaatcctaaatcatgctgcagcaatgactgagtataaaaatcctaaatcgcaccagggtgatgccaggatctaaaaatcccaattcgcatcagggtgagaccagggtcattatggatcctaagtcatatcaagatgacgctggggtccagaaatcctaaatctcaccacgacgatcccggggtctagaaatcctaacccaaggaggtcccgcgttctgaacattccattgcgggcaggagtgacaccccctcctcaagtaggcagagcgggcgcggaatgcgtgccgcctgtcggtagagttttcgcccagaggcagccccagctcggacacgggcacacagtcctccgctcgcctgcgccctagtcccagggccgccagccacaccccctcgttcccaccgcacactcacctgcggaggcgatctcggcgcaccatggccgcgttatcccatgccgcccgccgcagcgttgcagagcaccgggcgccgcagagcccgcagccgtgcagagctggccagcagcgggggcgcagcccgcagcccacagcccgcgcagggcggcgccgcgccgggcagctacagccactccggcgtgcgctgcggcactgcgcttgcgaggcgcagctgccgcagaggaggtgccggggtgtgctggttgccgcggcagcgcggagcgagtgggcaccgacttttagagcccacccgcgccccgcccctagcccgcccatcgccgcagaacccctaccgcctgctcccttgctcgccgcagagcccctcccagccgctctaccaccgccatggccacaaagatggggtgcccctctaacagtggctcctttagggggcaccttcaggggtgtcgagccccctccccaagaccccgctgctccctcgttaaccgccaaccctgagcccgagattctgctgcagaaaccctcccctgatgagttaaggccacgggcaaaaacagcagacccctgagtgccccaactctttccttagaccacccacaaaccccacaggccgcccacaaaccccacaggctgcccacaagccccacaggaggatggccgctcgaactaaggggcagcagggctctggggtgccggccgtggcgcctgctcccatccctcgttcgaagcgtgggtactgaaccgtgagaggtggcgagccacgagggccctatgcgccctaagcttaactaccggtaaccaccaagggcacgagcaagcggctagggagcaacaagctctgttggacccaccaccaagctagtaaacagattcatgggatggccactatggccaaagttgcacaaagtccggtttctcccgctccagccaccgccgctgcgcggggcaggtttcctttacagcagcgcgacgtggtcagcatgccagacgcctggccacagcagcgccctcgcagccccgctcgctgcatgcgccggtccgcgctgcacagaacagtgggcacaattaggagagcaaagccccctttatttacgtaagatagaatcacaatgcaagggcccagaggcacaagaaagagggaggaatttttctaatccataatcctttaaaaggcatcccttacgcctttgaaaagtgtagagtatcacgaagtgtctgtgttcattttctgaccgtaaactgaaatactggtgaacaaacgtggggtgcgagcgggtgagcggggcggccggccggtgcccgctgcatccagagggggcgctgcaggcctcccttcggctgcgcacggcccgggccctccgcggctctgcaactctgcaccccgaaaggttcggtgctggaccgcggggcatccaacccgggaccgggggcgacccacggacactgaggaaactaccgcctataagcctatcatcagaacctctggcacaacacaggtacacttctgcaggggtctggttgcccccagaaaaagcactcatgaaacaaatgctgatttagcacctacagggcactaagaaccgggggtgcgaaataaatgagaaatagccccggcccgaaaacaacacacgggccatctggaggggaagacagacaagaactgccactttgtaaaattttccttttaatttcctagcgacgtttgtggcagttgacccactcctccctaacgtgtaaggccctcagaggcagagcccaagtattattcaccttttgtagccccagagcccgccacggtgccggccacaaagctggcccctaataaatactgcttgaatgagtacaagaatttgagggcgcacaggggaggaagtaattaaggggaggggcgaagggtggtcttgaatgatgaatagacatttaccagagagacaaagaacattccagccggaggggacggctttcgcaaagcaccggaggctcagggccgcgtgtttggggaaaacggttagtcctttgagccggcaaaaaattaggatagcaagagaatttcatcgtagggaattaggaatttgttctagagaaaatgagaagccacagatggatttaaactctttatggccttaattggttacttaacaaaatttaaattagtctctttacaagtcaaagattacctattttaactaccactaccttttaaagactgaattactctgcaaaatctaaatcggttcttccaaaaaggtaaaggctttcctattttaataataacaataacaaaagcctttgcattatatatttttcatatttattgttaatggaaactttgagtcctacaaacaaattccacactttcattctcaccaggccagaaacaccagcatccaagatgaaggcaattttctgtttatggactgagtaccccacaaaagatcttattctgaaggccatggaacatgtctacccacatggatcaagtgggcagactggaggagaaacagtttaaaggccctgggggaaggagggagcgccagggagagctcctgaagacaacaggaattccaagtctggcactcgggagaaatcctcccttcagacattattgatgtctggccgaggagttaggaaaaacttccttgaaggagggattgaggttgagatgggcatggaacccagatcttaggcagagaaagcatattcctgtttggaagaaccctgagtacagaagtcagctcaaagatatcagcttggcccaaccaggaattcgctgtgggaagtctaagagagaaaatgctggccataatcccccaggagccaaagagttaacgaatcttctaaatgtgcctgatttacttccagaaaggagcttcctccgcagggggagaatttgacccaaggtataaaacacttggagccctgagaaaacacacagccacacataaattcaaagtcggctctggcttgctcgaagttgcaccctttcagttcctctggacagatgctatc

SEQ ID NO: 586684 - DNA, 4001 bp, Homo sapiens
aaggcatatacttacatagtcttaaaaggaatttataaaatatgggtatttctcctgcttagcaaagggtcatttttctctattataggtttaaaagtagtgaaaatattagttatgagctttcgtattgactggctatgattaatctggtacattttttatcatgaagataaactccatcaactaattttgaaagcatgtagtatacatctaatgtaaacccctactgccatgtatcaagaacaaagcaattttgaaaaagcagtagtcggcagactgtcttctatatgccacaaattccatcatgttaaaagcaaaatatatttaagttaataactatagcttatacaccattaagtttgaaaacggaatagaatttttaaaacagcagtacattttataggctatcagacacatttttgtactaccaaaatttcttatgaatgatgtaaattttccctctgttattcagcagttcaaaaagaatgaacattgaatacaccacagacttgcaaatgataggaaccaaagtacctcacttatgttccattatggaagtttacacgttcaaaacaaagctcaattagcttagatcaaggaaggaaagctatgtacctgtaaataatccaagcaccacttacactgtttacataaaaatgcaatttatgtccctgtagcacagagaaacatgatgtacatcattttcagatcatcttcatgcagaaaaaattcattagtcagctataatagtttagctgtaagggaatataatgtttttctgaatccatttgcatggcaatgtgcatgtgtctggctgatgaaagcgacagaataaacccccacccaaagctacagaatgtgaacagtcttcttaaaattcaagagagggtccagatagtctatattgcctccaacgtcagttcttacaatcctctcacattcatggaccatcttaacatagcaattaaagtatcttgattattttgcctaagagagttgacaatatttcattctgcccgagggctcctttgaacataaaactgtgataaggtaaaatacactgggcaactattcatgcgtgagccattggagccctctccaactgccaaattagcaaatggctcttttaaaacatgaaagatatgaatgggaaaccgtacttcggagtaaattctgcattgacaatagtcagggaaagtactttcactggtgctttaattatcgggtcagcactacgactggccacatcgctcagcctctggttataatctatttcacctaataagatagatgtccaccacaagccccagaaagagataaggtacgatggaaaattgatggatcacaagccccgcgtgattgccagaaatgaattcagactttcacagaaacacctgccccttggaaggaccccaacataacacagataaagcaaggctgggaacaaggaaacagctcggctcaaaccttgccagctgcatcacggtgggacgaggatgaccggatcccttttgtaagggctgagtcagatcccagctttaaaacttgctgggccgtaacagtcacacatcacccactgtcccagcgcccctctccctcctaagtcatacaggtggccatcagaagcaaccccctaaaaagacaagccccattctagtttcgtcctcgccgtggccacgtctcttcagtttccgaagcccctaaactctagcccacctacgtggttttgccccctggaacagcagtcaggtctcttaggggaacaaagaaagcagaacccctgaggcgagggattgggtactggatctgaaaggggctgcaattttacctttcggtgcccaggaaccagtggagaagtcagcggcgcaaggaccacacgcgcgctccgcgcctccccgcctcctctcagcaagtcagctgtcgccccgcatctggctcgcgccctccactcggctccgcatctgctcacaaagcgctcggggcgccgcgggcggcgagggcctccgggtcacctgcggccgggctgagcccagcgccccgcccgcccgccggccgcactccctccgccccttcccacacgcgcgctgccctgccagtgactcagccgggcatcggcgcgcgcggcccgcggcggcccgggcgcgttggggccggaggcaccgccaggcgaccagactgaggcgctcgcctgcccgccccagcacgtgtctgtctgcctcgcgtgctgtccgtcccctagtccgcgggttccgaggaccgctgaggtggggactggcaccacccagagggaaatcggcccccgcccttcctgccgtccgcgccgcgcctggccccgcgggggtcgcgtttcctcccgcctctgccccgcccacgacaaggtgaaactttctaggtggagaagttttctcgccctggctgcgcgctctcctcccccagctcaggcagtctgaagttagcacagccggagataagcgggaccgagtctccccctcctggcgcttgggaggcgagtgtcaccccgggctcagatgcagggcgcgcaccctcctggcaccccgctcgctgaccccgggaagggcgcgagctttgctctcggcctctcccacgtctccgctaaccgccccgcgcccacccgggtttagagagatttgggcaccgcagaaacaaggagttcattgttagaggcggaggtagaagtggatggacgaattgtcccaatgatttcattatgcaacgattatcctctactataataactcaaatttctgcaaggaagaacaacagaggagtttaaccctgaggagacttccatttctttttttctttttttttttttccatagccggaagcaggctgattaaataactgggcaaatagcgatgaataagcacaacagaacaaaagtttaattcttgaatgttgaaatcttatgatgatttttaaaaaagagcttttggggcctcggtgaactctattaggagtaattgtgttgggataactttgtatttcgctataaaaattggcacctacaagagtaaatgaacactcaaaggtaataggatctaaggaacgggcattgccggttagaacttgagttcgttccggctctcataccaacttgttcaatcatggcaatagataatgagacatagatatcttcgttattgaaagtcatgggttaaaataacagttactatgcaggttcagttcttatttactacagaatgaaacatagaaaaatgtagtaagaatagttatcatttcccaagtgccaggcacttggaaatgataatgtaaccagaggttacataagagtgatttcagtcctcaaaagagattacctcttgattccccagttttatggaaaaggaaagttcccattacgttactaaagtcttgcattgaaccattttgcaggtaaagaaactgagtccctaaaagttcccaggagagtcacatagctggttagtaagaggggcaaagttagaacttagctttcagcccagtcaggtgtccttcacaccataccaagaggcctcagcaggctaaataaacaacgcggcctgactggagatttcctgatacggcatggcataatttatcaatgactatagctcattaaaaaacactaatttactggtaataaggcactgggcctatttatggacagatcaattacagattttgggttcagtaacagctttcaataaaagatgaataaattaatgaatttaaaaagttttacacacacacacacacacacacacacacacacacagagccatagttgtctaaaggaatgattagagtgctgtttctatttcctggtttccatagcaatatgttaactggatttttagatcacattatgtagttgccttaacaggttttctgagtttgagtgccatgataaaaatataaaagaaaaaatttacaattaaagttgtagaaagacccagaaaagccaatgcaaactggaaaataaaatagatgataaatac

SEQ ID NO: 586685 - DNA, 4001 bp, Homo sapiens
cacgcccggctaattttttctattttttagtacagacggggtttcaccgtgttagccaggcatggtctcaatctcctgacctcgtgatccacccgcctcagcctctcaaagtgctgggattacaggcatgagtcatcgcgcccagccagatgacttttaactattaaaaaatcctagaagtagccaggtgcagtggcgcatgcctgtaatcccagcactttgggaggctaagatgggcggatcacgaggtcaggagattgagaccatcctggccagcatggtgaaaccccatctgtaccaaaatacaaaaaattagccaggcatggtggtgcacacctgtagtcccagctactcgggaggctgaggcaggggaatcgcttcaaccagggaggaggagattgcagtgagctgagatcgcgccactgcactccagcctggtgacagagcgagactccgcctccaaaaaaaaaaaaaaaagtatggacagtttaaatgaaggctgtttttaaggtgatcatgacagtcccagatttcagtttactgctcttgccagttcagggggccttgactagtgtagtagaaagaataaaaacctaacaaattgagcaggacggtgacaatggaagttggaatccactaagaagtgtgttaacaactcacaactcacctgctgaatcaaccaagactccctaagaaacaggattttagttccactactgctactactgactgcttacctctgggaaaagcacttaatgtcctgtggtccaagtgtctttaactataaaaagagaatattgaaccacatgattttcaaaatcccttttaactattaacttgctttgatctagttgctgtcagactatgcagggtgaatgttttgtaactggaacctttttgttgtacagaactctttcagcaggtactaaatttgtagtgctatcttcaattgtctggaacaatcagtcctagttttactatctagggatattttgcagtgaaatcatcaacctctcaagcaggggcctccttttctttggccagacttatctccactctgctgcatccacctttccttgactgaagccctaaattctcataaccatcacacaagtaatagacacacagtcaccagtcattagcccccctcccaacaatatttagaatctaatcacttaaatgaagcttcaatggaaacatctcctcatggaaaatgcaaatcatgtaaaaagtacaggttctaagatgatcgcgtgaccacacagttgtcattggctagccatatcaacgtggatctactcaacataattaaagacaaaattaccctcctccaaagtaaaactatatattaaaaaaaccctctacgacttaagattttgttacaatgcagcccttttccctccttgctcatcccctccctgtcctgctctactcctgagatccgcatcaggccaggaataaaggatgtgggcggccgcggttccctggcctctccgggagggcgcgttcggcagtacgctggctgttgataccaacgagagcccatttaagcgcaccttgtttctcctggcacacccgctggatactgttctcctggacttttctctccgccgccgcggcttgctcttccgaccactccacattgtccctgagaaaatcaaacgggcagcttaggggcttcacgtcctggctgcgagcagggtgagtcgctggcctaggagtttctctccccttggagagtgcctcgggtagggcagcttgactcgtggccggcggtcaggggcttttcggaatgctccgaggcggcgggacagacggccagcgacaggccgggcgagggggcagggtgattaccaggcattgtggtggaagacgcgcgccggatcgctcaggaaccggcttccgaactgctgcctcttatcggcgaggattgcaggtgcaccttcagggtaggagccggccatgacaccggagccggaaacacttcactttccgtaacgcgagaacttcctgcgggccacgccctctttcagaagacgtggagtctgggcgggaaaaagggtggcgggacagggcggtcctggagtctggtccgggtggcgctcgggagctgtcgtttggggctttcccagggttggcgaagggctctctagggaaggggaccaggcagggggaaattctccccggaggagtcgtatctcattgatgaggtgctgatggacgtgcaggttaggcagaaagtgggagacattccacttgaggcccagttcattgctgggatcctcttaacaggttccccagcttccctcaagttgtaaaacaggaataatcttgaatcattataagagttgaggctacctagttccactgcggagccgatgtccagaactgaagaaggtagcaagcagcggaaagaaacagggcaatttccagcttctatagtcagctcttcatagtgtgggtgtatatgtatacacagtgtgtatatatattttggttggggtgggggagatggatatatgaaattagagaacacgaggcttagcaaatcaaatggaatatccaaggacaatttttttttaattataaccatctaacctttttgaatcatccatattatatttattataattatccttattagcacaattaagattgtaatacacacatacagtttgtcatagtaatacatttcagccttacatttctatttctagatctaatacaaatagactctcaaaagaatctagaagaaagtatgttatagacataaggttatttgagaagacttccaagagaagcatgatgaataccacttggaaaagaaggaaagggcagagaccaaacaaggaccagcccaatatctcttggactttatttaatgtcataatgtcagaataaagggaaagatgaatttttttaaaaaaggaaagggttagtgcagtgctagacatagcacattggtaattagtacttttttttttttttttttgagacggagtcttgctctgtttcccaggctggagtgcagtagctggatctcagctcgttataacctccatgtcctgggctcaggtgattctcctgcctcagcctcctgagtagccgggattacaggtgcgcgctaccacactcggctaatttttgtatttttagtagagatggggtttcaccatgttgcctgggctggtcctgaactcctgacctcaaatgatctgcccacctcggtctcccaaagtgttgggattacaggtgtgagccaccgtgcccagccagtaattgtttattccattgtaaattctttctgtaggtaaaactacagggagcaatgaatgattctatacttttcctccaaagaaatgggaacaagctctaagcctctctaatcaggaagaaaaatacacaagttaatcaaaaagatagtaaagaagttgtacttcatttgaagacaatatgcttttgccattcttgtggtctttggaaacattttgaacacaagctccatacccagaaacaagtacaaggaatttttatcttttctcaaggccagctgtttgcagatatggtggttgatttacatttatttctggcatcttgttttctcatctgtgggcttttattctcccctcactaaaagctgttagtgttcccaatcaacagtcccactggatattttcttgcagacagctcattgtcttcacttgaatttactatattagttccaatggagacattttaaatgtcaaacagctttggccttttttctatgaaatgtgctaaagtatcctaaacttaattttattttttatttttatttatttatttatttatttatttttgagacggagtctcgcactgtctcccaggctggagtgtagtggcgtgatctcggctcactgcaagctccctacttcccgggttcacgccattctcctgcctcagcctcccgagtagctgggactacaggcacccgccaccatgcccggctaattttttgtatt

SEQ ID NO: 586686 - DNA, 4001 bp, Homo sapiens
atcaaaaatgctgggcgatattagtaggttgggccatcctttcccagctgcttggtgaatgggaagggataaggtagctaatgaatggcttttttcttccaagtctggtcacacccaaggtgagagatttaagagtcagctctgaccctagccagctgtatgaccttggaaaaatccacttaacccctctgggtctcagtttccccatctgaactgcaaaaggatcatctctaggagacagctaactcctccttgagcccagcaacagggtgtgcaaaggcttatatttctcatcacattccacagctgccacctgaacaaattttaaatggaaaatttcttttctagttccattccatgcttatagaacaatttttatagtaattttattagctcattaaaatgtatttgtgagggaatgcctgataataaaaaataatcattggcatcttgtgagagtgtgactgaaatagcaacaagctgtcttaaatttagtgtcccacttcatttggtccctggtagcacagggacctaccagcacaacaaaccaaagaccccctccatctcaccccctctttgcacacctacagacatacacttactgtcccacaccaggacacagactgtagacagtttggacattgggaggtcttcctcgcccagcaaagccactgatcagatcctgcatgaagaacctagtggtatcctttttcagggagacccatggggattagtctcaatttctctctctttccccaagagtaactctcccttcccacctctgtaaccagtcagaaaagaaatgcctgcgtgtgtctagctagactggcaactagtaaggatccaactttttttaagttttattttaagttttattttaagtttattttaagtattttattttaagtttttaagtttaagggccaacaacaatttatcaccttctcctcttcccacgagcactcccattctactccacacatgactgccaggacagataccctacctttctctttatgacctcctcccacattccacaggaaacctctcctacccaccaatgcacaccaactcataaatgcatcccaatattttacacacatcctcagactatcccctaaaattattctgtatttaatcaacagaggcaccaaacccataagcatagtgatatatttctcaattttctgattataattggttcttcagttacattttctcaatcacaactccaaatcctttcagagggaaaatgctctaatctcactcccaaattctaactccttttattcatttctctcacttcatttccagaatctgaaagaatttctgcctgctacctcaacctaagtattaaataattcatcacacctcacacagaaacacacacaaacacacaggtttcactacaatcaggcttatagatccagccttagttcagaaaaatatacacacactaagaaaaaaagataaatgagaattttgttccatgtgtatgcatgtgcataatttttgatttattattggtgttgtttatctttgtgtttaacaaattaacaagggctttttttttttttttgagacggagtatcgctctacgacccaggctggagtgcagtggcgtgatctcggctcactgcaagctctacctcccaggttcacgccattctcctgccttagcctctccgagtagctgggactacaggcgcccgccaccatgcccggctaattttttgtatttttttagtagagatggggtttcaccatggtctcgatctcctgatctcgtgatccacccgcctcggcctcccaaagtgctgggattacaagtgtgagccactgcacccggccaacaagggcattttgactaaaagagatcaactcaaattcacacacacttgtagacacacatctgtaaccgtaaaagaatacaaggttcacaaacatacctcattacctcttgcagccgctccctctctgtctgaaggatggcttagcaataaaagcagaggagcacagtccaccaaagcaaccaaagatctggtaactatttaccgacctatcaagaaaatgttaatggctttcaaatgcaaatgaatggccagcttttatttccaggatcagaatttttagttaattagtaatcgtggtcttgctctaagaaggacatccttaagacttttggaaggaaaagccagctcccatgacccactccatcccctccaggcactgaatgtttaatcggtggtgaggacaccctgtatgtctggtaagagaacacagacacaatttgtagatgataaagagcaaaaaataaatgaccccagtattccaaaagagccctggtctcttgcactgactccgaatctctcaggaactcactgacgtttagtagcacaatctgatgattgtgatggaaggaagttgttttaaaaatgttttaaaaatagttttcttctttcttctttaaggtgtccttaagcttgtttgcagtatggaaatcctttaacagtctggtgactcttgaactgcctttgcagaactataaataagagaaatctaacaagactgactccatcttgcttctaacctcccaggctaaattatgttttctaggggattttttttttttttggttggctttttgcttattctagtacaaaggccaagaaacctatgagagggatttagtttatagttaaacttggagtcaagggaaaatgatccccctccttgcctggagcttaaaggcgcattcataaggcaaggttggaattatggtaggggcttagactttgctaaagaataggcataaacaatgtcctgccatggcttagtttgtttttctataagttgcttactgccccagtcacacaaccagtgtcacaaaattcataacttccccaactaccaaagataacatcactgtattggtctgttttcacacttctataaagacatgcctgagactgggtaatttataaagaaaagaggtttcgttgactcagttccgcaagggtgggaaggcctcaggaaacaatcatggtggaaggggaagcagggacttcttaacatggcggcaggccagagagagtgagcaagagcagggaaaactgctttgcaaaaccatcagatctcatgagaactcacccactatcatgagaacagcatagggggatccgcccccatgatccaatcacatcccacctggtccctcccttgacacatggggattatggggattacaattcaagataagatttgggttctgacacaaagcctaaccatatcaatcactattgtgaaacctaaataactggtcttttagatatttgttagcatttcagtagaccaacagacaccacctagtcttgaggccaacacacacacccctcctgggaactgactcagttgcacaaagacagttttaggtgctcctgtgatttcattccctgccaatcaattatacaagttccccagccccatgcccaccaaagtaccctttacaaaccttagcctttgaatcctgagggagaggggattgagaagtttttgcctgctcttgtttggccaacactgtgattattcaactctttatttactgcaatgcctgctgttctcattgatctttttggagggcagtgggcaagaagaacttatggagctgagacatgcttataaacccctcttagaattaattcttaggccaggtgcagtggctcacgcctgtaatcccagcactttgggaggctgaggtggacagatcacctgaggccaggagttcaagaccagcctggccaacatggtgaaaccgcgtctctactaaaagtacgaaaattagccgggcatggcggtgcgtgcctgtaatcccagctactcatgaggctgcggcaagagaatcacttgaacccaggaggcggaggttgtagtgagctgagatacaaagaaaatcaattacattgaaacacagttactataatattttttaaattatagtttgt

SEQ ID NO: 586687 - DNA, 4001 bp, Homo sapiens
ccctgtctgtctctgtgaccggaacattgctccctgcatctggaggctgaggggaactggcacaggactcagtgctgggtacacagcaggtactcaataactgtcagtgcactgaggagatacacagcgaccaccgtgccagtgcatgcacatgcacctgtgctcaccctgggcactgcccacaggcacgtctgagccggcagggagtacagagaagctccccaggaccagagggccccaaatctccggcgacaccagtgatccatgaagctggtggccagcagccggtggcaacgcctctccccaccccagaggcttttcgggctggccccagcttggatgcctgggctcagccaccagccagcctcatccaggaccctgcagccccgggggtggggtctcgcctgccttcctccccattccgggtccttctcccagtctccaggtccctggccctctccttcaaagctcagcgtcaggctttccatgtggaagcacgcaccttgtgcccagcatcttctgcctgcaagggcaacagaggcacgttcctggcgagggagagcggctgctgcccaaacgccaaatggaagcccctggtggctccacgaatgcatgtcacaacctcagagcaggggccgaggctgttgctcaagaccccagcttcctgcagagagtgggactggcaggacagtgtccaggggcacaggggaggagccccggatctgcgcaacgggctggggctgtgtgacctgagcaaggacccctcctcttagcctcggttctctggtctgcacagctgcggcctgacagaggccccaggtgctgcctgtggctcctcccaaccccgagaccttcccaccaaaaacacactcaggagaacgctttgcccagaaggtgcctgggctgcaggtggccgttgagggccccccttcctgagcgtctggcccccagccccgacacacagatctctgtcccagcaagcctggtcccagtcatttagccaaagagcgtttgctgagtgaataaacaatggagcaggtccaggctcgggccaagattcagcaacgggcagggccagctgcccagctacacacgccaagaccctcctggggagagacagcctagtcctcaacccctgccacctcctgctgctcccagagatgggggctgttctccatctcgggccctatcacccggggcctcagaggcccggctggcagcagcacctggggtctgggggcttcctgccctgcactggccgctcccccacagtggccctggccacatccccccaggggcctgaacaggctgggggagggtcagtgcccatacgagggctatccagggaccccatctggtggccaggcccctgggcagtgagagcctcggagggcccaaagaggcagctctgctggcctttcccagggacacagagggggactggactgaagccagggcccaggagccgccctgagtcacgtctgactcagccggcgggcgggggatgccatggctctggcccagctgcattcggtgtccgggcacactgaggccactgaggacagcctcggggggctgcacggtgggctgtgcctgcccagtcccacgcctcggctccccatcccccagccgcccgggcctcagtttccccgcccgtgtcagcgcgcagccgaacagcagaagaatcaaagggcgccaggcaggacttacatgaggtcgggccggtggcggtgcaggatggcgcagaaagccaggccgtcgcggaacgacgtggtcatgttgcagatattcacgtcgcggtagccctcgcactgctgccggcaccactgttgcagcgccctgatggccgccatgtgggcggcgcgcccgccgcgcggcggaaccgccctccgacaccttcccgcggctgtgccgcgaccgcccggccggcgggacagacgctgggaccgctacggaaccgccagacccacggcgcccagccccagctgagccggactgagggcgacgagtgccgggtccctaagagaagccgagcccggccccgcccccgccggccccgcctccttgtaggccccgcccccagccgccaagtcctgcctccggataggccccgtcctcacacctcccagccccggcataggctcccgcccaggcaggccccacctcccgacaggccccgcccccagccgccgggtcctgcctcctgataggccccgttcccacgcctcctggccccggcacaggctcccgctccaggcaggccccgactccggacaggccccgcccccagcctccaggttttgcctcccgagaggccccgccccacgccgcccggccccagtacgggctcgcgccctaggcacgtcccgcctcctggtaagtcccgcccccacgctgtcaggtcccgcccgacaggccccgccccacgccgcctggcccctccccaggccccgccccgccgctgagggccgagacccccaaccggtgaaggggcgcggtctgcttgggggtcctgccattctggacccctgcggagacctggaattttctttttcgccgccccacctcccaccaccatctcaccccaccgccatggagaagaggcaggaaaggccgttgacaaacggggacactgaggctcgaacaccctgccctgtctagggcctcagccctcggcagcccggcctcccggggagcaggaggcgccttgtgtttcagggtttcaaaggacgtccgcatctggtttctctttccaggccgctacatgccagcgggggttccaggcaaggcagaggtgaggcctgggcattgccagaggagaaactgaggccaggaagggggccgtggagccggagttgcacagctggcctgtgcttttcttctgggggcctgtgggcaggatctgttcctggggcaggagattcctcaggctgacttgcagggtagttccaattttccactttgagctgtgacagaagaaataaggaaagtccctctgctggggccctaaattatcccagactggcccctggccccgttatccttggggaaccttgtctgtggccacgggggctggacgagggcggaatcactgacaccagccatgtgaggggggcctaccctcctggctgtggggccagggcttgtctgggcagggcctgcaggaaggaaggtgttttcccgcagtagcccctggcagggagtcagggcagcttctctgtgccccttgggaggaggagaaactgaggtcttccaaccccagccaatggtgctgttccagatcttttctgaggctggtccctggtgagacaccgtagtgttcatggccagctgcctaagtgtcagtgaggcctgtgtgtaggtggtgagctccccgtcaccaggggcatgcaagcagctgctaggcagggagcccttgtggcctgggaatgtggctggccctaaccgctgctccgccacagtccctgacctgcggatgtcaggggatatcgtgccagcacagccggagccggtcctggcaccgggttttcttgactcccagggcaacggttaggagaaccggaagagctggaaaagaagggagagatcaagaagcagaagcagcggggcagtgggcggggggaattagtgggggatgggggacacaggggtggacaggcgttagggcccagctcccttaaaaggagtggtgtgggaggtggcctgggtttcacttttatcgtgaacttttaccactgcacacttaaaaagccatctcactggtcaccccgtggcccatcctgcgcggcccccctctggcaccagtgagctgggaggcagcatttgtgacgtttgcccaccagcacctcacacaccatgtccctccagggtccccgaagccaggagccaggacacccccaaacaaatggtcctttctccccactgcccacggctgccaccctcccatccagacgacctgtccccccgcctctgcccacagggctgcctcctgcccctccagc

SEQ ID NO: 586688 - DNA, 4001 bp, Homo sapiens
ttacaaaacataaaatacgagttttagcataaaatttaaaactttgatttacatgactctcaacggagaatatcagcatttcttcccatgttatgcacctaaaatacttctattgccatccacaaaatctgatgacagtaattcatacagaatcaaaacttgagagaaaaagactagctaaatcttctaatttcacaaaggagtaaagtgaagaccagatgtttgggtggttatccaaggtctctcaacttccgtcctagattactgcaaagaaaaggatcagctacacgatatgcaggacgtggtgcaaaataacaatgcagggcccctcatttaaaaattatttacaatgtccagacagtgacagcagactggccattaaactaagtgctagccattctaaatgctgggctctgtgctactgcacaggttgcacatcataagagtagccctgtatagagaggtgcatctatgtccacccttttaagaagtgtattttttttcaccatgtaatatacaggataaacagttccttgctcatgaacatacatcaccaagaatctggtgtaaagaaaacaatctagagtcagaaatcctacagccactccccagctcagatcctaacaaatcttgtaatactccaaaaccataaaaccgagataaaatctatcccatttccatctcacaaagctgtgacaatcaactgaaatgagctcttcacatcacacagatgttagtattactaccattcccttaatcagccctgaaagttaatgttttttccaaattttggagacattaaaaaattaggtgtagaaggggtgcggtctgcaataattacagcttgtatttatatcctcacctttcaagtttaacaagtctcacttcccatcagtgatttctcagcaaaggaaagccatgctgattctgtgttcattcaccagaatatttgcaacagcactgtccaaaagaaatacagtgtgagccatatgatttaaaaatttctagtagccacatttaaaaagtaaaattaggtggaatgaaatttaaaaacacattttatttagccaacatatcaacagcattatcctttcaatatgtaatcaatgcaaaaattattgaggatttttacgtttttttggcaccaactctgggaaatccgatgtgtattttacacttatagcacatctcaatcccatgtggctactggacagtgaagtccaacacattaaaatactactcagtgtacaaaggatccaaccacatgctttttgatgttgtcttttacttttcttaccgtggcaaattacgagagcggtttcaagaaatttccaccatcagcatcttcgaggagatgcactgcacatatccaaatttcccttaaaatatacaaaaggcctgcagtcatttgctaacctattcagcaaagtccacaacatgtgtgaggtttcattcatcctcttaattttcattactcatatgagaagagaacagagctcaccgggagacaggccgtttaagaagtatagtatttaagagggtacaacgggaacagggcacgttgctattctaggtaaagcaggaatctgagtccgactctcccgctccaggcacctggctgagcctcccgggaaaggctgggacgccgctccccacaagcccgccgcggcgaaggctgtagcgtgttccctgcgccccgaggaggtctccgcaggtcccacggccgcccgcagcccccggtggctcccgctgaggcccggccaggcggccggccgcccggcgcgattaccctacagcgcggaacgcgctccccgccgagacgcccgggcctttcaactaggctatctccggcccctcgctgcggccgcggcgctcccgagagtcgagacgcgaaccgggtcgcgctcactgacctgaggtggcagcgcggccgccgcacagccgcttccggccgggacaccgccccgcccgccgcaggagcccggacgcgggcaagatggcggccgcggccgtgcggcccgtgacctggaccactgggctgggacccacgaccccaccaccacgcctggaggacgcgcagcggcgcctcggccttggaaggggagtttcccagcgcgagccccgcccttccccgcccgggaggcgcctcggggcggggtcactggccgggaggccccgccttccgcccgaaagcgccggtgcaccccgcaggccctgcccgtgggtccacaggccggatccccgggttcctaggctgggactgcttctcagaaccactctgtcgtttttaagcagggtcacacactctagctcactgggtccattttaatttctattaaacatttttttttttttgcaaatgatgtagtaggagatccaaggtgtttggttaatgatttattcactcattagtcattccacaaacttgtcttgagcacctgttatgtacccagcactgtgctggaatgctgaggagacaggagtgaagtaaaaagacatggttccggcaggaaacaggcaaggagagccttgacttggtagggctaacacagtgctacacaggagggacgcccgctcggtgtcgggggtcagcaaagcttccttaaggaccactaggttgagacaagaaggatgagtatgggattagccaggaaagggaaaagggcagtgggaactggaagagaagagccttctaggactgggaaagagcaagtgccgggtcaggagagaggacatagcagtgaggaggcagtaggtatggatgaatgagcagaggaagtggggagagattaaggtgctttcagaaacgggttggaaaccagtttagtgagtttggatggcatttacctaaaggcaatgttagagtcatcgaaagtttttaatcaggcaagtggtatgatcagttttttgttttgttttgttttttttgagacggagtctggctatatcgccaggctggaatgcaatggcgcgatctctcctcactgcaacctccgcctcccgggttcaagcgattctcctgcctcagcacctcgagtagctgggactacaggcgcgcgccaccacgcccaggtaattttttgtatttttaggagagatggggtttcaccatgttggcgagggtggtctcatttcttgacctcgtgatgcgcccacctcggtctcccaaagtgctgggattacaggcatgagccactgtgcccggccagtatgatcagtttttgcgcagagagctggagggatagagtatcagaatgagggatgatagaaacgcaggttaccagtggcacggagagtgggcatggagagaagtgggggccctggggaatacttagaaggcgggatgaacagagcttggtgactgaccaagtgaatgacggtgaaagaggattccaagttttttgttcccaaaactgagtgaatggtgctgcctcaggtgtcacgagtctgacctcgaggcagtcttcagatgtctgacagtctttgcttgtctgttcatgattaaaagtgggtggtcttgggcttgtggtggtgatggctgtaaacagcataatgagcttagtcctgatgatcttggtggcagatggttttgataagatgatgagtttggggaaagtattgcctttccaatcctgccattagaagaatgtaggctgaagaaagtgctgtattactgagaggagacatgacagtattcatcacttcaaacactatcttgccaatcttctcagtggttttgaccctggcctcaaacccccacacaaaacctcagatcaatacaaatctcttccttatccactcctactatacatagttgaggacaacttttctgcttgcactcaggagatgacactgcctcctacttcagaaaagaaaattaaaactattagctagaatttgcacaacctcccactgcttcctccttccctcctccaacatcttgattcactaccattcttaccttcttttaggtgacaaagagtaagaggaggaaccccatg

SEQ ID NO: 586689 - DNA, 4001 bp, Homo sapiens
tacatagggcttatctttctgatattgcctttgcaatatccttgttataaagaggaaggaactgaaaacaaacaaaacaaaacaaggttgtcttgtccagggacatagaggaattggtaaaaaagacaattagtacacaaagtgatggggtttcctatttgtagtgtagccttgtagtcacactgtgttctccgaatgccacaatgctaacccaaaattacttgtccttcctgggcctggattccattcaattttatgccttgtttagtctaaatgatttccccagcttcgacatgtatttatttatttatttatttatttatttatgcgtttcattttagaagtatacttaaatctactctttactcgagtttgtcttagttctagtgctgaggaatgaagattctgggtaaaagaaatcaagatgatgttttttttttctaggctttacatttcaaggattgtttctcaaatggcaactggcagtctactcctcaaatgatgacgttttccacaggaattacaatttaattggaatattttgttttcaatgggaagcaaagatttctttccaagaggatcagtttgataatgttttaccagctagtgctacgagaccaaatataaaccagttctgagaaacaggaagtgaactgactggtctagtctgagtgtccctggcagtgacgcaaatacagaaatcaaattaggaaaacaagatatgtgggtgtgaggcaatcgataataatccaggatgctacaacataagcaagaatgcctttaacccgatgccattcattttaataacaccctgagcagtttgatttccacggaacacgctggtgattagagagcagcaggagcttgggttccctagcaacagcatgtgcttttgagacagtcattagcctttcagttaatcccatcaaccccttacctctaaatgtatgactgacataaaaaaaatgatgttttagaaagtgctttgaaatttccaggagtgcaatggaagggaataatcataattaaaaagttgtctggagaactacactccagtgaaggaagtaatgttcctacgtgccaagcctgtccgtatatttccctgctctcagttgtaggtttctgaatcccctgtggcaaagggcaagggaggtgaaattgttcagagtttcaggcagtcttctcacctaaagtgagtagtattgcaatgtctcttggaatcatggctctgaagatgaggagagaagcgggatgggcagtttgtgtggtgaggaggctggctgcaggtaggctgggagggaatgtcacacatagttttctttctcctttaagccgaatgaggtatgctggtcaaaggaacttggggaaggaggatggtgaggggaatgaagttcttcttcctattgattgttttgttgcaccagaggctgtttgtccaaggccactggccaagagcattattttcgtggctaaagtgaggttgggcaggtttcccatccctttcactagttttgaacaagacaacccagaaagcgcagcaaggctctgggaatatgatgtgggttggcttttcctactcagctgcaccttaaagcgccaggccgatgggctgatacttctcaaaccctgaatcattgcctccagctctgtcctgggttcaggatgcaccactccaccctctgtgtagcttggggtcaacttcggggcgtcactccaatagtaattattgctgcgtttggctggacatccttattacggcctgggtccctctcagctggaaactgggctccttcagtttggctggggtgacttctagcacttcccgccgccccaccttacccccctgcgcgctcccttcccaaggcgaccacctgcaccgccccacttaccatctgccccgcggggagggccccccgggctagcggagccctccctgctcccgggcggctctggaggagctcggtgtttgcctctagcccttcgctaccggaggatcaggttcctcccctcctccccctccagctccggccgccgccgccgccgccgccgcctccttcttgcatgacacagcagaaccgcagctgctgcagcaatttcaagccatccgcccaggaagcgccgcaaccgggactcgggaggggtggagggggcgaggcagaggccgcggccccaggggatccttggccccactgtgcaccacacactcctttcccagcccaggggcacgcgaacaaaatgaggctcaagctgaccaggccgagccggaggaacgctggggcttggcagcagaagggatgggaccagagagaagggtgtggaggagaccccagtgagggccaggacatttcaggtaaagagaggtaagaagaggcccagaagtcaagggccagactgtgaaggtgattagaggtcaaaagaggtaaggaggtagagttgcaaagaagagaggccgagctgggaagggcgtgggggtgggggtagctgcaggggagggtggggggtacagtctttggggaggcccgagctgagcccccaggcagaaaaggggctgagttgggaggcaagggaggtaggaggaaagggatgaaaagaattaggcatgagataggaaggtaaaacttgggagagatattatagaattagaagggttggaatggagctcattcatcatggctgatgaagtaaactgatgaggtggagagagacagagtcaaggcaaggccaaacgaaaagatcttccatcccactcttcagtttcttgcgaagtttttcttgattccgccaatccacacagtttcctttataaaatggaaaagcatgaactaaaaaacccagaaatagctatctggcttagatttacaggataaaatctccatgtctgtaaaaactttaaggcagaaatttgggatttatggtacaaaccctttaagggactgtgagtcagtaatacccacagcactcaacattgtgagtttccacacatccctggacttgagtgagtctttccaagtgtttgttaatggtacaaatgatgacaaaattagtggttcaaaaatattaaagtgcacatgctttttgctttctctatgtatacagagattacatatatgtatactttctagcgtctagcaagtatggtatggctagggataattatgtttttctgattattttgtttcccatcaaacaccccacgaattttacagcagaccgccttcttgtcaccatttgaaagaatgtggtcagaaaagtaatgcaaaaactgccactttggttttgtctgtaccttccaggtcatatctccgtacctcacttcctgacacaaacaagttttcactgttgtcagcaacaaagccctaatatagctgcggaagagaaaaactgcattgcattttgcctcctgcaagcatcatcaacagttactggaggaacgtaattccagaaagcttgaaagccgtggtgatggtaattatgtatcaaatgcctggttctatttctgttattattgttttgtcatttctgttttcccagcgatctgactgaactcgcagagggacaaatccagtttttctttttgacttttgtcaaactaaatcaggcctgatagaaaactcattgctctccggggaaacaaagtaggagccacgaaatgtcattttaacagagcgtgggtttggtgactgtaggaaaggatttgaggacgctccttctgttcggcttcctatgtcatgagcacaggctccacgcacgcacagacaccacggctcccggatgctgtggctccccgatcggggctcctgcagcgccagaagcccctccgggatgcttcgaggggctcccggtgggtggaggtacggacgccgctgcggccgccgccgccagtcctgctgctgttgttgctgctgcagtcacgtgggagcccctttaagtttccatagagaggcctctctggtgtcacatgatggacatgatataatgaaacaacattgtggagaggaaag

SEQ ID NO: 586690 - DNA, 4001 bp, Homo sapiens
caatctcaaattgttgctttctaactccaaaactagtgttctgcccactgcaaaccaggggccagagtaacaagacacaaaagattaaagttgccatcccactaaatcatttcctgcttgaaatgtactttcttaaaatgtctatacaacagataacgcggatggtacttgtgttatccaagcctcaggcctacatcaaaaatttaaggagtgacgtcctggaaatacgctaattcaagaccagaaaaatgtctctacagttagatcaaacaatgccacaccaattcccaactgtccataatcctagcctgggtatagaaaaaagctgaataacttcagatccaagaacaagatagcccagaatatcagaggtcaagtacatagggccacatttcaactccaactacatggctggactgtttatctggctcactctcaaattcaaagttgggtttcagcatcaatcagggatatggccatgaataggctacgcaggccagatcaaaccacaggtcacttggcacccttcattgggccagatcctactgaatgccaacccttgacctggtgaataaaatgggaggctggcagtcatgacagattcttccagttgcagctccattttgagattcttcattgatataaccagtgaaatcaaatttggataaatgtgaagaatttctcaaatacagatggaaaacttacttgagtatgcttcacagatctagtcacttttttgtttagtaaaatactcagtaaaatatattattcattaatttgtttcgttcataaaatcgtttcggtcctgtgagatggttagagggacaactagcacttttcttcaggatctgcacagatcttaaccctttactaagccagttcctccactagcatgtaaaattggagttagatctgctcctcctttcaaagataagccaaagataaataagatactatgtaagagtattttcagcatttcagaaggaatttgctagagaaaaaaacaccaccaacaaaaacctaacaatgcaactgaatttttttaacacctaaatcagggatcaagacaaagccggtgttgaaaatcaaattcattaaagccagatgtttctatgtttgagtttccggactgggaaacgtgtctgtgtccatacaaacccatcttctaatgagccgtaatactgaaattcttcggtaacgtccctccttcccactccctatctttttcagaacttccaggcattaaagacaacgtctgccaatcctacaagttctccccgcctgctaggattcagatggattccacaacttttcagccttccgtgacttttaacactactctagagctaatcacttttaatgaccccactctggaatagacactcctcggctttacactttgtcccggcagcaatcgactgaactgtcccccgacgccgaccacctcggacgacctcagacattcggggtagtttgcccgcgggcagggccccgccaactccgattcctgccccagagccgtccgccccccaagccctcctcaacctcaacccccaaatcccaagcgcagaaccgctgggcttccggttctcctgtgcgcgccccggatccgccacacacctcgccccttctccctgggctcgctctccggaccctaaccccttcccgagcgaggccgagcaacgctctcagcagctgaactaagactccggaggccgcacgtccccctcagcaggccccgcctgggcctctcggctcggctgccctccattgcacccctggcccaaccgtgctgacgcggaagggtggggcagcacgagctcaaggcccggcacttactcgggaaggtaggtggaggaaaaggagctccacttgtgtagcgcgtaggggagaagccggcactcgggcgccgcagcgacagctccgccagccgccatcttgtcagcaccgtagcggccgccaccgaccgctggcagcgaacgggaggaggggagggggcgtggcctgctcttaaaggggccgccgccctccccggccgcccgcgctccccgccccgcatcgttacccgagcccagcgccgggccaatgtcctatctcagggtttcccacgtcgctcgctccttgacggctgaccgacactgggtctgaggtgtaagcgctttccaggcccttccctggggcttggaggggaatggcgcaaaggacttttcttacaagcagaggtaaggaaaagccgagatgattacgaacagaaacacgttgtagttatggagcaggaagggaaaataagaagaccaagttggaaaagggacgcctgtgcgcttttggaagccaccgccctcgccagtttataagtcctttacggaaacaacactgaagggagctggagggcagtagctaatgtgctgtcctcctggagtggtcctggttttaaatgtcttgtccccgccttccagagtcagatggagacaggaaaaggaaatggtcccgtgtcctcctaccctgtttggtttgcagtctgtgatgcccttcattgtaaacatttcttgtgagccgcatcctactaatcttgtggcattggtttgctcgggaatgacgttcacccacagacctgaaaagtccttacagagttgggaagctgcgtgtcatcattttttcagttggcaaatctgcccactttgaactgacataattgtagcctaaaagttcagagagagagtagttcaggaaaaagactattccttcttcttagagggaacagcagccctgaaaactatgtggacatcataccagcttcttacaacaaaaggtgcacttggtctaaattatctggcagctctagataacgttctcatcaagtacctgtttgttgtagttatgcatatttattccttggcttagccactgcagttaccaaagagtatgtcgcttattgtctaagaggttggactcctgaaagcctggacagtgtcatcatcttcacctgaagagtggaaaaattcaagcaaagagtttctcaggaaatgaccaagtgagtcaaaacacctcaataattgtattctcttcccgttgtaatcattaacctgccgaaattccctccagtcctttcctgacttcctgtttctatagatggaaattttaatagtgggctctactaggatatcaaatcaaaaaagccagatagaaaggccaggcccggcacggtggctcacacctgtaatcccagcacgttgggaggctgaggtgggtggatcacctgaggtcaggagttcgaaaccagcgtggccaacatggtgaaaccccgtctctactaaaaatacaaaagttagctgcgtgtggtgacatacacctataatctcagctacttgggaggccgaggcacaagaatcacttgaacccaggaggcagaggttgcagtgagccaagatcacaccactgcactccagcctgggcaacagagtgaaattctgtctcagaaaaacaaataaaatacaataaaataaaaaattacatgtgctttctgtgttgcagcaggttggaaaagcatgtgttccttaagggaatgctgtaactgtagtgacttgggtcgggagctgccagagacagtgggaaagggccagagaatgttagccccagagatgatatagtggttatctttgaagaaaatagacactttaaaggggaggaattaactcactccaattcctttgggccccagattttataattccacttcttaccttaatgtaagtcaagtccttgttcttttccagacatagttcctgagcaatcttttttaaaaacacatgttaattagttcttcttaagcttaaatccttttggtgactttcaatacccttctaaactgtttaacagaggcccttcataacctgccttgatttttctctccagcttcctcaccaccaccccccccccacttttctcctttgcgcttttgacatctgcccactaactagcacactgaatttgttcccatagag

SEQ ID NO: 586691 - DNA, 4001 bp, Homo sapiens
ccttggcctcccaaagtgctgggattacaggtgtgagccactgtgcccggcctaatttttgtattcttagtagagacagggtttcaccatgttggccaggctggtctcgaactccttacctcaggcgatccgcccgcctcagcctcccaaaatgctgggattacaggcgtgagccaccacgccgacctagccaccccgacaggccggtttcaatcttttaaaagatgtaactagcacatatagatcaactgtagcattgtaaaagggaaacagatattcaaataatttgctccatgagtagaaactttaaaatcatcattcctggcaatattccacttttacaatccaccgatgaataagacaagtgacctgaaattgcgtttatgctttctacatcccattatgtaaaataattaagcttatccttcacaccttaaatgtatcatatcaaaggctgagagaccttcgaaggtcgccaggataaatgtatcacatcaaagactgggaaggtttcaaatttcacccttaatactacaagttctaattaggaatcatttttacatacttgcatataaattataccacccaggtgaaaaccggcatttcagttgatttattcaactgatagaaaaagaaaagcttacagtcgctactgatcactatttaaaaaccggaaaataaaaaacgtacaattaaatgccctcttctgcgtagagctaggtagttttttacaaccatacacatccatacaaccgccatcccttaatttttctaatattttcgtctcgcatatcaaaccaaaaccaaacctctctctcttccgggagcgaagagccctttcactcccttcggaagatgcgtaaatttcaaaagaggaacatagcgctgggggagggtaataatctgcagctcaaaaaaaccgcgggtggagaagacgaccccggcccccgaacgcctgcttctaagacaaagctcagcaccgccaacctcgacaaacatacaaagaagaaatacaaaagcttcttctcacagttgggcggaggatggggggcggagggacggagggacgtgaaaagacgttacaaacggatggcacggagagaggagagggccgggagccaggcaagctcgctggggccctcggcggggtgtctaggcccggagaggatcgctgggagaccggcctcaagtgaccacctcccgagccccgggagccggaggcagcggcgggggcatccttccagcggcaggggaggagccagcccacctctccccgatgcgctcgcagccagctcaggcagcgctcagggaagtgtaagcggcggtgcagccccgcggctccgcagtaatcgcgcaccgccaggcctccgcggacagcgctgagggctccgcggcccagcgggggttgacgcagtgactgggggaacgcggcggcagcgggggccgcgagggctgcagagatcgagacaacgccggtccccgccctcccgcgcctctagccgcaggccggccgccctcctccctcccgcgccgcaggcttggcccgcggccccctccccgcgcccggcgctccgccgcgcaacgtcctacctgcaggtgacctgtttagtccagccgccgccgctgccgtcgctgccgccgccccctccgcccgcccccagggacggggcggtgactgtggggatcggggtgggggaggctgctgccgccgtcgccgctgccgctcctgctcctgatgttgtggctgttgttccgggagttgcagcctccgccattactgtttatcccacacagcaaaggccccggaacttccgggatcacatagttccggtccggctgcggggagaggacggcgaggccaggcgaggggaggggaaggacactgaggcacccgttcggtccccgcctgctacgcgtcgcgtatctgagcgctctcgccacttcaactgcgggcccagagcatgcgcgcccgcggcccgcccacggcgccgctcattggtggaggggacgtctcctccggaaaggggcggggcaaacgggggtctgtacaggtgtgtcctaggctcgaaaccccggcgacgaaagtccatagttagcggctttcttcctagcagaggctgatatagtggagctggggctggggactagggacttgcagtcggaagacctgggtttgaatctgcactttcccatttctctagtaatatttgagctaggtacttgttctatctgagcctccgtttcagcctctctcgaataaggatgacagcagacccacatatggttgctgtgaggattatatgatgtccttagaaatcactgagcttagtgcctggtacatggtaaacacttaataaaggttatctcattcctggtatcagagatgtgatcttggccaagtattttggctgagcaatgctctagagggctggtccccttatctccaggcttccctttctaagccatgggtcttctagcaaattatcctacctcttggtgctcctgctttctcctctgtaaaaacgacaataataataataataggccaggcgcggtggctcacgcctgtaatcccagcactttgggaggctgaggtaggcgaatcacctgaggtcatgagttcgagatcagcctggccaacgtggtgaaaccccgtctttactaaaaatacaaaaattagccgggtgtagtggctagtcccagttactcaggaggctgaggcaggagaattccttgaacccgggaggcggaggttgcagtgagccgagatcgcgccactgcactccagcttgggcgacagaatgaaattccgtctcaaaataataataatagtaatagataatagtacctacttcagagatggctgtgaaagttaaatgagaatctgtttaaaaacctttgtactggccgggcgcggtggctcacgcctgtaatcccagcactttgggaggccgaggggggcggatcaccaggtcaggagattgagaccatcctggctaacacggtgaaaccccgtctctactaaaaaatacaaaaaaattagccggtcatgatggcgggcgcctgtagtcccagctactccgaggctgaggcaggagaatggagtgaacccgggaggcgaagcttgcagtgagccgagatcgcgccaccgcactctagccactgcactgcagcctgggcgacaaagctagactccatctcaaaaaaaaaaaacaaaaagcaaaaaaaaaaaaaaaaaaacccctttgcattgtgcttttcacactgcagtgaatacataatgagtaacaaaatatgtctggaatatcctagctttttttttaatgcgtctttaaaattgtatgtatttaaggtgtaaaacattgttttaatatacatgtacctagtgaagtgattactacagtcaagcagatttagcatatcacctcacatgaatattttgtgtatgtgtttgtggtaaaaacccaagctctactcttagcaattttccagtatacaatacaatattatctattaacattaatcatagtcttccgccgggcacggtggctcacacctgtaatcccagcactttgggggccgaggcgggcggatcacaaggtcaggagatcgagaccatcctagctaacacggtgaaagcccgtctctactcaaaaaacacaaaaaattagctgggcatagtggtgggtgcctgttgtcccagcaactcgggaggctgaggcaggagaatggcgtgaacccggcaggtgaggcttgcagtgagctgagatcacgccactgccctccagcctgggcaagagcgagagtccgtctcaaaaaaaaaaaaaaatcatagtcttcatgtggtacattagatctctagacttattcatcctacacagctgcaactttgtcccctttgacctgatgtccccattccccactccactcctggtaaaccactgttctactctgttgctatgtattcaactttttcacatcttcacgtataagtgagataa

SEQ ID NO: 586692 - DNA, 4001 bp, Homo sapiens
ttgcccaggctggtctccaactcctgggctcaagcaatccttggatgagaaccttggcctcctaaagtgctgggcttacaggcaggagccactgtgcccagccagagatttactattaatatttgggtatttgggaagaaaacacagtcctctctaccccagctatctctgactggggttacatcagccttgagtcagcctctgggtgggggggcaattttgggggtgcgctctgtcccttaccttgccagctccccagaacctctcctctttggtcacccatcgtcagggttggaagtgaggccccctcccaaatagagtgatgtgtagtatataatgagcagccaaagttggggttgggtgggaaatgggagacccttaggaggaggagtgccggcatccggtgtaccaggaccttagatgccctgtcccaggcagtcgcgtgacatttggggagggagggagaagggacgggaatttgaactttccacacgggtccgacgccctggccgatcgggttgcaacatgacctgggccaggggccagagcttgtgggccaaggttactccgcctccagccaatggggtcgcagctgggcggctgcggttgggggcaggcaacactcccctcacagtccccaccccagctcctgctcccccgcagggcggcaggtgccgatctgtagccagcggttctcagaaggggaggaggcgccgcggaggaagaggaatatttgcacagagaaaagatcaaggccggccgatccccctttctcccctacgggttttcggttgataatttatactggcccctcaactccggggaactttgctccagggcactgggccaggcctcgggttcgcgccctcctctgggacgcggggcgtggagcggcagcggggcgcggcctgtgcgctctcggtggcactaagcgggggtcccaggcagcgacgggcgctcagcctagtgtggcgacgtgggtaggcgaacccaggcctcccgggcaccggcgtaacctctgcgagctgcgcctcttggacatttctgggacatcctcctcccgccacccttaatgtagcagatcaagaagaggtgtctcagcaattgcggggaggtggacgtgagagtgggccagttccagtccactttggttatgaactgggacaatcaggggcgctgggagtatctcagggtccaggaatagggcgggcttgggccggggctgctggggagaaggccgaggcctgcagggggtcgggtggagtggctccagagtggagagtggggatgggcgcgggtggcctagggaccaggggcgcctggcatttttgtagggacggaggggctgggaccagagagaggggaccagaggtccaggtagaggtggggcgcaggcggtctgcgcttcggggaagagggaatgggggaggaatgggaatcagaaatgcgtgggtccgtcaggggccagcgggctgggccgctgtaggaggacctcggggctgggagaaagggggtgtccagggcgtgatcggagcctccgggagccgcaggaccgggctcgggtggggtgttgagggccccagcgcgcagtcctgccccggaccccccccccatccccacctggaagccaaggccgtcagggcccggaaccgccctcacctgtaggccaggctcaagcactcgaagaggcgtgtgagtgtggggtcgatactgcgcggcccgaagtcggagggccccacggacccctcctggtcgcgccgccggggcagcgagtcgctgtgcggcgacgacaccatgaagtgaccgctgtggatgacctgcgagcggagcaagccgcccgcgctgcgccggagactcgggtcctccgagtctgtgtccgagtccgagtctgggctgggcgcgacccgcgggacctgcaagcccgcggccagacctgccagcgcgccggccatggctgtcgccgccgcaaccgcctggtccctgctccgcgcagcgcggggaacagctcttggccagccgggcctcattaacatagccccgcccccacaccataggccgatcgggtgggcggggcctgggacggggcggggcttgtattagcataatccttacgccaggtgagaacccggtgctctggagctctggcgggttggccccatctcccttcccgtctttccttggagtcctgatagagccgcccctactttgctccaaagggatattaagaaaggtcaggccggacgccaggggctcttgcctgtaatcctagcactttaggaggccaaggcgggaggatggcttgaggtcaggagttcgagaccagcctgagcaatatggcaagacccccatctctaccaaaaaaatgcaaaaattagccggacatagtggagaaagcctgtaataccagctactggggaggctgaggtgggaggattccttgagcccaggagttcgacaatatggcaaaaccctgtctctaccaaacatacaaaaattatccaggcatggtggcgtgtgcatgtagtcctagctactccgaaggctgaagtgggagaatcgcttgagaccaagaggttgaggctgcagtgagcggagatcgcgccactgcactccagcctggatgacagagtgagaccctgtctccacaacaaaagggtcccctatcacacctgagcctgaaagcgcctcaggacctggggtttgttctttcaggggcaccctcctgtgaggccagagatcaccatctcccctcacctaactcctgcccttcacctccaacccccgccccccatattagctcttctgggtcctccacataggtagaagcccccaactctcaggggcctgatgtggtaagcccaaggtaatgcccctgaagggcctggcccacaggaggttgctaacacctctagttaacatggtggccaacacggtggccgggcgcggtggctctcgccttcaatcctagcactttgggaggccatggtgggtgggtcacttgaggccaggagttcgaaaccagcctggctaacatggagaaaccccttctctactaaaaatacaaaaattaccggatgtgacgatgcgtgcttggcttataatcccagctactcgggaggctgaggtggaagaatcacatgagcccaagaggtggaggttgcagtgagccgagatcgcgccctactgcactccaccctgggcaacagtgaaatcctgtttcaaaaacaaaataaaatacttaagaaaaaatatatattaaaaaaattgtgatcattacttcacctgcacagagaggcccaaggggagcctcgagggactgttactggtagggatgggtggctcactggaaggtggacatcccctaggcaggcatctacccaggagctctgagccccttctctcactgacactgaggtccagcttttgttcctgcttctttgtatttttatttatctatatacttctatttatttattgttttgagacggaggctcactctgtcacccaggctggagtgcaatggcacgatctcggctcactgcaacctctgcctccctggttcaagcgattctcctgccttagcctcctgagtagccgggattacaagtgcccgccaccatgcccagctaatttttgtatttttagtagagacgaggtttctccatgctggccaggctggtctcaaactcctgaccttaaagcgatttgcccacctcagcctctcaaagtgctgggattccaggcatgcgccaccgtgcccagcctatttatatatttttagagacagggtctcgctctgtcacccaggctggagtgcagaggcacggtcatagctcactgcagcctcaaactcctgggccaaagcgatcctcccacctcagcctccctagtagctgggactacaggctcatgccaccaaacctggctaatttttttttttttgtagagatgaaatctgcttcagcctcccaaagttttgggattacaagtgtgagccactg

SEQ ID NO: 586693 - DNA, 4001 bp, Homo sapiens
gtccatacctggaatcccagctacttgaggctgaggcaggaggatcgctcaagcccaggaatttgaggctgtagtgaaccatgattgtgccactgcactccagccttagtgtgggtgacagagcaaaaccctgtctcaaagaaaaaaaacaaaggccgggggcggtgggtcatgcctgtaatcccagcactttgggaggccgaggcggggggatcacgacgtcaagagattgagaccatcctggctaacgcggtgaaaccccagtctctactaaaaatacaaaaaattagccgggcatggtggcaggtgcctgtagtcccagctactcggaaggctgaagcaggagaatcgcttgaaaccaggaggtggaggttgcagtgggccgagatcatgccattgcactccagcctgggcaacaagagcgagactccatctcagaaaaaaaaaaaaagtaagtccagtccagtcacacaatctggtcaacagagtcaatccgcaggaacttatcctcaagtccttcccaagtgcatcacatctctgggtgggattccccatttaggagagatagactcatcatgtcccccagggggaaacagagggtgagactgagggggaaggaagggttccgtcctgtccgccagccttccctaccctggacaccatcctagccctgagctcctcttgtcaagctgtgctcaatatgaccagaacttgtggagacttcaggagcaccagggcactctcaacaaccagttgcaagtgacaagccacactgatgtgagtaggaagaatactgccagcccatctcccactcaccacccactggagcctcagcacacaccaggcccctctgttcacgaaggcaggggaccccaggtggcagagggggaaaggtgacctggaggacagcctggtgccccctccaaagaggcccccgcgggctgctcccagcagacgggtctgtgctcgccgaagaccactggggaccgaggagcaactttaggaggggatttttcatgccagcttccaggcaagcacatctcccaacaaaatcttaaagatatgtaaaaggagaaaccccctccccacgcccaccttcttcactggaattccaagcaacaggagcctaacttctactcagatatcacaatgtctgttaatcaccattttacaaaagagacggaggttctgaggggaccacggagttcacactatgaaaagaccaggatgtacaggtgcctccccccaccgcaccccgagcctcagtttctccatctgaaaagagcacttactctttcctccgacttgctggaagggtggacagaggtggtaccaacgccttttaccatgaacaagagtgcccaagagagaccgagcgtaactgcccgagcgtagctggcctgggctccaggcgctgcgcaaagtgctctgcaaggaccagctcgcttaatcctcacggcgacccaggacacggggactcgcataacccccgttttgcaaacgtggaaatgaggttcagagaagtgaagcgacttgcccaatggcacccagcgaggaggcgcgggcgccccggttactccatcccagcgagaagacgaggctgcctgggtcctggttttctcgggcgggggtcaggggtccgccgatcccctctagcgctccgggcggcggggcccgagaaccaaggtggcctccgcggcccccgccgccgcgcgcccctccctccctccccgcggacctccgcggccgccgctcacctcgcgtatttcgtcttctggaaatccagcagccggggggcgaacatcgcggcgcttccatgggaatctggccccgggctcagagcgcgggtagctggcagagcctggggggcgcggcggcggcagcagcaggttggagggcgcgcggcgggggccaaggggacctggtcggcgcccggagccggagccggagcccgagccggagctggaggcgcccggagccgccgacgccaaatcccgagcagatggtggcgggggcggggcgggcgggggcacgggggggctcccgggctcgcgctgccaatcgcctaagcccggccccctccctcccgcgaccccgccgcctccgctgaggtggaggagggtcgtggggagatgggggggtgggagaggtgggggtgaggaagtgggcgtaaggagtgggggcgggacggggggggtcctggctgcgcgcgcgagccacccatcgcccaggcctggggcggccctggccccggccccttttcccggtgccctccctggaagccaggaggtggggggttggtggggtggggagcgggaagtggtagtagggggagtgggaaggattgggaaggcgggggcgccaggtgggtggaatgcaaagttgcggggctgagggagtcggggagtgggaaggggacgggagtgggaacagggggtgctggaggggttgggggaagtgggaagtggggggtaaggagagtgggaatggacgtgggatgagtgggaagtgggggcgttggtggggagtgggggacttgggggtgggggagcggaaagtggggggttggggggagtgggggacctgggggtggagggagtggaaagtgggggaagttggggggagtgggggacctgggggtggagggagtgggaaatgggggtgttggggggtggagggagtggaaagtggggggttggggggagtgggggacctgggggtggaggaagtggggggttggtgggaagaaggggaactggaggtggagggagtgggaagtcggggtgttggggggggagtgagggggttagtgggaagagagggactccgaggttggtggaggtgggaaatgggggtcttggagggagtgggggacctgggggtggggggagtgggaagtgggggtgttggagggagcgggggacctgggggtggagggagtgggaagtggaggagttggtggggagtgggggacccgagggtagggggactggaaagtgaggttggtggggggtggagggagtaggaagtggataggggacttcccaatccagcccctttttcccaggtatcctccaccagtactttttccagtgaggagaaaaaagccctccagggctagacagggctggaccgaccccgctggccccaacttggctggaaggacagcggacactgtgcccgtcgtccccagtgtagctgggcccagcacctaccgcctgcctgtggcttgcttgctccccccactgcctggctccctactgccacgtccctgctaggcacaagggcccctatgggacctgcccgggaagggtcagggcctctgggaaaaccctcttcccccaagacttcatgactctgaggaccctcctgaccgccatgacagggtcatttgcatctggtggctggattcccgagtacaaattccagctttctcccgtaggagacctggcccaggttctgggctttggaaaaccaaccaccctatgggaggcttggaaccccggggggctgatggagggaagacaggcttccatgtgaaagacatgccagcggcacctgaggaaccctaggattggtccccagatccaagagaaggcccttcgtttgcacacacacttcaccctccttcccaagccccagcccctattcctttttattaatacagtaatgctttatttgagatcctgctgaacattcagaagataaccccacccactccctctgcccccagggagctaggaccagaagtgggaaaaagacaaaggacttcacctttttttcttttttttttgagacggggtcttactctgtcgcccaggtttgagtgcagtggcgccatctcagctcactacaacctctgcctctcgggttcaaacgattctcgtgcctcagcctcccaagtagctgggactacacgcgtgcaccaccatgcccagctgatttttgtatttttagtagagatggggtttcaccatgttggccaggctggtctcaaactc

SEQ ID NO: 586694 - DNA, 4001 bp, Homo sapiens
gtattcaccagggaccctcccaccttccaaatgttttccttggcatgccccctcctcagggtgcgggcggcaggggcaaggcctgaggagactagaagccttttcaggacaattctcattacgcaaattacaggcagaggcgcaggcaggatccggttctctgtgtgttcaaggaggcctgcccggctttatttacataatttcgcacggttacatcacagagaattttatgacctcaaaacgagacttcccttgatttcccaggagcctgacaagtgttggacaataaaagaaagaaagcaaaggaaagaaaggaggccagccccaggcctggatgagctcaggtcccccgggatgggcagtttgctttagaggatggcccacgccccctgctttagtcaaacaaggccccgaattcccaacttgacaatacattagaactttaattaaaccactggctccggagggaccatttgggaaatgccatccaacaggcagagacaaccaattaaagaaaccaaacaggttttccccggaccagcgaggaggacttctcagaacacattccgccgtctttggcacggttatgcctgcccttttggattgccaggtgcagatacctcttctgaacttaagactggttgtgtttaaaatttggccaactctaggtcaacatttggaatcagaaataggcaaggtgtctcactttaataaattttctgagtgaccctgggctccacgaagctccagaaagcacccctaggaggcctaggaccacgggcccccggggctggccagccccctccgtgggcaacttagcgtccttggctctgggaaatgcaggtcatattggtggctttctatcagaagggatgggccctgggtcggcaccctgggtttaagcccaggctggcaggggattcgcagacgcagacgtgtctgaggtgaggggcagctttccctcttccagccagtcagtagggctgactctcccaggtgagggatgggtgaccactggggccttcttggagctgagctaggaaagcctggggcggctgtgggcaaacagccttctgcagggattcttctcaccctcttgtgacttctccagcctctggggtcctagattttctctgtttagtcacaaccacagcttccagcaaaggaatctgaattctggagtgtttatttctgttttcttttttgcttttcccctgctctgcctgcatctccccagtctaaacaaatccactcagacagaaacaatggggtctctttgtttgggtgttcggcggctgaaagcgttgagccatatacatctgctcggcccgactcataagtagctgaccccgatggggcgagcggggagagccagagccccagagagccagagccccggagccccagcccggagagtccgcgtgtgccaggaaagcctgaggggcccaggcctctggcgaggtgtcccgcccggatggagaggaagctgcccgaagcccagcggctctggggtggggagaacaggggctccctcggccccaccttggaggggcattcgttaccttgttgggcgcccaggattccagggcaggcacctactgttgagagtccccccatagctggttcaagccaggccacctgcctcggccatcgcaccccggatccaacgcccttccagaggagggcagcgccctggtaagagccgggggttccctgggccttggccttgcctccccgggcctccgaagcccatttctcttgtttgctgctcctgaagcactccctctccctggaggggccgcgggtctctctaacgccccagtgggggacctggcccaagttcctttccccggtgataagccctgacccccattcccgggcctgcctaattcagggcgctctcggctcgccttcccccggcgacttccttctcctgcagccttcgggttaatcattagatctcagtctcacacctccaactgccccttcccgttaagagaggaagagaaggcaaggcctgcgcatggccattttaataattcgctgcccgtctcatgcctgggggtccgggcgagtcctcgcaggccccgggcagagccgaggcggcttcgcagctcttcccccgctcgctgggagccaagcgcagagaggggcaggcggtgccggtggaggatgcgcgaggccctcccgccacgcgcatccacgggggccgcagggtactcacagttgaagtcgggcatcttaggcaggatcatgcccgcggtggacgcgcgcagccactggtccagctggaaggtgccggcgcccagcttgatggggtcggcggggtgcgcggggtgcgcgccttgcacctgcgggtacgagtaggagagcgccgggtgctggcccgccagcgcagccgccgccgccgccgcggagtagccgtagaccgggtggccgtagagcgccgcctgcgccgggaggcccgcgccgccctgcgcgcccccagggtgcagccccagcgccaggcccccagcggcggcggcggcggcggcggcggcggcagcggccgctgcgcccggatgcgcgtggtggtggggccccccgtgcccgccgcccgtgccgccgccgccgccgcccgcgcccaggaagcccggcttgggcagcagcgcgcagtgcgcggccagcaggcgcggcggcgacgggctctcggcgcgcaggcggtcggcgggcgcagccggcggctccgaggacgcggggctgcagctgccgctagtcccgccgctcgccccgccgccgccgccgccacctccggtgccagatgcggcggcggcgagcgacgtgaccaaggccagcggcgcgctctgcgcagaggcggctcgtggggggtccaccgccagcagggcgtcgatgcggaaatttttggatttttccatcggctcgtttggggctggcgctcagggcccggtggcgggcgacgcggccgtgtgcgggctcgcggagtcagtgcgtgcggtgcaagcccgggggctcggtattgttatggtggttatttgccaataatcaaagtcgccgccggaaactcagccgagggtgaccatggtcccggcgcctcctccgtgcgggccccgccccgggccgcgctcgcacaaactcccacgcgagtgcttccccgcgtccgggcccgggagcccggttctttgcgctgcagccctcaggcgaccgcgcggaggccgctgccgccgtggtggggacccgcgcccctccgcgcacttgaagctcagcgcggcttccgattggcgcgcgcagcgggggcccggggagggccgcgggctccgccattggccgaggggcgcacctgtcaccgtcccggccgcccgccgccccgcccccgcgccgcgaggtcctaagcagcccgggctgttgcgcggcgctggcgggcggggacaccaacggggagtggatactccgaggctcaacctggggcctctgcccgccctcccctgggtgcggagccggacggcgggcactggcaacccccgggcccctggagagccccgcggcggcccaagacccgctcccgagacacgtgggcccctccggacttggttggtccctggagccagctgcgcgcgtcctctccggcctccttgtcggcgctggagtgggtccacgtctgccttgcggagcgcggtggttccacgctcctgagcgcccacgctgcgcagacctggccgctctgcgaggcgacggcagcgcactgaagaccgtggtgtttcccaagccctccctgctctcgggcctccagggcgcagcaggggagggttttgtccccgtggccaaagctctgcaggtcgaaccttatctgctatgggaaggccccgcattttcaggtgtgtgtgcgggggtgtgggggtgtaaacgcgcatgtgagtgtgagtttggcctccacgaatcctctctgggagcccctgccccagtcaaggcggagacggtagatctgggcgctctggcctgcagaa

SEQ ID NO: 586695 - DNA, 4001 bp, Homo sapiens
tctgcctgcatctccccagtctaaacaaatccactcagacagaaacaatggggtctctttgtttgggtgttcggcggctgaaagcgttgagccatatacatctgctcggcccgactcataagtagctgaccccgatggggcgagcggggagagccagagccccagagagccagagccccggagccccagcccggagagtccgcgtgtgccaggaaagcctgaggggcccaggcctctggcgaggtgtcccgcccggatggagaggaagctgcccgaagcccagcggctctggggtggggagaacaggggctccctcggccccaccttggaggggcattcgttaccttgttgggcgcccaggattccagggcaggcacctactgttgagagtccccccatagctggttcaagccaggccacctgcctcggccatcgcaccccggatccaacgcccttccagaggagggcagcgccctggtaagagccgggggttccctgggccttggccttgcctccccgggcctccgaagcccatttctcttgtttgctgctcctgaagcactccctctccctggaggggccgcgggtctctctaacgccccagtgggggacctggcccaagttcctttccccggtgataagccctgacccccattcccgggcctgcctaattcagggcgctctcggctcgccttcccccggcgacttccttctcctgcagccttcgggttaatcattagatctcagtctcacacctccaactgccccttcccgttaagagaggaagagaaggcaaggcctgcgcatggccattttaataattcgctgcccgtctcatgcctgggggtccgggcgagtcctcgcaggccccgggcagagccgaggcggcttcgcagctcttcccccgctcgctgggagccaagcgcagagaggggcaggcggtgccggtggaggatgcgcgaggccctcccgccacgcgcatccacgggggccgcagggtactcacagttgaagtcgggcatcttaggcaggatcatgcccgcggtggacgcgcgcagccactggtccagctggaaggtgccggcgcccagcttgatggggtcggcggggtgcgcggggtgcgcgccttgcacctgcgggtacgagtaggagagcgccgggtgctggcccgccagcgcagccgccgccgccgccgcggagtagccgtagaccgggtggccgtagagcgccgcctgcgccgggaggcccgcgccgccctgcgcgcccccagggtgcagccccagcgccaggcccccagcggcggcggcggcggcggcggcggcggcagcggccgctgcgcccggatgcgcgtggtggtggggccccccgtgcccgccgcccgtgccgccgccgccgccgcccgcgcccaggaagcccggcttgggcagcagcgcgcagtgcgcggccagcaggcgcggcggcgacgggctctcggcgcgcaggcggtcggcgggcgcagccggcggctccgaggacgcggggctgcagctgccgctagtcccgccgctcgccccgccgccgccgccgccacctccggtgccagatgcggcggcggcgagcgacgtgaccaaggccagcggcgcgctctgcgcagaggcggctcgtggggggtccaccgccagcagggcgtcgatgcggaaatttttggatttttccatcggctcgtttggggctggcgctcagggcccggtggcgggcgacgcggccgtgtgcgggctcgcggagtcagtgcgtgcggtgcaagcccgggggctcggtattgttatggtggttatttgccaataatcaaagtcgccgccggaaactcagccgagggtgaccatggtcccggcgcctcctccgtgcgggccccgccccgggccgcgctcgcacaaactcccacgcgagtgcttccccgcgtccgggcccgggagcccggttctttgcgctgcagccctcaggcgaccgcgcggaggccgctgccgccgtggtggggacccgcgcccctccgcgcacttgaagctcagcgcggcttccgattggcgcgcgcagcgggggcccggggagggccgcgggctccgccattggccgaggggcgcacctgtcaccgtcccggccgcccgccgccccgcccccgcgccgcgaggtcctaagcagcccgggctgttgcgcggcgctggcgggcggggacaccaacggggagtggatactccgaggctcaacctggggcctctgcccgccctcccctgggtgcggagccggacggcgggcactggcaacccccgggcccctggagagccccgcggcggcccaagacccgctcccgagacacgtgggcccctccggacttggttggtccctggagccagctgcgcgcgtcctctccggcctccttgtcggcgctggagtgggtccacgtctgccttgcggagcgcggtggttccacgctcctgagcgcccacgctgcgcagacctggccgctctgcgaggcgacggcagcgcactgaagaccgtggtgtttcccaagccctccctgctctcgggcctccagggcgcagcaggggagggttttgtccccgtggccaaagctctgcaggtcgaaccttatctgctatgggaaggccccgcattttcaggtgtgtgtgcgggggtgtgggggtgtaaacgcgcatgtgagtgtgagtttggcctccacgaatcctctctgggagcccctgccccagtcaaggcggagacggtagatctgggcgctctggcctgcagaacccaagtcggcttgcagacgtcgcccacgtgcctgctcagtggagcgggtcctcggtgacaaggctcttcctcgctgccgagggatgcccatgggcttgcgggagtcaaggcccacacacctcggccctgaaaaacccgtggggcccggcatccttcggaagccctgccgctgcgacccccggccagtccccgggcaggagcggggaaaggctatgtctctcgtgctgccggggcctcctgggaagtggagaggaaagggcttcccgtgagtgagcgaggcacggagtgagcatccaggtctcacccctcccccacacgcacacttcaaatatttacagtaaaaccacttccaagggcgtttttgaagctgaaagaatccacacaggggtcgggaagtcaagcggcatcaacaccaggctttgtcaatagcgccattagacccagttatcttccccagcaagcgtgagaactgggagggagttccaggttccagggcttgctatgcaggtgagaggtgaataaaggaccggaaggggctgtggagaggggagagagccaaagagaaactcagtgccaggtaaacttcaaaattagcacgccaggttgctacaagagggatttttaaaaaggcaaatatagagaccttgccacttctcctcaaaaggcttttgacctaggcgagagttgatgacagtgactctgttgccatgagtggtatcgttttcattataacacagggtagttcccagatgcacaggactggttggaaggttaggaggatggcaatggatgagtaactgcaacttggagtaaatgtgatctggctttgcagagccgaccactggtaaaaagaaatcccaggcattcacatggagtttgtcgtgcctttagatgtctttgtggtgacacaaatgcagttctacctctcactggagagagggaaacacgcgcatttcttgaacacctactatgtgctatgagctttctgcaattctcatccgtaatcttcactatgacactagaaggaagatttttatcatctccgtatctccattttcttttctttcttttttttttttgtatttttggtagagacggggtttcaccgtgttagcgaggatggtcttgatcgcctgacctcctgatccgcgcgcctcggcctcccaaagtgctgggattacaggagtcagccaccgcgccaggcgccccccactttt

SEQ ID NO: 586696 - DNA, 4001 bp, Homo sapiens
agatggagtcttgctctgtagcccaggctgaagtgcagtggcacgatctcggctcactgcaacctccgcctcttggtcccggttcaagctatcctcctgcctcagcctcccgagtagctgggattacaggcatgcgaaactatgcccagctaatttttgtatttttagtagagacgcagtttcaccatattggccaggttggtcttgaactcctgacctcgtgatctgcctgccttggcctcccacagtgctgggattacaggcgtaagccacctcacccactctctctttttttcttttctttttttgaggcagagttttgctcctgttgcctaggctggagtgcaatggcatcatctcagctcaccacaacctccgcctccctggttcaagcaattctcctgcctcagcctccagagtagctgggattacaggcatgtgccaccatgtccggctaatttgtttggtatttttagtagagatggggtttctccatgttggtcaggctggtctcgaactcctgaccttaggtgatccacccacctcagcctcccaaagtgctgggattaaaggcttgagccaccacaaccgcctttttttttttttttttttagagacggtctcactctgttgctcaggctggagtacagtggcgcaatcatggctcactacagcctccaactcctgggctcaagcaatcctcccacctcggcctcccaaagtgcttggattacaggcatgagccatggtgccccaccaaggccccgctcttgaacatcatccactcccaggccgggcgcggtggctcaaggctgtaatcccagcactttgggaggccgaggtggctggatcacttgaggccaggagtttgagaccagcctggccaacatgttgaaaccctgtctctactaaactacaaaaattagccaggcatggtggcgggcacctataatcccagctactagggaggctgaggcatgagaatagcttgaacctaggaggcggaggttgcaatgagctgagattgcaccactgcactccagcctcggtgacaggagactcagtctaaaaaaaaaaaaaaatccattccctgtcccactgcctgagcttaggcagcggggagctcaggccccagcacaaggaagggctcctaggtgtgggagggagatggggagaggtaggaagcagtttttctgcagggtgacccatcaccttgacaggataataatcccttagttgtctccaaattgcccggttccttatccactccgaacgccttccacctgcggacaatgagatactggtggacgaacccccggagtcacctcccctcaccccccatgtccccaccatctctggctacctgggcccccatccggagctcaccttggttgggtgtgtcccagtccacatagagccacaccaagtaaaaaacagagaagggccagagtgacgtgaagaggaggacaaagacaagaagggagaagaaagggcctgggggaagggagagaaagaaaagagttcacttctgaaactccatcattccctccagctgctcccttcccttcctccccttcagaacaaccagctctctcctctggccctctcccagaccagtcacctggtcactgtcctcaggcatgcaagccagcagcccagccactctccctccaagccctactcccctggcagaccccaggcacccacgcctccccagctctcacccatgaagaggaaagtgagcacatattggtaggcgcccactgcttctagatgctgcttctgcaaggttttggaagtggttgggggctgcagggttgtggcaactcccattgcagaagctcccctcttccagcaggatcccagaacccggaggacaaacgatgaaggcttggatgtggacctgggcagactttctccctacaggagcccagctttgggggcctggctaagtcgcaaatcacctcccagagtagcgtgtgtccgtaggtgtgtgagtggggagatctttggatccagagccccagatgtctctgggttttttctcagcctgatctttgaacttcctgtcagtcaccagtctgggctggctgctgggtggggctgggaggcgtaaggggtgtgcaagggagaggtgacacccgagtgcctcaggaattgatgttggagtggacaagagtgatctggctagccccacccactgggtcccaggtgctggaaggggccagaagccctgctgagactatttgacctccagtcggggtgggggcagggcctggtccggggcatctccaggaatgtcaaggtcaccacccctgcctggacctcccccgccatgcacaaacacacacaggctgcaggtctgtttcccactttaatttttttctttttcttttcttttcttttttttctttttttttcacacgtctcggtcacccaggctggagagcagtggcacgatctcggctcactgcaacctccgcctcccgggttcaaacgattctcctgcctcagcctcccgagtagctaggattacaggcgcgccaccacgtctggctaattttttttttttttttttttggatttttaatagagatggggtttcaccatgatggccaggctggtctcgaactcctgacctcaagtgatccacccgcctcggcctcccaaagtgctggaatcacaggcgtgagccaccgtgccctgccgccagtctttaatttcacttccccacctgcagtcacccagcggacaggcgaggccaggcggtggggcgcgcctccgtgaggaccaggtgtctgtcggcggggacaccatagcgcgcctggtgctcctcgaagagctgcgtgagtcgccccacgtagcgcgcttgcagcgtgtccacctgggccggactgggcggggggctctgctgcacgggaatcgccgaccccactgcgggcgggacgggaggcgatctgggctgggatccccggttctcctcctcttttcctccttggggataggcgggaacagagttcagggctggcgcggtggccaaaggccagtctgggtggccccaacccgggacggggagggagcgggccctgggccaggatcgcggggcggaggccggggctcacctacggtgcggatgggcgcgcggaagggcagcgggaggccccggcggcccaggaacagctgcagggccacgcttagcagcggacgcagagcctcctgcgtcctctgcacccacgagctctgcgggttcgggaactgctggaagagctcattctccctggagaagacaggcactagggaggccgcaggagagcatggcgcggctgactcctggccccggggtccgcgggtggcgccactctcctcctccccggcccggcagccctggggcgtccccaccgggtcacgctcgggtcctcacccgagttccagagctgacttaaccaatctcttctgattccgaatcggcaagctcagttgtccgggttttgcctccagcgcctgcaggggccctcccacgccaggacagccacctggccaccactgaggcagcggggccttgacaaaggagaccaaacctggggggagggcagaagctgggggacccaacgcctgggtcttatttacttatttatttagggacggagtcttgctctgttgcccaggctggagtacagtggcctgatcttggttcactgcatccttgaccttcagggctcaagtgaccctcccacctcaagcctcccagtagctgggaccacaggtgtgtaccaccacacctggctaaatttttgtttttgttttttcttgtgtagagatggggtttcactgtgttgcccaggctggtcttgaactcctggccttaagcgatcctctcgcctgcgcctcccaagtgctgggattacaggtgtgaaccaccgcacccagccaaagcctgggacttggaaagaagagtggagaggacatggggaaaggagagctgggccccagtgtcccctggg

SEQ ID NO: 586697 - DNA, 4001 bp, Homo sapiens
ctctctcctccagtccctcagcattcattttctctcttctgtggacctatccgacaggcagggacctctcttgatctcatacccagcacacaacttggtacagggttaattgctcaatacaggtttcttattgaactgaactgagctaccacatgataggaagtactgcggttacagtcaaggaagaactttttcctctaagtagaagtcagaaaccagggaagctgtaagtcttttccccctcacctgatataaaatctcaactcggaggaatgtttccaccaaaagacaaaagactgaaccaggagacttcttcaaatccaatttatctcatctctagggaaatgctagttcctccctccctacagaactcaagatcccagtctcccaactcacgctcctggaagtgtctggccgtgggtggtggtgtcccagcaggaggccctgggcgaggcgctggatctggctgtccctgaagctcaagggggtacgctggggctctcagaatggaggtaatgtccttgcgtcccaccactcggccctcagctccttcctcagacagctcaatgcggaagcggtcctggacatcatagtggctgggaatgggtgccacatggcgaatcacactggtcccaaggtaggagagaagcccattggggtgaatgaggcagtaatccaaggaaatctgggcctccccccagaagtctctcccttaggggcacaggcagaggatagggcaaataggttaaagggggcaaggtctcagacctcagacaacaggtggcagcgacccctggcttccacaagcctccccaccctcccagctcactcacatgtcaatgcaagactggggcttcacatatccctctgcgtcaaacaccgtgtatttggcaggtgctgtgcacaggactgggggatagagacacacacagacaagccctgccatgtgggtcatttaagtcccctctgccttctgccccggaggctggacatgactttcccagtccaccaaagctggacgtgcaaccctacccatctgactcctccagccaacacaaccccccagtgtccggccaccagcccccacgaggcgccgatccctttacctcggaagcgaagcgcagttcctgtggggttatagagggtcagcagctgtcggggtccgctccgctggtccgccctgaatactagatccgggggaaagaccaggaccgggacaacgggtcccaagggaggaggggcgccccgggacccccgcccagggggccccggacccaccagctcctggtcctggggcgccccacggcgcatgcaggctctgggcggtcggacatccgagggcagagctcaggggacagggcctggagtcagagctggggggcgtgaggggcgaaaggggacaagatgagctcccggagcagggcctcgactgatgccgccgccgccttggaaccccgctagatggggctcccgcagacccaggcccagggcccccaagacctttcctcttccagctctgccccaggttccttcggacccgccgagccccacctcgacggccacgcccaccccgctaaacccggcccctcgcagctcccaacccggccttctcctcacgcccagctcacgatctccataagccccgccccgccgctggcctcgccccttccgggcgttcccggacgcccgcctcctctctccagccagactccgcccgctgcagcgggcgcctgcagagcgacctgtgacgccgcctgcttcctgggagacctgtgtttgcgtctccggcccctccctaagctcggacacgggccccatcgggcttctgcctcaaaacggtcgctcgcgttaggatgcccaccttgtggttaaagcacctgccagtcagcttgtggtcagattaatgttgccatgttccagagagtccttttctatacttccgccgtacggcctctgtcattggctaggacgtctttgtttctgccgtaactatacgccgattggtgtgctgaaagaccaaacaacgccctccttctgtcgtctgcgattggctggattccggtgacgtaacagttgtactggctcgaactcgagccctgaagtaactcagagaaccgggggcggggtttcgaactgggctttgttctttcctccctattcttgagatggtccaagtcaatctcccaccgggaagcccttttcctcctcttcattccaggctctagaagcctctgcaggaaccaagcctgttttctttgcttttttttttttttttttgagacgaagtctcgctctgtcacccaggctggagtgcaatggcacgatctcggctcactgcaaccaccgcctccagggttcaagcgattctcctgtctcagcctcccgagtagctgggattataggcgtgcgccatcacgcccgggtaattctttgtatttttagtagagacggggtttcaccatgttggtcaggctggtctcgaactcctgacctcaggcgatccacttgcctcagcctcccaaagtcctgtaattacaggcgtgagccaccgtgcccgccctcttttttgcttttttagagacagagtctcactctgtcgcccaggctggagtgcagtggcgctatcattgctcactgcagcctccaactcctgggttcaagcgattctcctgcctcagcctcccgagtagctgggattacaggcgtgcatcaccatgcctggctttttgtaattttttgtagagacgatctcgctatgttctgcaggctgttctcgaactcctgggcccaagcgatcctcccacttaagcctcccaaagtgcatgagagccactgttccttccccaggctcaaagtctgttttctatgggttggaggttcctcccatctgggactccagactaagtcttgcctcctgtttctcaccttcctgtgagggacgtgggaaatcactcacatttgcacagggaattaagatttgctgatttcaaacccatgttgtttgagtaattatatattttaaaaaaggatttgctaaaccctgccactttaattgcatcgaatcttcaactccttttacagcctggataaggtgaagaatctgggtctctgagggcacccagttagcaatggagcaaagacaaagttgatcttatctgaaagtctcctctgaacatcttgtgtagaatccccgtgttctcttttacattttctttttctttttctttttttttttttttttttttgagacagtcttgtgctgtcacacaggctggagggcagtggtacaatcatagctcactgcagtctccacctgcttggttgcgctcaaccaatcctcccacctcagccttctgagtagctgggactacaggcgcgcgacttcacacccggctaattgtatttgttttttttgttttgtttggtttggtttattttttgagatggagtctcgctctttcacccaggccagactgcagtggcgcaatctcggactgcagtggcgcgatctcagctcactgcaagctccacctcccgggttcacaccattctcctgcctcagcctcccgagtagctgggactacaggcacccaccaccaaacccggctaattttttgtatttttagtagagatgatgtttcaccatgttagccaggatggtctggatctcctgaccttgtgatccgcccgcctcagcctcccaaagtgctgggattacaggcgtgagccaccgctccctgccctgtatttgtttttttaatagcacttatagtgatacatgacctcctattttattgtttctctctcctccagtagaatgttttttccttttcacaagagcagggactttgtttagttttctgttgtatctttaggacttatgacagtgcctaccatttggaatgaacaaatgaatgagtgactaggatgaactttgagcagagatctgactggatttaggaagtgaaccatgagatatgtctatgggagagaattctgga

SEQ ID NO: 586698 - DNA, 4001 bp, Homo sapiens
gcagccacacaatcctgactcactgcagcctctgcctcctaggttcaagtgattctcctgccttagcctcccgactagctgggattacaggtgcgagccaccactcccagctaatttttgtgtgtttttagtagagacggggttccatcatgttggtcaggctggtattgaactcctggcctcaggttatcagcccacctcagcctcccaaagcactgggattataggcgtgagccatcacaccctgtatctactttttactgccctccaggggtacactgcaagtgtcctctccttcctacagcctctgtccccaccaccacaagaactctctcctccagtccctcagcattcattttctctcttctgtggacctatccgacaggcagggacctctcttgatctcatacccagcacacaacttggtacagggttaattgctcaatacaggtttcttattgaactgaactgagctaccacatgataggaagtactgcggttacagtcaaggaagaactttttcctctaagtagaagtcagaaaccagggaagctgtaagtcttttccccctcacctgatataaaatctcaactcggaggaatgtttccaccaaaagacaaaagactgaaccaggagacttcttcaaatccaatttatctcatctctagggaaatgctagttcctccctccctacagaactcaagatcccagtctcccaactcacgctcctggaagtgtctggccgtgggtggtggtgtcccagcaggaggccctgggcgaggcgctggatctggctgtccctgaagctcaagggggtacgctggggctctcagaatggaggtaatgtccttgcgtcccaccactcggccctcagctccttcctcagacagctcaatgcggaagcggtcctggacatcatagtggctgggaatgggtgccacatggcgaatcacactggtcccaaggtaggagagaagcccattggggtgaatgaggcagtaatccaaggaaatctgggcctccccccagaagtctctcccttaggggcacaggcagaggatagggcaaataggttaaagggggcaaggtctcagacctcagacaacaggtggcagcgacccctggcttccacaagcctccccaccctcccagctcactcacatgtcaatgcaagactggggcttcacatatccctctgcgtcaaacaccgtgtatttggcaggtgctgtgcacaggactgggggatagagacacacacagacaagccctgccatgtgggtcatttaagtcccctctgccttctgccccggaggctggacatgactttcccagtccaccaaagctggacgtgcaaccctacccatctgactcctccagccaacacaaccccccagtgtccggccaccagcccccacgaggcgccgatccctttacctcggaagcgaagcgcagttcctgtggggttatagagggtcagcagctgtcggggtccgctccgctggtccgccctgaatactagatccgggggaaagaccaggaccgggacaacgggtcccaagggaggaggggcgccccgggacccccgcccagggggccccggacccaccagctcctggtcctggggcgccccacggcgcatgcaggctctgggcggtcggacatccgagggcagagctcaggggacagggcctggagtcagagctggggggcgtgaggggcgaaaggggacaagatgagctcccggagcagggcctcgactgatgccgccgccgccttggaaccccgctagatggggctcccgcagacccaggcccagggcccccaagacctttcctcttccagctctgccccaggttccttcggacccgccgagccccacctcgacggccacgcccaccccgctaaacccggcccctcgcagctcccaacccggccttctcctcacgcccagctcacgatctccataagccccgccccgccgctggcctcgccccttccgggcgttcccggacgcccgcctcctctctccagccagactccgcccgctgcagcgggcgcctgcagagcgacctgtgacgccgcctgcttcctgggagacctgtgtttgcgtctccggcccctccctaagctcggacacgggccccatcgggcttctgcctcaaaacggtcgctcgcgttaggatgcccaccttgtggttaaagcacctgccagtcagcttgtggtcagattaatgttgccatgttccagagagtccttttctatacttccgccgtacggcctctgtcattggctaggacgtctttgtttctgccgtaactatacgccgattggtgtgctgaaagaccaaacaacgccctccttctgtcgtctgcgattggctggattccggtgacgtaacagttgtactggctcgaactcgagccctgaagtaactcagagaaccgggggcggggtttcgaactgggctttgttctttcctccctattcttgagatggtccaagtcaatctcccaccgggaagcccttttcctcctcttcattccaggctctagaagcctctgcaggaaccaagcctgttttctttgcttttttttttttttttttgagacgaagtctcgctctgtcacccaggctggagtgcaatggcacgatctcggctcactgcaaccaccgcctccagggttcaagcgattctcctgtctcagcctcccgagtagctgggattataggcgtgcgccatcacgcccgggtaattctttgtatttttagtagagacggggtttcaccatgttggtcaggctggtctcgaactcctgacctcaggcgatccacttgcctcagcctcccaaagtcctgtaattacaggcgtgagccaccgtgcccgccctcttttttgcttttttagagacagagtctcactctgtcgcccaggctggagtgcagtggcgctatcattgctcactgcagcctccaactcctgggttcaagcgattctcctgcctcagcctcccgagtagctgggattacaggcgtgcatcaccatgcctggctttttgtaattttttgtagagacgatctcgctatgttctgcaggctgttctcgaactcctgggcccaagcgatcctcccacttaagcctcccaaagtgcatgagagccactgttccttccccaggctcaaagtctgttttctatgggttggaggttcctcccatctgggactccagactaagtcttgcctcctgtttctcaccttcctgtgagggacgtgggaaatcactcacatttgcacagggaattaagatttgctgatttcaaacccatgttgtttgagtaattatatattttaaaaaaggatttgctaaaccctgccactttaattgcatcgaatcttcaactccttttacagcctggataaggtgaagaatctgggtctctgagggcacccagttagcaatggagcaaagacaaagttgatcttatctgaaagtctcctctgaacatcttgtgtagaatccccgtgttctcttttacattttctttttctttttctttttttttttttttttttttgagacagtcttgtgctgtcacacaggctggagggcagtggtacaatcatagctcactgcagtctccacctgcttggttgcgctcaaccaatcctcccacctcagccttctgagtagctgggactacaggcgcgcgacttcacacccggctaattgtatttgttttttttgttttgtttggtttggtttattttttgagatggagtctcgctctttcacccaggccagactgcagtggcgcaatctcggactgcagtggcgcgatctcagctcactgcaagctccacctcccgggttcacaccattctcctgcctcagcctcccgagtagctgggactacaggcacccaccaccaaacccggctaattttttgtatttttagtagagatgatgtttcaccatgttagccaggatggtctggatctcctg

SEQ ID NO: 586699 - DNA, 4001 bp, Homo sapiens
ctgtatctacttttttttttttttgagacggagtctcactctgttgcacccaggctggagtgcagccacacaatcctgactcactgcagcctctgcctcctaggttcaagtgattctcctgccttagcctcccgactagctgggattacaggtgcgagccaccactcccagctaatttttgtgtgtttttagtagagacggggttccatcatgttggtcaggctggtattgaactcctggcctcaggttatcagcccacctcagcctcccaaagcactgggattataggcgtgagccatcacaccctgtatctactttttactgccctccaggggtacactgcaagtgtcctctccttcctacagcctctgtccccaccaccacaagaactctctcctccagtccctcagcattcattttctctcttctgtggacctatccgacaggcagggacctctcttgatctcatacccagcacacaacttggtacagggttaattgctcaatacaggtttcttattgaactgaactgagctaccacatgataggaagtactgcggttacagtcaaggaagaactttttcctctaagtagaagtcagaaaccagggaagctgtaagtcttttccccctcacctgatataaaatctcaactcggaggaatgtttccaccaaaagacaaaagactgaaccaggagacttcttcaaatccaatttatctcatctctagggaaatgctagttcctccctccctacagaactcaagatcccagtctcccaactcacgctcctggaagtgtctggccgtgggtggtggtgtcccagcaggaggccctgggcgaggcgctggatctggctgtccctgaagctcaagggggtacgctggggctctcagaatggaggtaatgtccttgcgtcccaccactcggccctcagctccttcctcagacagctcaatgcggaagcggtcctggacatcatagtggctgggaatgggtgccacatggcgaatcacactggtcccaaggtaggagagaagcccattggggtgaatgaggcagtaatccaaggaaatctgggcctccccccagaagtctctcccttaggggcacaggcagaggatagggcaaataggttaaagggggcaaggtctcagacctcagacaacaggtggcagcgacccctggcttccacaagcctccccaccctcccagctcactcacatgtcaatgcaagactggggcttcacatatccctctgcgtcaaacaccgtgtatttggcaggtgctgtgcacaggactgggggatagagacacacacagacaagccctgccatgtgggtcatttaagtcccctctgccttctgccccggaggctggacatgactttcccagtccaccaaagctggacgtgcaaccctacccatctgactcctccagccaacacaaccccccagtgtccggccaccagcccccacgaggcgccgatccctttacctcggaagcgaagcgcagttcctgtggggttatagagggtcagcagctgtcggggtccgctccgctggtccgccctgaatactagatccgggggaaagaccaggaccgggacaacgggtcccaagggaggaggggcgccccgggacccccgcccagggggccccggacccaccagctcctggtcctggggcgccccacggcgcatgcaggctctgggcggtcggacatccgagggcagagctcaggggacagggcctggagtcagagctggggggcgtgaggggcgaaaggggacaagatgagctcccggagcagggcctcgactgatgccgccgccgccttggaaccccgctagatggggctcccgcagacccaggcccagggcccccaagacctttcctcttccagctctgccccaggttccttcggacccgccgagccccacctcgacggccacgcccaccccgctaaacccggcccctcgcagctcccaacccggccttctcctcacgcccagctcacgatctccataagccccgccccgccgctggcctcgccccttccgggcgttcccggacgcccgcctcctctctccagccagactccgcccgctgcagcgggcgcctgcagagcgacctgtgacgccgcctgcttcctgggagacctgtgtttgcgtctccggcccctccctaagctcggacacgggccccatcgggcttctgcctcaaaacggtcgctcgcgttaggatgcccaccttgtggttaaagcacctgccagtcagcttgtggtcagattaatgttgccatgttccagagagtccttttctatacttccgccgtacggcctctgtcattggctaggacgtctttgtttctgccgtaactatacgccgattggtgtgctgaaagaccaaacaacgccctccttctgtcgtctgcgattggctggattccggtgacgtaacagttgtactggctcgaactcgagccctgaagtaactcagagaaccgggggcggggtttcgaactgggctttgttctttcctccctattcttgagatggtccaagtcaatctcccaccgggaagcccttttcctcctcttcattccaggctctagaagcctctgcaggaaccaagcctgttttctttgcttttttttttttttttttgagacgaagtctcgctctgtcacccaggctggagtgcaatggcacgatctcggctcactgcaaccaccgcctccagggttcaagcgattctcctgtctcagcctcccgagtagctgggattataggcgtgcgccatcacgcccgggtaattctttgtatttttagtagagacggggtttcaccatgttggtcaggctggtctcgaactcctgacctcaggcgatccacttgcctcagcctcccaaagtcctgtaattacaggcgtgagccaccgtgcccgccctcttttttgcttttttagagacagagtctcactctgtcgcccaggctggagtgcagtggcgctatcattgctcactgcagcctccaactcctgggttcaagcgattctcctgcctcagcctcccgagtagctgggattacaggcgtgcatcaccatgcctggctttttgtaattttttgtagagacgatctcgctatgttctgcaggctgttctcgaactcctgggcccaagcgatcctcccacttaagcctcccaaagtgcatgagagccactgttccttccccaggctcaaagtctgttttctatgggttggaggttcctcccatctgggactccagactaagtcttgcctcctgtttctcaccttcctgtgagggacgtgggaaatcactcacatttgcacagggaattaagatttgctgatttcaaacccatgttgtttgagtaattatatattttaaaaaaggatttgctaaaccctgccactttaattgcatcgaatcttcaactccttttacagcctggataaggtgaagaatctgggtctctgagggcacccagttagcaatggagcaaagacaaagttgatcttatctgaaagtctcctctgaacatcttgtgtagaatccccgtgttctcttttacattttctttttctttttctttttttttttttttttttttgagacagtcttgtgctgtcacacaggctggagggcagtggtacaatcatagctcactgcagtctccacctgcttggttgcgctcaaccaatcctcccacctcagccttctgagtagctgggactacaggcgcgcgacttcacacccggctaattgtatttgttttttttgttttgtttggtttggtttattttttgagatggagtctcgctctttcacccaggccagactgcagtggcgcaatctcggactgcagtggcgcgatctcagctcactgcaagctccacctcccgggttcacaccattctcctgcctcagcctcccgagtagctgggactacaggcacccaccaccaaacccggctaatt

SEQ ID NO: 586700 - DNA, 4001 bp, Homo sapiens
ttgcaaaacatttacctatgaactctaagtgactacaaagcattactgtagtaagtctacttctttatcataccacaaaaccacaatagctagaagacaaaatgttttattttaaaacattgaaaaaacattaaaagacaaatgtccattatgtaaccaggaatgttaaatatatggaaacggtaaatctctaaaatgtggtaggtacttccagagctaaatgttgcaagttatcctacttttttctctaatatcaacaatacctgatacgatgaaaaataacaaaaagaccttactaattatccaatcaaagtcatcatctttgggtaaatttatatcaacacaacttaaagttttgtccaagatgttcctgacacatgaagcttccagttgaatttcagaaatgttaacaaaagtatcttccttttttgcctgtgaatgtttgagtattgctgtattgttggcttatatccactacagatactggttctaggccagcccaaggatcttcaagcattgaaggcttgaaataattttccaactcattagacattcttttttctctaacacgccctgatccaaatggtgtagatgtccttggagaaccctttagaaaaaaaatcagttaaaaaaacacttagtaaagataattggtacttcttcctttagctaaaggttagcgggaatcacattgctgcttaaaagttgtgacttgaacctaaataatgttcaattacaaagtccatgcttcctttaatcaagtgttcctattttttaaaaaaagtacttaaagcaattcgttattctcatttatttataattccatgaccactgtcatctcaaatacttttgtgtctaatgtagtaactttgcagtaattaaatacaagcagtgatgaaatcaagtaattatattcaattttccctcgaaattttcacttttttcaggagaaaacaatactatagttttaaagtttctagaacctttctagctcatgaacattttctttactccttagctccaggctcaaaaggggtagggggttggtgtagaatacagcaagttggaaaaccacgtagttgcaagttgtaaaccacagaaatcccagacatgctagagatactctctctgtcttttgtatttactctcactaaaggaatggaaaacttccactaccaccgattttcttttcagggaagttggagcagaagccagtgtagctcgaaagaaagataaaaaaaaaaaaaaaaaaaagaaaaagaactatttcttgaaacaaactggcaaggcctttggcaaacaggaggaaatggagaattaggaaaatctgtgtacgggtggcagtgtattggttaaaagcacgagggctcgaaaacagaacgtacggctctgccactctttcggataatcttccggaagtcactcaacttctctaagcctcagttcgctcatctgcaaaattgggctaacaatagtacctcagagaggattagacaaaataatccacgtaaagggaatattagtaccgtgcctgccataaagtaagagctcggcaaacgctggctattattattacctgggggtgggtctgctgctgccctggggagtagccgaattgctgctgggaccccgcgggggacctggagtaggagccagggtagccgccaggggacggagacccgaaccggccccccgggaagctgccgccgtgtcgcggagagtgactgctcccgtacggcctagaccggggcccgtacggcggcgtgtggtgcggactcccgtacccgtctcgaggggagggcggccgtggtccgcccccgcccggggttccccggaagctgcttccgctaccccaacctcctccacccggaccagggtaaggaggagttgggggccgaaaattctgtcgctgcatatcaggagccaaagccgaaaacctcgcagccgcgttctcccaccggaactgtatcaaccggccctccgcagagaactgctagtcctttaccaaaacagtcctccgaccgcagccaccctacggcacatcagttccggcgtcacaaaggttccgccaggggcggcgggattacctaaatcactgacttggcgagagactcagtggatttaagtgaaaagaggaagaaaaggagacaggaaaggacggacacccaagcccagcaacaacctttccagtctgagtgcccttggtctgaccgacagactagaagctggcccagcaggcgactagtgctcagccccgcccggcgggggcggggtctgcggcgtccgtgggcgccccccagtggcggcgggtggcgccgcacggagttcgccgcttgcaccgggaccgatgccatctgagacgcacgcgatgctggcgacgctggcgagggtggcagctctgcgcagaacctgcctcttctccggccggggcggcgggagggggctgtggactggccgcccgcagtcaggtaccctccgagattcggtctgggtggctaaagggatccctgccccagcttgcctcctcgggcgccctgaggagagcaattagggtctgaagtctctgctgaccccttagcggtggctttgctcgcctccctgcaaccccgttccgtgggcctgcggccggcctgccccgctctggccgcccagggtcgcctctgtcccgtgcgttgttgtgaccgagggctccgtgcgccgtggggtcccgctcctgcgcgtcccgcggctcgcgtttggggcctctttactcctgtcctttcgtccgccaagtttaagtaacttcgaaaatgcacaccaagccacatttcagaaaggactttagcccgctgctttgaataacttgacacttcatgtacaataaaagatgcccttgtacagttacctgttgcagaattttatttagaggatgaaatttagctttactacagtgttatagaactttctttactccctctgaatttgggaatggtaatccactatgaatcttttttttccttttttctttttttctcttttttttgagacggagtctcgctgtctcgcccaggctggactgcagtggcgcgatctcggctcactgcaacctcctcctcccgtgttcaggagattttcctgcttcagccttccgagtagctgggattataggcatgcgccaccacgcccaactaatttttgtatttttagtagagacggggtttcgccatattggccaggctggtctcgaattcctgacctcaagttatcctcccgcctcggcctcccaaagtgttgagattacagacgtaatctctatgattatgcgcgcggcccactatgaatcttgaaattagttgcaggatgcaggatttttttttttttttttgagacagtctcgctctgtcgcccaggctggagtgcagtggcgcgatcttggttcaccacaacctctgcctcgcgggttcaagcgattctcttgcctcagctttctagagtagccgagattacaggcatgtgccacatgcccggctaatttttttgtatttttagtaaagacgggtttcaccatgttggccaggctggtctcaaattcctgggctcaagtgatccgcctgcctctgcctcccgaagtgctgggatttcatgcgtgagccaccgcgcctggcgtaggatacagaatcttaaaagagctttaggactcattaaatcatagcctaacgggtagcctggacctgtgatttccattcaccctcttgtagctgctactcctcgctgtctctttgacatgttctgtgacatcccaagctgacgagtgtggtatcttctcagcttctatcctccttgatgaatggagacacacacagacagtttttttgtttgtttattctgtggaaattcaattcactacatttcgtttcttctgtagatacaagtgatagacttaatcaaggtagcacgttgccattaaggcttagtgatacaattaaggtcggaggactccagcctatccactttattaaata

SEQ ID NO: 586701 - DNA, 4001 bp, Homo sapiens
atgtagtgctctggaacaatttcagcctaaaatgagactcagaagcaaactgctccctcaaatgtttaaaaatatgattcatttttaaaaatccaacagttggcctaaagaaaaaaaaagattctgtcttatatagagctactagacttgcttaaacaccttaatttttccagtgttgatttaacctagaatgcaaaataattcattttgacattccagatgtcaagaattcggtggcatcagtaaggacacatacacacctctttcataaagatggtgtgcagtctccataggacaaaattgagcaattaaaagtgttaccatttgtgtattatgtaaccgtagtccagaatgaaggaaacatggaccttaaagagtaacacatcgtgcaaacacgcatttaaacacctatttaaatatatgatagatttaaggtacaaatgacctcaaaatgacacaacccacaaaagttctttgtttactgttaacaaggcctcagaagacataactataatcaggcctactacccactaccctatcattgcacagtagatgcctacaataagcaatattacttgaggtccgttgctatacctatatacggaaactatataccgcattactaaaaatgttacttcgcctggtatattcgaccaacataagtttacaaatgatttgcaaaatttcacgggaagaaatggctgctaaatcatactccaattgaaacgcattttaacgcaccccaaacgttctcagctacactacaagaccacttgtaatatacttgaagcacaaagtaaaattccaacactctccaaaggcgtaggaaagaataaaacgtggctagcctgaccttacccggctgtttataagtaatgcggagaattttctgagcttccccggcagtcttcaattctctccctcgcttcacccccaccccctacacagatgcacacccaactgatggaagtttaacaaatgtaatctcgagctgcaatcccagaaactggtaggattgagaataaactcccagtaaagtgttaaaaagtccttctgcaaaaaaacatctaccaaccaatccacatcctgtcaccacacggtcggatacctcaatcgactcccctgctgaccctccacccagccaaaataaaaaagccccagcacctatttggtttcagacaaacgtaccgagaatccgcgagcacgatctcagcagcgaacgcccccgcggcagcctgtgctcggcccacagccactttggccaaacaactggagtctcgtacctcggaagtagcggcggtagttggagaaagcctcctcccctaccaactccgagctcgggagagaaccgggagccggcggaatcaccccctctcgggacagaccccggaggtgtcagtcacagcaacgccgcccccaggccggctctccattcaggctccaccgcgactcccgccgcagaggtgtaggcacccaagccccgcgcccgaaggggccccgcgcgtctgcggccctagccccagtcggggccgcgccggggagcgcgtggggagcggcggcaagcagcatgggccagacacgttgccgagctccggcccgcccagccgcccgcagccagagaggcaggagcccggccgagcgccccttccgcgcgggccgggctgggggcggccagcagcctccccgaccgcggcgccgccgccgccgcctgccggtccctcttccccgcgcccgccgaagcccaggtgccgaggggggcggggcgggccagggtccccgcgtggcgcgccgcgccgagcaacagggcgcccccggccggcccggcgcgcggcgcgaccgttacccgagcggcgtgggggtccagttaactcaccggctcgcacctcagccgcctccgcgccgccgctgccgccgctcccggtcgctccccgccgccgctgctctccctcagccacaggcgccgccgagcagccccatctgcaaactcgtggctcgtagttgagaactggaaatgcgtctctcactgccctccgcctccctctctctcctccccctccctcgctccccactctgccccagctccggtcgcccccgccgctgcctccgcgcgcgcagccagccgcgcctcagccgccctcctcctcctcctcctcctcctcctcctcctccagccgccgccgccgccgccgcttgggcgcgctcccagccggcctcgcgcgtgcgccggacgtcggggagcgcgcgctcgggcgcgaggaggtgccaccgcctccggaaagccgggccccgcccctcccgccgcggctgggcgcccaggtggagccccctcccagcttctgagcgcccagactgactgcgctctgcgcccggccggctcgcttcaggggtcccggacctgcgcccgcgagagagggctggtcggacccagtccccgccgggtctcctgggccgaagtcgcagctgtctgtcagcatttacgggtgggcaagatactcctcggggcataaaacaggctccgccctgacctttctgagagttttacattcaagaacccagtcgtggggcacaaaagagaaatggaacgagaagaaaagcctctggaaaaatctccccctcccccttcacagactccactggatctgatgtgtatttggcaggttctacggcgctgactgtgtccttcattaattttttcccaaaggcccgaccgggcagtgtgattcacacccgaggaaatgcatggacactggctcttttcatagcaccgaggctcccgtggaactccctgggtcggctttgccagacactccctggacacagttgttcagctcctccccagcacctgggcttcccagacctcaaaagggtggggttggggagggcatgccatcctttcagcctggactctgcgtagagcttggtgaactgtgatgagtgtccggatgtgtagatgacacattttgacagaagtgcagatttaatttttcagttgaaaggaactgagcaatgcactgcagcagagacttctggctagaaaaacatagcaaggcagccagagaacttccgatccccttaaaagagctctgtgaaccctcagacctgtgacaggcggcttttggaaaaactattgtgttcttcctaaaattgaagaatgtaatttacattttacaaaatgcttactgcaatcttttcaaaccatgaacgtagaaagtgcaagtcaaactttacgtgtgaggagtgttatgaggtggcctcctctgtgcagcctttcctggcttctcttgggcaccttgcacaaaccagaccattaataagtgtttgcagaataaatgcgtgcatcatggccctttggattcagagatgaagttataagttgtattgtctcctctctttgtgaatgtggcaggcatggaagggagagagaaaatactattgatgagatgtattaagaaggtccagtgtccaaaacagtgatttttgtgtttatcctcaaccaagcatcaaagattaatttacttttccattaggatcattaattttgcaaaccaacatgcaggggggccttgtacagtgttaatttagaaccttctttcctggaaccacaaacccaggcaaaggtaattggaagcatttaaggagactcaaacgtgcccagggcacagagtagctttgggccccctgtagtcaggatggctggatgaaatgaagtggagtgggctcggagcccaaggcagagacaaagcggaaggatggggtttgtcttctcggggtgtcagcaagacctttcaggtccttcttgctgccccaggcccacttgcttctcacaggacacccatgggtcctccctgctgtaccctacccaggcttgtgaactcttttcccttctgactcttaaccttaacacatccccttggacccagccacttagttacttgccctgagcttctctggggttggggtgggaggtagggtatgaatgtcatttccagatatgttagtga

SEQ ID NO: 586702 - DNA, 4001 bp, Homo sapiens
cttataaaatcaacattcctttaccctttccttgctatttcttagacgtgccatactttttttttttttttttgagactgagtctcactctgtcactcaggctagagtgcagtggcgtgacctcggctcactgcaacctccgcctccctggttcaagtgattctcctgcctcagcctcccaagtagctgggattacaggtgtgcaccaccacgcctggttaattttgtatttttagtagagacagggtttcacaatgttggccaggctggtcttgaactcctgaccttaggtgatggacccaccttggcctcccaaagtgctgagattacaggtgtgagccaccgcgcccagcccacatacttcttttgatcttaagaactcttaaaaatacacaaagttctctaacacttaacaactggcatttattttcagtatgtccacaagtattgccaagcatgccccggtgattaacaacacaggctcaggactgtctgtgaacttgggaccattgtgagcctactgtttcagttggaaagtgtatacacctaatgggactgttgtcaagattatcccaggaagtacatgtagaaagcttggcacattgcttggcatatagtggcatatattttcttggtatatttctggatattatcactttcaggctgcttagaaattgagtagaatgtaaatgccaaagccatgacagtttcaacatccaagatacttccaattaaaattaattccaagtgaaacatgggaaacagaattcagctcctcagagctcaaacaccacagaaaacatgtactgcgcgggagggagggaggaagggaggaaagaagggagggaagggaagggaagaggagaggggggagaggggaagcgggaggggaggtgagggcagggctggaaaggaaagacagatccagagagtggtgagccttgatgccaagtgagacctgcagaactgtcctctcaggacaactctgtacaaatccctgaactccacagacttgaccaaactctagcatagtttctagcagcataaggctgtatcctaggatgacctcggccccccctttaaagtgcctgcctgagaaagctcaacgctgcctggaaaatttcctatttattttggccaacataccccgatagtaggtcccgaactcccttagagcatttcctggaaagggcatataattgtaaatacgtatcccttgcaactaactcggaagcttttctttcaaggccctgagagccattccttcgaaatctaatcattaggaaggatagggcctttgtctcccagtctctgcgggaggatagaattctccctaagacaactgcgagctagcagacacagccggctaatcacatttgcactgacttcactatactacacttctctgactctacagagcccctacactcccgcctcgctcattctccctttaaaacgcccaaagtcacctctgcacaaaccgggatggagctcagctctttacctgcagtagttactgaataaaatctgttttcagcgctttacttactggctggctatgatttatctttgacacaagcttgggttacattctgtgtacgaatggaacaagcagaggaatttttttttttttttttttgcggtggagggagcgcaaaaacagtcgttctgttctcgctaatatgggaatgtcacgaactacgtccccgacatgaggccgcggatcagaaccggggctgagggcgaactgtgtaagctgcgtctgctacgctgcccgaggtcccgtcatcagccccctctcccacggagcccttctttacctaccccacggaggactgggaaagcccggccggctctgcggaagcttccgtagcagtcgctcccagtagtttcgaagcactccccgggccgcagaccacggcgaaaccaccaagaccagcatggccagcgccattttccctgctggaagaccgccccggtcccgcccctgctttcagcatgcgcacaggcacagaatcgggcaagcctcgcttcttagaactacaacaccccgcatgctcttggagcagctctgactctcctccaatcatagagagtaaaggaaaggtgaggggcggggaaatgaaaggaaatcggccacagtgcgcatgtgtgcggctgtgctttggctcttcgggtaaagatggcggagcgcgggtacagcttttcgctgactacattcaggtatggaaggggccctcgaggtcttcagcgtagtcgaggttgctggtactctgtcgatttagtttttcccatcctgacgtcggcattggtgcttctggagggtccagtagggaatggagttggaaatgcggctttgcaaagtcatttgccaggccgacccgggattcctggagcttccttggtcggaggctgctggagggtcggggggatgcggttttgcggggttaacatggggctgcgggacggtgaggcacatagccaaggattcgctttcactttggagaccagaaaagaaggcagttttagcttaaccatctctgggtggcccgttccgaactcaggatttttttcctggctcaagtagacctgatgcggtggtttctgaaacttggaatcttggtcaaatatgtggggttcccttttcttggaaaactctcagctttacagttaagtcggagtcttggtctccatttggcactagtgtctttcaaaacctcccgctttcggtttcttcgatgcacgaattagaaacataaggactaaaaaccgaaagcccctatcacttttttgtgaacccctaacaacgaggcaagtttgagttttggtctttttttggtggactggggggaacgtcggggagggggatgtttactttaaacaagattgtaggtttttctattgtagaaaaggggattagaataataagtttactttccaaaatacagttggggcgaaccatggctctcaacgtgagaaaaccatcgccgaagacttttaaaaattgactggggaagttttctgacttacccattttcttaaggatcagtaatgcccagtttacttaaaatgtactcctgacaactgaaggcaggcgggatctaacttgttgagtactttgttaggtgcaacttaaccttaacctgctccatctctttccactgctataatgaatgttatctcagcttcttacagatgaactaaccgcagcttgtacaaattaaacaacttgtctaaggtcatcggtgagtagctgagttgacattcaaactgggttttttttctgataacaaaaatacactttccattacataacgttgtcttaaattccaaaagtacttttctcttggcagttttcagtaagcagtgggtgtatgtaatagtttttttgtaacctttgaacgagattaatttaattatgcaataaaaggtctcattatattacatatgacagaatagtgtgtgcaggatgtattcactgttcctatttatgaagaaaacaaatgtggtcctttttttagggacagggacttggcagcctccagctcttgggctcaagggatcctcctgcctcagtctctggagtagctgggactagaggtgtgcaccaccctgcctgctaatttttttttttaaggcatgaggtcttgcgatgttgcccaggctgcaaatgtggtcttttatcgcgaagaaagtgtaatcctagtggagctgaaaacataaaacaaccgtataccttcagggactgaatctttttataacaaattttctttattaaaataaacttttggccaggcagggtgactcacacctgtaatcccagctactcaggagactgaggcaggaggatcactttagcccaggagttcaagactagcctgggcaacacagcaagaccctatctctgaaaaaaattaaaaaattagccaggcatgtgcctgtaatccaagctatttgggaggctgagggcgagaggagcacttgaacccaagagtttagga

SEQ ID NO: 586703 - DNA, 4001 bp, Homo sapiens
gccagcatgagtattaccgcctgcgctccacctcctgtcagatcagcagcggcattagattcctataggagcacaaaccctattgtgaattgtgcatggtaggcagagttttgctcttgtccaggatggagtgcaatggtacaattgtggctcattgcaacctccgcctcccggcttcaagagattctcctgcctcagcctccagagtagctaggattacaggtgcgcaccactatgcccagctaatttttgtatttttagtagagacggggtttcaccacgttggccagactggtctcgaactcctgatctcaggtgatccaaccgcatcggcctcccaaagtgctgggattacaggtgtgagccacctcatccggccagtactttgcatacagaatgactacagcagttagagtggattgacattaactgttttcttggaatgtgtaaaccgtgttatacctacagaccagcaaaatgcctggctcaaagcagatgagagacaagacatctttactgagagataaatgtttttttgcttaggacccaggacatggtggtgatttaccaaagccacccggaaacaagaatgtttctcacctttaataaatagggatccagaacaagcctggtcactctcactttagcagtcttttgcatttttgtcccaatcaccttccccacaatccatctggcatggacggatgagcgaactacggacattacgtggctttggtcacctgaaaagcaaattccaaagtctcatattctggtggttatgatgccacatgaattttgtcacaagaactgtccaggttagtccagaaacagtttttttctttttcgttcccccctccacccagaaacagttttgttttgtttttttttagatgtagtctctctctgtcgcccaggctggagtgcggtggtgcgatcttggctcactgcaaacgccgcctcctgggttcacgccattctcctgcctcagcctcccgagcagctgggactacaggcgcccgccacaacgcccggctaatttttttgtatttttagtagagatggagtttcaccgtgttagccaggatggtcttgatctcctgacctcgtgatccgcccgcctcggcctcccagagtgctaggattacaggcgtgagccaccgcgcccggccatatgtatttttctttagatgaagtttagttctttcgcccagtctggagtgaagtggcgcgatctcggctcactgcaacctccgcctcccgggttcaagcgattcttctccctcagcctcccgagtagccgggactacaggcccgcaccaccacgccgagctaatttttgtatttttagtaaagacagagtttcaccatgttggccagactggtctcgaactcctgacctcaggtgatccgcccgcctcaagcctcccaaagtgctgggattaagaggcgtgagccaccgcgcccggcttgaatcaccatttcagagatgcttacacgttccccactacccaacctctcatctttacagcgcttacaaagcggtaactttaacttcgccaagcctcacgttccccttctgcaaaatgggcaggcctatttcgcaggagtgctttgagaatttgacccacagaacgctcaataccacggacaaacgctggacgttactggtcccttatctctctccaccccgctgggtcgcctctccccacaggctcagtgcccaggtagcactcggcggggccgccgcggtgtccccctccccggcccagcgacggatgacttgggctgcttttgagatcagttcacaagccattccaccaggcttcggaaaggttggggtgattcgtgccctcgccccagacaaccccgaggtcagacgaagcgattcgctctcagggctctcacgcgagggtgccttgggtccccagcaaatcctcccccggcagcaataccccggagcctgccctcacctccaccacgagactcacctccgccaagactatgcagccacctgccccggggagcgccggtcgcagcgggatggcgtcacgccgtacgcattggctcagtcccacactacccctctcgtaggccgtgcatctccttagccgtgggcggagttaaaggcaggaccccgcccactctcccttaaagggacccgcggcggtggcggggtcgggggcgctgacctctggtttcctaacgcgcgcagctagtggacagtggcgcaggaggtttcggacttttctttcattcttttgttttgtttcttttttttttttttttttttgagacggagtctcgctctgtcgcccaggctggtgtgcagtggcgcgatctctgctcactgcaacctctgcctcccgggttcaagcgattcttctgcctcaacctcccaagtagctgggattacaggcgtgcaccaccatgcccagctaatttttgtatttttagtagagacagggtttcacatgttggccaggctggtctcgaactcctggccttaagtgatccaaccactttggcctttcaaagtgttggaattacaggcgtgagccaccgtgcctggcctaaaagtgttttttttttttttttttttgagacagggtctcactcttgttgcccaggctggagtgcagtggcatgatcttgactcactgcaacctctgcctcctgggtttaagggattctcctgcctcagcctcctgagtagctgggactacaggcatctggcaccacgtccagctaattttttttatttttagtagagacgggatttcaccatgttggccaggctgttcttgaactcttggcctcaagtgatccacctatttcggactcccaaagttctgggattacaggcatgagccactgtgcctggctggtccagatttacctatactttccctgaccagttattgtatcagaagtttttcaaacgaaaaatatcagtggggagtggtacttagcaacaaagctctgagtgctaggtgagcaacttgctactgggattttcctgcctgtaggctatttcagcagatgtagctatcgatacattgaaacatacacacacgcacacacacacctacctttaaacagcagtgggtttctttcttttttgggacggaggctgtctctgtcgcccaggctggagtgcactggcgcgatctcggctcactgcaagctccgcctcccgggttcacgccattctcctgcctcagccttccgagtagctgggactacaggcgcctgccaccaggccggctaattttttgtattttttttagtggagacggggtttcaccgtgtaagccaggatggtctcgatctcctgacctcgtgatccgcccgtctcggcttcccaaagtgctgggattacaggcatgagccaccagtgggtttcttcttttgcttcaccagttccgtatttttatctcctttcttccacagttagaactctggtccctaccccgacaacatcaatgattaatgctaaatcctatagtatacactatatgcttttggagttgtactaacaatatcccgactaaaaacaaactttctaagtgatgcgtgagattattttttgtggttctttttgtccttagagtgtacaatgacagcactgtgttcaacatttcttgggattctttttttttcttctgtgtggttgtaacaatattctatacaattagatttttttttttttttcagacggagtctcgctcacaatctcggctcactgcaagctctgcctcctgggtttacgccattctcctgcctcagcatcccgggtggctgggactacaggcacccgccaccacgcccggctaatttttcttgtatttttagtagagatggagtttcaccgcgttagccaggatggtctccatcttgtgacctaatgatccgcccgcctcggcctcccaaagtgttgggattacaggcgtgagccaccgtgcctggccttcatttttatatgtttgtatacaattttgtat

SEQ ID NO: 586704 - DNA, 4001 bp, Homo sapiens
tgagatggagtctcactctgtcgtccaggctggagtgcagtggcgtgatctcggctcactgcaacctccgcctcttgggttcaaacaattctctgcctcagcctcctgaatagctgggattgcaggcgcccgccactacgcccagctaatttttttgtatttttagtagagatggggtttcaccatcttggccaggttggtattgaactcctgacctcaggatccaccctcctcggcctcccaaagtgctgggattacaggcgtgagccaccgtgccaggcaagcatctgtattttaagtaagttctctagatgcatctcaaacatccaagaacccctgtactaaacaaagcacagttggttatcaattgttcacaatagttatattctataaagtcactgccaacactgacttagtgaatactgaaccattgctcctaggtgaaatacagggttagattcctttcagcctctgggcaccgtatttttgttaacaaatcaatacataacctagtttcctttgtgtttctgtttaaagacaccttgtttaatatatatggtagattcactaacattgaattcagggccaagagcaactcatgactgaagaaagattctctaatacatgtatgttctccctaaggcacgtcacagccttctcccgcttaggaacactagatagcacttcagcattgcaaggccattttaaacagcaaaatcactaacaaaaagcacgaaaatgcaaattaaaaaaaaaagattctagaccataaaaaggacaccttttacagtacgagagctgaaactaggcagagccttgtcgacctcagctcgggacatgcacctggggtggcagctccacccacatctcagagtgaccttgagagtgcccagagtgttgatttggggcttacaaataaattttagtcagtagaagaatctgaaaatatggaattcatgaataacgagggttgtctgtatatatttacagagaaaaatttgtgctttagtggaaaactgcattccttagagcacactgttcagggttatcagattctgcaacggtttcactcctttccttgactctgagctattttacagctctgtaaattacagataactgacaggaatgcaaaataattcttgtctgtagacatgcaaataatttctgttcagtggaggatcaattgagtccctgcctgccatggaaaaagtcagttttgcatccatcttcaaatttgtttcaacatcctgatctatatatatctctgcttttttatgtctcccttgagttggtttcatagatttctgaccctagcattatttcctgagttaaagaaaacctgtgacacgtgttcattttgtttacatgacagtcggattgagtgctccttttggaggcctggggtccgctcacctgtgtgcagcgacagccagcctttacggtgggcgatgtagtgcggcgcgtgtgcctcctcgtaggtcaccggcttgtcccccttgcttacgcgtactcgggccgcccggttctaggagcaaaaggggccgtgactccacgagatccccgatccagacccctacttcgcgccatgtccccccagtcagctggcactgttccccggccccaatcccctgatccctaagccccgaccctagccccgcctcggaccccagcgacacgcccccttcagcccgcacggcttccccggcccccggccccccggcccccaggcccccaggcccctgccccggcggtgctcaccttggcgcagaccggggaggtgtgcagggcgcgccaagcgcaaggcagctctcggctccaggacagcacctgtggagggagggcgcgtgaggcggaaactagggaccccacctccgactcgcagggacctgccgagtcgccccactcacccgtggccccagcaacccgctgcacacggaggccgccatcttgggccaagcggagcgcgggacgtaccacagcgcgctgaggggtggggacgaccgcggacgagaccaagtcggagctcgtactctgtactctggcgggggcggggcagggcctctgcggggcggggccgcggtatgctgctagctgttactcccgccttccccgcagccctgtgaatgctcagccttgtgaatgctcatcccgccgctgttcgctctcccgcggttgctgcttgcatagggtttcagatccggaaatttgaggatgcgaaacgtgagattttctcttcgacaacctcacgctagtacgggtgatgggtgtgcggcccaccggagcccgccctgcccaacctgcaccctcggggctcgaagaggagccaagcgtttccccaggtcctagttatgcctccaaataatattcgtagaaaaacaaaacagaaaaaccctccagacttttatccacaaataaagaagaaacatattttggttaaaacgtcacccaattcttcaaggatgacttacgcagttatgcaagaatgggtttgccacatgtgaccacagtggtgactggcccctgaggaaggaaaattttaagtacggggaaggggccggagggcaaggagattcgtgagaatatcgcagggcctgtaatgctgaaaccagtgcgtcgccactattattggtatccagtaattattaatgtcaaacggaaaaatagcaacgcgggatattttattttagaagtcaccacggtcatggaaaaaacacgggctctggagtcagacccatgtataacaatctttgtacagttaagactcagttctattatctataaaatgggccttaataatagtactaccttatagagctattaggatcaagagaatatttaatcaatgatgggttgtgtttggttgagtgatgtgaaattgccaatgttttggccgttctgggtctacatcattccccttaatggtacagtacttgcatactgctgcggtttcctgtcagggggaggactggattatgatccatgggaaggggaaatggaagaacggtggaaatgagttgcccatgaccacactgagaagagggaaagagggaccaagacacaagtctcttgacttcagtccagcccatttcccatgaccaagattcctctgattacatgaaggtgggttctcaaaaaacccgtaataaaaggacaaggtcttccatgtccacttcaccagaaatgttttattcttactttttaggaactgcggcccccaactgttatgcatattgaataaagggacagaacagggatgaggtgccctccaatgcatactttgcaaatgtaagaactttcaacatttcctaagaaatccttttcaactgacaattattttttaaagttttcataatgttcaataattttataattgttaagtttcattaatttgctccaaggtggtgaggaacatgggatgtggcatctgaattgcctgagtccaaatcgtggacccaatgcttcctggctgtgtaatttggacaagtgactgaaccttctgagcctcggtttctctcatctgtaaactggggacaataatggtggttgtgagaagtacagtatgatgtgcctggcagagggagagagcagttgtgggttttgttgttgtttttaacgagtccctgatagccacatatcccgttagggagatgagccagctattgagggttctgtgagaactcatagcaacaccaccctaatcagaggaaaggggaaggagaaagggaaacaagatccttgggctgatcagaggcagaggtggcaatggcacaacacctattggggcccaaggtgggcaggggccacaccacgaaggctgtggttgggaatcaagtttagcccataaagcagtaggcaatcaaatgatcaaatttatgctttcctctattcaagccattctcccttatgcctgagatctctctctggaattccaaaccgatctagatctttccaagcatcacaatggccatttcagtggcagacatttctggggttcaaat

SEQ ID NO: 586705 - DNA, 4001 bp, Homo sapiens
tgtaattgcacagtatttccacagttagttatctgtaagctggtatgggaactatcagtttgttacagtgttttcaggaaaatctgttctgaattccaagtccctttatttgtcaatgaagaggcaacagggattcctgaggcctaggtttgactactggctctgtcacttaatccttgggttattgtgaacagttactcatcttctctgagtctccttttctgaaaacaaagcttgcatgactagtgcgaaaatgagtaacagtggcactgagtagtaaatggtaacttacaaaaaagaacgagcccagatctgtaagtttggttttcatatattctacatagacacatttgtttattccttgttcttaatcatgtttaagaaaaaaaaaaaaagagagagagacagacagatagatactccatatagtaaaaactttgtgcctccctggaatgatgacctcatttacaaagactgacagccagagaaacatagggagaggaccagcaccttgataacttgacaagatagccaggaggaggaagggactcagtaggacagtagtcactgaagccatcacaggatgctgctgttatgtccatgcccattttggaatgtggcaaattactgggatacataacttgtaagtaaaaaggtcacactagaataggctggaacatggttatatcataaaatccaagtcctaaagttttatgacagagaaagggaataagccttttcaaacctgaatcccttactagaaacaaaggcccacttgctaaacaggaggaaactgaaagtggttttaacaattaccaatgacactgctttgttgtttccttccacagtgcacagacacatgtctctcacgaagaataacacgggagcttttcttacaacgtgcatgtcaattacattttgattcacatgaaaccattctcggggagtacaagtcactttaagtgttacctttctttaaatgtgaactaaagaaaactgtactctcatgaaaaaagttaactggagctgaaaatgctaagcaaaaacaaattactcaaatgtgctgagcaaaacaaattaagcccacatgagaagaaaattcccatatttttactttggcataacagggcaaacttctttgatctttttgataggtctgatgcatttaaaagattatttcaataagtggctttgtattaggtttgccttttctctttgaaaggtaaagatgaagtgcaagagttcttaaccgggatgtgcttcagcgttttgaaaacagtggaagtgtacatctgtatgccgatatgtgtatgtatgtgtgtgtgtaaattgttctgggagagagctttctccagtttcccaaaaaccattggttagcagaacgcaccagctgcagaataaaaaagctggttggaatctcgcctctgccttttaatggccacgtcgtttttgtaatggtgcttattctctgccaggttctctcatcgactacacgaggacagtcatactatctgcgatgtgaagctaatatgcaaaattcacggcacagtgcccaccctaataaccatcaggatccaaggaattcacatacagtgtacacacgttgtcatagaaacaatctaaacataaaaacaatctcaacagaatgcttaaaaacaaaaaaacccggtaccgattattttacggagtcatagaggcatcaacggcactgaaaatgtattagctgcattcagttcatcaagaacaatcttcaactccctccacctgactcgatcatgcctgactgtgatggaaactgtagtattgtcaagtcaaccgatgtttgactcgggagcgcatttcgcaaatatttttcttaaatatcaccttaccgtatttttcttaaggtggttacaaaattaatctgcagcccaccacccaaagctacagtgccgaaggccgtgtgatgagcagagaaactgagccttctactgttaaccaatatggaagagagtaattgcgcctgagaggaaattacggcagcggaaacgcgggtattctacgtttaagaaatcccccaactgaggcagaaaaaggccaagttatttgtgtgatgcacgtgaaccgcccgagctggtcactaatgaagtggattcgccctattcctggcgactctacaaggttggagacccccgtagacttcgcagccatcgccccttgctgcagacccccaaagtcaccgacagccttacctagacctgaccttcctcacccacgcgccctcgtcccggaaggcccgccctctacccggctccaagctcgcgcaggcaactattacggggagcagtagagaaacggaagcttggcagctagagcggagccctagtgaacgacccggagttactggctccccctcctgaggcctccgaggtgtacctggcgcctgcgcagtaaggctagcgccgccgcctgtgcggaggacccggggaggtggtgggctggggagagttagaaaggtctggctctcctggaagggcatgcacggttcggtagtatgttttggtgggaatggctacagacctgcctccaaaagctctgaagcaatggcgatgcgtgtgccgtgtggtctttctgaccgacttgcggcgccatccccctccccttccatctatctgctcatcttctaatagttaattaggatccctagctgcaagccttccttgctactgggttaggagcgctttcccccattgacccaggagcttcttcagggagtaggggatggaacgtttgtctcctcagtagttatcttagacctcgctgggcagatagtagaaagcattgtgagtatttcaccccatactaaatctgttttcaagcaagccacatcccataggcattgtatgcagcacttactcaatgtttgatagtttgggtgaggaaactgtactcgttttctgagtatcgttcaaggcattttataaatatttcaaaatgtaccctggaattaatatcggtagtgagttgcctacctagtgggtattgtatttacaccctctttcctcctacagaatttacttttaagttagaatttgacgtctaatcaatctatgctataggatttgcttttatcaagttaagttttgacatgttatcagccttatatgatatagtaaacagccttataaagttgggtctagtgactacatttaagtttacaaaggggtaatgagtatcctatacatggctacagtccagaaaagaagtcctaaggagcgaaactcctgggagaaatttcgtcttgtcttttgtacttgtttctgtggagttggcttgtttttatgtaatggccactgaatcatataaacaagaagacttcctttacgtgtaagctgctggtttaaagccaaattttaattggctcgaggcaagagctatatatatgtgtgtgtatatatatatatacacacacatatatatattttttgcataaaccttgttggcttcgttttgtatatccttcctgttttttccttttcacgtatgaattattggtgttatcaatgttttgtgaattactataagctaccataaatctttcttgaaacatagctaggtatatagagtttcaggtgactgtttaggtactttgcactatcacttttattaagtcaatttcatgggggttcatattagtttcctgaggctgctataataaaataccacaaacttggtgttgtagagcaactgaaatttattatcttacagttctagaggccataaattcaaaatcagcatcactgggccaaaatcaagatgttgacagggctgtgttccctccagagactctaggggagaatcagttctttgactcttccagcttctggtggctgctggcattcattggcttgtggccacatcactttagacttcaaggccaacatcttcacatctctgctcccttttcacattgccttcactatgtgtgtcagacttcccattgcctcccttttaggaatgtg

SEQ ID NO: 586706 - DNA, 4001 bp, Homo sapiens
gagcccagatctgtaagtttggttttcatatattctacatagacacatttgtttattccttgttcttaatcatgtttaagaaaaaaaaaaaaagagagagagacagacagatagatactccatatagtaaaaactttgtgcctccctggaatgatgacctcatttacaaagactgacagccagagaaacatagggagaggaccagcaccttgataacttgacaagatagccaggaggaggaagggactcagtaggacagtagtcactgaagccatcacaggatgctgctgttatgtccatgcccattttggaatgtggcaaattactgggatacataacttgtaagtaaaaaggtcacactagaataggctggaacatggttatatcataaaatccaagtcctaaagttttatgacagagaaagggaataagccttttcaaacctgaatcccttactagaaacaaaggcccacttgctaaacaggaggaaactgaaagtggttttaacaattaccaatgacactgctttgttgtttccttccacagtgcacagacacatgtctctcacgaagaataacacgggagcttttcttacaacgtgcatgtcaattacattttgattcacatgaaaccattctcggggagtacaagtcactttaagtgttacctttctttaaatgtgaactaaagaaaactgtactctcatgaaaaaagttaactggagctgaaaatgctaagcaaaaacaaattactcaaatgtgctgagcaaaacaaattaagcccacatgagaagaaaattcccatatttttactttggcataacagggcaaacttctttgatctttttgataggtctgatgcatttaaaagattatttcaataagtggctttgtattaggtttgccttttctctttgaaaggtaaagatgaagtgcaagagttcttaaccgggatgtgcttcagcgttttgaaaacagtggaagtgtacatctgtatgccgatatgtgtatgtatgtgtgtgtgtaaattgttctgggagagagctttctccagtttcccaaaaaccattggttagcagaacgcaccagctgcagaataaaaaagctggttggaatctcgcctctgccttttaatggccacgtcgtttttgtaatggtgcttattctctgccaggttctctcatcgactacacgaggacagtcatactatctgcgatgtgaagctaatatgcaaaattcacggcacagtgcccaccctaataaccatcaggatccaaggaattcacatacagtgtacacacgttgtcatagaaacaatctaaacataaaaacaatctcaacagaatgcttaaaaacaaaaaaacccggtaccgattattttacggagtcatagaggcatcaacggcactgaaaatgtattagctgcattcagttcatcaagaacaatcttcaactccctccacctgactcgatcatgcctgactgtgatggaaactgtagtattgtcaagtcaaccgatgtttgactcgggagcgcatttcgcaaatatttttcttaaatatcaccttaccgtatttttcttaaggtggttacaaaattaatctgcagcccaccacccaaagctacagtgccgaaggccgtgtgatgagcagagaaactgagccttctactgttaaccaatatggaagagagtaattgcgcctgagaggaaattacggcagcggaaacgcgggtattctacgtttaagaaatcccccaactgaggcagaaaaaggccaagttatttgtgtgatgcacgtgaaccgcccgagctggtcactaatgaagtggattcgccctattcctggcgactctacaaggttggagacccccgtagacttcgcagccatcgccccttgctgcagacccccaaagtcaccgacagccttacctagacctgaccttcctcacccacgcgccctcgtcccggaaggcccgccctctacccggctccaagctcgcgcaggcaactattacggggagcagtagagaaacggaagcttggcagctagagcggagccctagtgaacgacccggagttactggctccccctcctgaggcctccgaggtgtacctggcgcctgcgcagtaaggctagcgccgccgcctgtgcggaggacccggggaggtggtgggctggggagagttagaaaggtctggctctcctggaagggcatgcacggttcggtagtatgttttggtgggaatggctacagacctgcctccaaaagctctgaagcaatggcgatgcgtgtgccgtgtggtctttctgaccgacttgcggcgccatccccctccccttccatctatctgctcatcttctaatagttaattaggatccctagctgcaagccttccttgctactgggttaggagcgctttcccccattgacccaggagcttcttcagggagtaggggatggaacgtttgtctcctcagtagttatcttagacctcgctgggcagatagtagaaagcattgtgagtatttcaccccatactaaatctgttttcaagcaagccacatcccataggcattgtatgcagcacttactcaatgtttgatagtttgggtgaggaaactgtactcgttttctgagtatcgttcaaggcattttataaatatttcaaaatgtaccctggaattaatatcggtagtgagttgcctacctagtgggtattgtatttacaccctctttcctcctacagaatttacttttaagttagaatttgacgtctaatcaatctatgctataggatttgcttttatcaagttaagttttgacatgttatcagccttatatgatatagtaaacagccttataaagttgggtctagtgactacatttaagtttacaaaggggtaatgagtatcctatacatggctacagtccagaaaagaagtcctaaggagcgaaactcctgggagaaatttcgtcttgtcttttgtacttgtttctgtggagttggcttgtttttatgtaatggccactgaatcatataaacaagaagacttcctttacgtgtaagctgctggtttaaagccaaattttaattggctcgaggcaagagctatatatatgtgtgtgtatatatatatatacacacacatatatatattttttgcataaaccttgttggcttcgttttgtatatccttcctgttttttccttttcacgtatgaattattggtgttatcaatgttttgtgaattactataagctaccataaatctttcttgaaacatagctaggtatatagagtttcaggtgactgtttaggtactttgcactatcacttttattaagtcaatttcatgggggttcatattagtttcctgaggctgctataataaaataccacaaacttggtgttgtagagcaactgaaatttattatcttacagttctagaggccataaattcaaaatcagcatcactgggccaaaatcaagatgttgacagggctgtgttccctccagagactctaggggagaatcagttctttgactcttccagcttctggtggctgctggcattcattggcttgtggccacatcactttagacttcaaggccaacatcttcacatctctgctcccttttcacattgccttcactatgtgtgtcagacttcccattgcctcccttttaggaatgtgtaattgcatttaaggcccatggagctaatccaaaatactctctcaatctgaagatccttaatttagtcacatcttcaaaggccttttccccgtatctggtaacatttgcaggtcccagggattagactctgttatctttggggaacagttttagcctaccacaggattagaaggagtaagccattgaaattggccaatcagagactgttacttatcaataggaaagttggaatattagggatggaaaaatgaaatgaatagaataaaattgaacctcctatggatattgacttcaccagacc

SEQ ID NO: 586707 - DNA, 4001 bp, Homo sapiens
gctgctcagaaggctgaggtaggaggactgcttgagcccaggagatccagactgcagtgagccataatctagccactgcaccccagcctggatgacagagtgagcccatctcaaaaagaaaaaaagacaatatgtgtttgttatgaaaaaggatgactaggccaagcacagtggcttcacacctataatctcaccactttgagatgttggccaggagtttgagatcagcctggccaacatgacgaaaccccatctctactaaaaatactaaaattagccaggcatggtgatatatgtctctaatcccagctactcaggtggctaaggcacaataactgcttaaacctgggaggcggaggttgtagtgagctgagattgcaccactgcactccagtctgggcaacagagcaagaatctgtctcataaaaaaagaaaatagaagaaaaagaaagaaagaaaaaggatgaccatcataacattatttgctataacaaagaagaagaaacccaaatggccaccaatagaataattaataaattgtggtacatctatgcaatatactataaaggtgccaaaaataaaggccgatctactgcaatcaaaagatgtcagatattctacatgacaaactgcttaacagtatggataatgccatgtatattaaaggcggggagggggacgttaatatatacagagggggaaagtggaatgacacttatttctgaaagattattagaggctatgtactacttctgaaatactgggactttatttaatgaatatgtgttactttgcagtcagatgaaaaaatttaaacaagtaaaactggcctttggtgtgaaaaacaatggaaaatacaaattatctttatctatttttcggtttctagtaccaaaaaagtcacacttcaaaattctccatgatgctttactcttagcaacggatctccattcaaaatactcataatatctagtagggtaaatgaacatctaaatagcctaatacaagaaagttagcaactttcctcacgtacaaatttcaaaaatggtacctattcaaaaattgacttcgatctatttctcaaattgactttttaattaaccaaaaccattatccaaagggctaatgttcaaacttaacaaacactgaaaatttctatgcttgtagtatgaggggtctaaaaaaagatttacgttcgcctctgccccacaactggcctgttaaaaaggctgttaatggaaataactaatcactggccctaaaataccacattccagctggtcttcttttgatacagcaagctaagtttggagatctttacatgcatttctcaccttgtttgtcctaaggaaaggctctgcatccctccagaaaggctggagaacagctatctctggaaatgacacacacacacaaaaaaaaggcaaaatatttcaggccttcctaatacaaaataagagatcgatcccagctaacgttctcgttgcattatgttctcgtgagatgcattacctcttgcaaacaacatttctcagacatacagaaaagaaaacggcaagtacatgcctacatatgatgggaaaaggtagcggaatcacgaatacgttttgtaccaaagctaagtgcttcatatatattgtctcgctttactccccacaacaatttaaaaggtaggcataagccttaaaattacaaaatctgaaacagcgccgagctcccatactagcctgccttcgctagctgaagcattagggttcgaacccaggtgggtctttcttaactcaaaaccaaggtaattccacaccgaaggctctttccatccctcttcctcctccaaagacaaatctgcaaagggctgcactgtacagcagtcacccacacccacttcttaacaaaaagaaaggaaagcacagcctcaccaccttcccaatctcaccctgaactgcacccatccactgtagttcgcttttacttccgcctctggggtccggagcggctaggaggagcggaagtggaaaagactaacttccggcctcgggtcgcgcgcagaggtgatgtcgttggtcctgcgccccctcgtggcggtacttcagcccttcgcagcccgacgctaggggcctggcagggggcagcaagagaccgcggtgagcgcggggtattgaacgccaaagaaggggtttggagggtggggtggggcctgggactcccagtcgcctgggcagatgtccgtggggaactgtaaggcatcttatagggatcctacagggggcatccactgccggccgacgacacgtggtggaaaagtagctattatttacatgcgtgttgcagtttttgataatgcgattgctgctgctaatgtgactaacgcgatgccgatgaacatctcggcgttttttggtgcaggataagcgggtgtagactctgtctgtttagtcccagattctcctcctttaatgaactaccgtggaaatcctggagtgtcactgctggtctgaattcagcatccgccttcaggctggaaatcaattctagtatacttcgatttccttacttgcagttcgaattcaaatatgattcttttgacattgtgagggtttgcgctatttaaagaatggaggcaaccgaaacctcatctccacagtggatgcatttttgctccctcccgaggcgttgccttaagccacgcggtcctgtcagcctcacctgcctagtgatggtgacaatggaagagataaagcttcaattcaaggcacttctcctgtgaccatcaaaagaaagataatatctacattaatgaattaattgtgtctgtcgagttatcctcaggagacgatggtgatttggtccttaaaaaaacacaggatcaacaggattgaccctgaattctacaaagaggaaaaatttcaggcattactaactcctccatgtacaagcctaatgatgtaattttctggccgggcgcgatggctcatgcctgtaatcccagcactttgggaggccaaggcgggaggatggcttgaggccaggagttcgagaccagcctggccaacatggtgaaaccccatctctacaaaaagtacaaacattagccaggcgtggtcacaggtgcctgtagtcccagctacttgggaggctaaggtgggagaatcacctgagcctgggaggttgaggctgcagtgagccgtgattgtgccactacactctagcctgggtgacacagtgaaccttgtctcaagaaagaaaaagaattttctttatcccatttctttctcctttttcttttttttttttttttttcctttagacggagtctcactctgttgccaggctggagtgcaatggcgcgatctcggctcactacaacctctgcctcccgggttcaagcgattcccctgcctcagcctcccgagtagctgggagtacaggcgcgtgccaccatgcccggcaatttttttgttttgttttttgtttttttgtttttttgtattttagtagatacggggtttcaccatgttggccaggatggtctcgatctcctgacctcatgatccacccacctcggcctcccaaagtgttgggattacaggcgtgagctaccgcacccggcgtgtttatcccatttctatgccaatgaaccaattacgttttaccatcactcttcccctttgactactcctagttgggttgttgttgtcactttgtttttaattaactctctgttttgttggtttagaaggataaagatttatctttgggaatttaaaatactaataatcagtctatctattaagtaaactacttactgcaattcctccaggtaaaaattagtcccaaaaaattggagatggcttttaaaatgtgaatttctaaaatctatattccttctgcatggaaggagctcctatgtctgaattaatattattatatattatgtatatacacacacacaaactgctttacaatcggcatgtaaaataaaatttagagattaaattaaa

SEQ ID NO: 586708 - DNA, 4001 bp, Homo sapiens; identical to SEQ ID NO: 586666

SEQ ID NO: 586709 - DNA, 4001 bp, Homo sapiens
tgtaatttttaaaatatatttttcatctgaggttgactaaatctgcaaatgaggaccccattgatacagagtgccaactgtgtactctaccagcattcggaagttccaaaggccctcaaatacagcatgcataattcattcccctccttccttctaactctgcttctttgcctgtaatactaaaactaggactccaggcataaacttaacttattaaatattctaattagactcaaatatatgagtatataaatttgtgttaacaattaaaacaacaaatatttcatatattttcatatatttgcatcctcctttgcatgtcttctttctcagaactcagattccattaagaaaaacagctttgatttccccgaacgttctcccatgtatgtttgggattatgtcacttcaccctagttctcaatcaattatgtattaccatcagatattaatatcagataataattgttacataagtctctatacattttttgtccagtaaaactccctctctcatttccagccttctcttaaccaaacatattttctttgttttaaaaagacttatagatgggaggtgtggaggacttaaatacacatgtaccagacctggcttgctccggtctgaactcagaccacgtaggactttaatcattgaacaaatgaacccttgatagcagctacaccattaggatgtcctgatccaacatcgaggtcgtaaaccctattgtcaatatggactctagaataggattgcgctgttatccctagggtaacttgttccgttgatcaaattattgggtcaatatatgtatagtaattcgcttaaacttgtttagtcttagcataggttgctcggaggttaaattatgctccgaggtcaccccaaccaaaatatttaatgcagggacagtagtttaaggcctgtgggcttatctgagctttgtttgcattaataaattaaagctccataggatcttctcatcttatttattcatgttcgcctcttcacaggcaggtcagtttcactggttggaagtaagagacagctgaaccctcgtggggtcattcatacaagtccctatttaaggaacaagtgattatgctacctttgcatggtcagggtactgtggccgttgaacatatgtcactggcaggtggtgcctctaatactaataatgctagaggtgatgtttttggtaaacaggcagggtaaaatttgccgagttccttttaattttttttaacctttccttagagcatgcctgtgttggattaacagtatcggtaataataaatttgttgagttgtttattaatattaggctgttaatttgtcagtgggttattctggtctgatgtaggcttaagcagtggagaatatttcatgttacttatattaatattattgcatctataaagtaatagattagtccaatgtggtgttaggagttcagtggtgtgattagaatttagagtggttggatgttgagcttgaacgctttcttaattgatggctgctttcgggccaactatggggataatgttttttactctctacatgaaggttgtttcctaatgtctaaagagctgtccctctttagactaacagttaaatttacagggggattaagtggctctgtaggtaaatttaaagttgaactaagattctatcttggacaaccagctatcactaggctcagtaggcttatcaccactactcatgaatctccccactattttactacatagatgggtgtgttcttttagctgttcttgggtagctcgtctggttttgggggccttggctttggttctctgtgtaaagttatttctagttaattcattacgcagaaggtataagggtctatccttgctattttattcttggttaactttttcatctttaccttgcagtactacgtccactgcgcctgggtaaaatttctttcgcctatacttttgtttgggtaaatggtttgattaaggttattcggtagtactattagttaagtttagggctagagttggcacaaggtggtcaaattatggtgaaatctgggtgtaagacagatgctttgtgttaagctacaccttggttcatccaagtgcactttccagtacacttaccatgttacgacttgtctcctctatataaatatgtagggattttagttaaactaatctctaaagtgatacttgaggagggtgatgggcattgtgtgtgtgctttatggcctcatccaattaagcactctgctcttaatatactgctgaatcctccttgagcccttagatttcataagggttgtgagattttctgggtgtagaaaatgtagcccatttcttaccgcctcatgggctacaccttgacctaatgtttttatgtagatacttgtgcttactttgtgacttttactagggtttgctgaagatgatggtatataggctgagcaagaagtggtgaggtaaattggggtttatccattatagaacaggctcctctagagggatataaagcactgccaagtcctttgagttttaagctattgcttgtagtgttctggggaatagttttgttgatttaactattggagtttagggctaagcctagtggggtatctaatcccagtttgggtcttagctattgtgtcttcagaagtattaaagcctccttcatagtttattttatttcagcccgggttttatacaactgagatgaagcttagctttattaaggatagacctaaaacactctttatgctgagttctattagctcaggttaattgtatggctgcggtggctggcatgaaattaaccaaccctggatattagtatagtttagttaaacttttgtttattgctaaaggtctatcactgttgtttcccgtggaagtttggctgagcaacgtgttttgagctgcatttgtgcgtgcctgatacttactccttttgatcaaggtgatttagatgtactttcactgggatggggatgcttgcatgtgtaatcttactaagagttaatagaaaggccaggaccaagactgtctgtttatggggctgtataagcccatctagacattttcagtgtcttgctttaaataattaagctacattaactgtatatatgttaagtgcaaaattggagtatagaagaagatacaggcaatatgcacagttgtagggttcagggatttaaagttgagttagcaggagttggtggagtagattttagtactcgcgagtggttggtgtagtacaaggtgacagatgatgcctttcggggtgtgtaaatttaggatatgggcttagtaatggatgggcgtgcgtgttagatataattgttgtaaaagtagaattagattggtgaggggttagtttcctaaaaaaatttgcattagttgaggggtagctgttggggatacccaaagctaaaatacaaatattttgggctctggcagagttgaattaaggcttacttgtttttgaagtttggcaaggtgtcttttttcctgggttgatgaagtcagagatggggcaggggagtgttgcagattttcattttaaaagtccaataaggggagcggttgtatgtgtttgtctgttaattactgttatgtccttcaagcatgaattaattagcaccttagggtagttatgccctgtcggaatattgaatttaggcacaattaatataggtgattggtaggaatcaaagacaggtccggctgcaggtgatggggaggggaccaggccttctgtgatgtgatagcatacccgaaagttaaaataccaaatgcacggcagtgctcccatgactgattaatagggtgatagtcactggtccatcgagatgtctacttttaactaaagaatatatatagccttgtgaagagccagtataaaaagaaaaccagcacaagacaaagataccctctttcgccactcctattcaacatagtactgggagtcctggtcagggcaatcaggcagaaggaaga

SEQ ID NO: 586710 - DNA, 4001 bp, Homo sapiens
ttaaaaaatgagacaagctctaaattctgggaaaccccaggtctctaaccccaaatttgtggggctcttgctgtgtgttagggactattcggtgcgttacctatatgaacgcctgggtgctggcattattatacctatttttttggatgtggaaactgagctcagggtgggtatttgagcacagtcacagagccagaactcaaatctggctgtcacacaaggccatccctcttctggagtgccacttgtggaatgcccaggtggatccctgccctcctcagggggtgcgtgtgggcggagggaatgctttatcggccaggcatacataagccttcacctctccaggaccaagaaaggcggtcttgcagtctccctaactccttcgcgaacttcccgtaggtggtcagggcgctcggcggcaggaccacggcccagctttgtctcccccacctgaggagcgtgcaccaggccgcgccccgcaccaccccacctccgcccacaaggcccgcgaccacacggtcacccgcgcccacggccgcctccatcttacatttggggatcattatttattccccgaccttggaaacacttcatgagcaccgtgctcgccctactccacccctcccaccccgactcccctgccctccgcatccccttcctcaactgccagagtcgggatcccaggtgggtgcaggattcaaagtggaaggtttggacaccgcagtcccagttcccggtccctctgagccggggctgaggggattccccgtcatctggaaaagccaacgggcttcagcagggccagggcaccgcctcggctggagagaacccgcccgggccacacacacctctcgggcagctcagagaggcagcgagggcagcgcgggggcagggggagaggcgtgccgcgtgtgcgcgtgagtgtgcgcgtgtgagggtgagggtgtgagcatgtgtgtgtgtgtgttggggtgtatgcgcaggcgcgcgtgcgtattaagatccggggtgtaattccgcaaagaaggtccaggagatcgggcatcgctagtatggacagagctttgtgtccaaacaggcagtgcaaggactaacccgcgagggcggggagtggggttctcccgggaggggcaatgcgaggagccgaggctgggcaccggaggggagcgggattcctatcccggacgggacgcctggatgtgggaagctccggacctgggctcctgccggagggtccgtgcgccccagacccggctggtccgacgcgggtgacacccacaccccagggatgctccatgccaggcaccgcgcacgggccgcgaggtcgggttcccgaaacggcgcccgcagcagcggggagaggagtggcctttagggggacgccacacctcccgccccgacccggctccccggatcctccgggcgccttgcccgccgcccaccgggccccacccgggcagcggagcccgcaccgcccggcccggggcttccccggcggagcacgcggggcgcggggcgcgggttacggccccccactctgcgcccaccgccgcccaccgcgcgggagctcgggcgcagggacgcaccgccgcgtccacactcccgccggctccggcggtccctcctccaggcactcacaaaattgtcgccgcagccgttgtccggacacagcacatagaaggagacgccggggtcggcgtagaaatccatcctgcgttcggtctcctcggtggcgatgagctcgaagggcgtgttggagcaccatttctccgcaacgtcggccagctgctggaaatccatcgcggccccgcgcccgcctcccgccgccgcccgccctcccgctcctaggcgccctcctcccgggcgggcagcgcggcgctcggctcggcctgcgcgggctcctccggggccgggctgggccggctgggactgtttacatgcggtgcggagtggggcgggcggcggccggggacagcgcggcgccgcgcccgcggctcctcctccgccccgcctccccccgcccccttgcgggccgccgtgggggttggcgcggccgggccgggacgcggggcggcgggaggagcggccggcacccccgcgggcgcccggattttcctgggcgctcccgccccccctttatttttaaacaaacccggagcatcccggggccctggccatcgcggtgccgccccgggccgtgacgtcatgggccccagccaatcaccggagcctgagaccgcgccgcggcttgcgagcccggtgacgtcacagcgcgagcctggaatccgcagctccgcgggttacctggaagcggtgcgagcgcccaatacctggttagcgtttctgtggagttagaaagcccaggaagcgtttgcccaaatgcgatttaaatgcaagggaggccatagaactgcagataacttggaccttgtctggggctagcagtggaggagctgagaaaatctaaggaaaagggagcttttctttttgcagaaaccaaagttctgttctccgattgatttaagggaatgtgtcttcttaatgcatttatcagacactaatatgaatgttcacttgcaaagggcgtgtgtgattttttatttgcgttacgtaaagctgaatatttcttagaaatgagcctcataagactggcttcagtattattcagcttgaattcacattgcataacctaaaaaggtcaagaggataaagcacattttaaaacaagagtgtgtggcccaacgattgcacctgttgagtgctcactggctgccatatactggacaggcattactggattgcagaaaatgcactagggtcctcgccctcaggacttgaacactacaaacacagacacgttataaacattcagccagcttttttctgtaaagtgtgtcttctgaaccaggcactgtgcacgaatttacattcccaccaacacgtatatatgtttccttttctctgcaccctcaccaacatctgctgttttttgactttttaatcatagccattttgactggtgtgagattgtatctcattgtggttttaatgtgcatttctctgataattagtggatgttgagcattttttcatatgttcgttggccacttgtatgtcttttttgagaaatatctgttcatgtcctttgcccactttttaatgggttttttttttttcttgttgagttgtttgagttccttgtagattctggatattagtcctttgtcagatgcgtagtttgcaaatattttctctcattctgtaggttgtctatttactctgttgattgtttcttttactgtgcagaagctttttagtttaattaaggcccatttgtctattcttgtttttgttgcacttcctttggggttttagtcataaattatttgcctaggccaatgttgcaaggaactgaattctgccaacaacccgaatgagcttgaaaagcagatttttttctcaaacttgttgtcttttccagacaagaactgagcctgactattaccatgattgcagccttcgcagaacctgagcgagaacccagtgatgccatggctgtgctgggacttccgactttcagaactgtgggctattaaatgggtgttgttttaagctgttaggtctgtttaaattcttcatgcagcagtagaaaactaatacacaggacaatgaaggagacaggcacatgaatataaaaatgcaatatgctgttgtaaagttacaaaatggtccttaaaaaaaaaaagtatgggtgtctccagatagcacaagcttccttgcagttttacctggcaccaccatttaaagcataatatgtgttccaaaaatgaattccttaaattggagatgaaaatatgaaaaatacattccttttttcctttttcgggaaagaaggagttttttttttaatccatgtgttttaaaatgtatcagtcaaatttgctccaagtgatgtgatcagaattatgaagttatgtttatttaacaaatagtttttgtca

SEQ ID NO: 586711 - DNA, 4001 bp, Homo sapiens
ttgaaactctcccatcagctcctccctgcctgtacctctctcccaacatgtccgggtgggggtaaaggaggtctcatctgtcaaggcttggcgggcagaggcagcctcggagggcctgagtccctggctgggaggatggtggaacttccctggtgggttacctcgaaggtgtcctgcagggctccagagacccccaccccagctcccctgccccctcaccaccccttctgcccaccccacagccttcaactcaaggtctccctctctcgcctctcctcatccctgtccacccctgccagaaaggaatcagaaagtctgttctgtatgagggaaatcagcgggtcagagtcatctctcagacacagccacgaccaggctgagcaaggacccctgagcctctgtctcctcctacagcccctcagccacggtttgttttttttttgtttgtttcttttttgtttgtttttttttgagagagtctcgctctgttgccaggctggagtgcagcagtgcaatctcggctcactgcaacctctgcctccagggttcaagtgattctcctgcctcagcctcctgagtagctgagactacaggcgtgtgccaccatgcccagctaattttttttttttgagacggagtctcgctgtcgcccaggttggagtgcagtggcgcgatctcggctcactgcaggctccgcctcccgggttcacgccattctcctgcctcagccttttgagtagctgggactacaggtgcccgccacctcgcccggctaattttttgtatttttagtagagatggggtttcaccgtgttagccaggatggtctcgatctcctgacctcgtgatccgcccacctcggcctcccaaagtgctgggattacaggccatgcccagctaatttttatatttttggtggagttggggtttcaccatgttggctaggatggtctcaatttcctgacctcgtgatctgcctgcctcggcatcccaaagtgctaggattgcaggcgagaccctgcaactggcagccattttttcttttttccttttctttctttctttcttcctttcttttttttctttccttccttctttctttatttctctctttctttctctctctctttttttttttggcagtgttttgctcttatcgcccaggctggagtgcagtgccacaatcttgcctcactgcaaactccacctaccaggttccagtgattctcctgcctcagcctcccaagtagctgggattagaggtgtgcgccaccatgcctggttaatttttgtatttttagtagagacggggtttcaccatgttagccaggctggacttgaactcccaacctcaggtgatccacccaccttggcctcccaaagtgctgggattacaagcatgagccaccacgcctggccccgtcagccatttaactggtggggattccccgggtgcacctgaggctactccaagtcaagagatgatactgtcacacacccctctggactccctctctcccgaccagggctagcagcatgtgcagtgcctccgtgaggtttggaaagacccatccctccagcagataaagcccccaggatgagggcaggcagagatgactgtctatgtgacaaaagccccttcatcctcccggggggagcctggagagcagaagctgtggatttcagccgcccctcagccaggagctgtgtgcagaccatcccctgcacaaccacaggcacccacaggtctccacagtgacctcttcagcacccccaaagcaagatgaggtcacagcacgggtctccagccctgtggcagccccttgccatgcaaaggggaggaggccacctgcagccctgctgcctgaggcaggggcatgtactattaccacccaggagcactggacctggagcatcagcccaggagcactcacctggtgtcactgtagtaacggacgcgcagagccggagagccagcgtcagaatccagatcaccagcatctcccggggaacgggcccctggctgcccatcttctctcatcaggagggaccaagaaatgaaggcctcccaggaagggatcagctataaaaaggaccccagagaactttgccttgaagaagagcagtgcctgtcccagggtagaggtgaggtgatggcattgagcaggtagcgcgtggtgaccacggggagttaaacgaagggcagcctgtccacccttcttccttataagtcctggagtagtcactgccctgagccggggtccctctctgtcagcggaagtcagaggcactttgggtggggcagcgcaggagggagggagggaggctagaggtgtgagcacaccactggtgacaagaggtgggggccaagaagcaccaggaagcgggtgaccacggaagaagttcagaaccgtggaaggggcagctggcaacaggccagaccaagtgaaggaccctccactcccacccccgagaagcccctctctcttccagccaaccttccccatcccctgcctcaacatggtccttgccaaatgtccagggctttccctggggtccccagtttccagcccttctcctgggcagagggcccactcacacctgagactttatggtccttgtccccacccctggccagacacagaggtgacaaaaggccatggcccatccctgcccagagaaagcatcaaaggggcctctgccaagccagcacccaaagacccaaggggacacgttatttctgatcactctcgactcctcaggcaggcctgactgcccacaacagcaggaacagaagggcccggtgccagcatagacaggctctgctgtgtgagtttgctatcagggtttgggggccttgtgggggatcaagatctttggggaggctcagctttacccatccttgcaaaaggtggctggaccaggcagccctagcccctggaccacccaactccctgaaccaacaccaggggtctaattgctccctaagcccccagtatcaaggtcagggcagtggtgggggtggggagagcacagatgacaaagcccaaggggcccctgcccagagtcactccccaataaaatgggtccccccaacctctgtgttttctgtgaggaacctcatggcccccaagggctgcccacagaccccctcctttgtccccaggagacacaggtgctcccaggatcctcctacagtgccacctctggaaatccctgttctctgatcaaacagagaccactgagggggtgaaaaggagacagacagagagctgctgctttttacaataaactctgtattgtgcacatgaagacctggagatgtgccgacttcctgtccccaaagccaatcttccccgccaaggcgactgaggatttcaagggctcagagttactgcaggaatccaggtgacaccaggaagagaagggggaggaggggaatcggaggggatgggtttaaaaggcagaggggaggcaagaagggagggggatcgaaggaaatgaggaggagggagactgagggggctgcctttccttggggactggggaactcatgccctgcccccacccgcagggctccaggggtgagagaaaggggtggagaataaagaattgggcagcagggtgatggggggaacagcagctggggtatttaggtcagggggagtcgggggcagaaccgatgaatggacgggctcagaagggagaagatacaaggaatgagagcaagagaaacggggaactgggcaacggggtgacggggagaacagcacctgggtatcctaagacacagaggctatctataccttgctagggaccaggatgtgaggagaggagggaggatttagggctgggggactggggtgcaggatggatgaaggaacggggtcaaaaggggaggacgtctaaggaatgagagcaagagatgcagcagggagttagatcaggagagggcaggagatgggatggggctgcaggctgcctccaggttcaaagtaaga

SEQ ID NO: 586712 - DNA, 4001 bp, Homo sapiens
gcaaagggatacctgccatggacaggtgactgagcacccaagccttggtggccctcatgctgggtgtagggatgagagggcatctgtgatggcagggccgggctgggcaaacagacaggacattgtgttttgttgacaagcaatataaccaggtgatctgcaggatgagagggtgtgtctgctgggaaggaccaggctgaggccactgcagctctctctctagacccacgccctgccctggtatccccagccccatgacttcagcaggggtgaggctctgggtccctggagaagggacatggaaagggtcagaggctgcccaaagctggccagggtcccaaaggacagccaatgccaggcacagagacggaggagccacagaatcctggagagtaggaacagggtctgagaagtcacattctacaaaggcagactgaggctagggatgaaatcaatgataacacgcagaaagtggggagaggccaggaaggggccaaggagaggtggggagaagaagaaagagaagagagggggaaggaaggggctagaagaacccaggaagagggaagggaggagcagagagaaagaaaggagggggccaggagcggtggctcacccctgtaatcccagcactttgggagcccaaggtgggaggactacctgagatcaggagtttgagaccagcccggttaacatggtgaaaccctgtccttactaaaaatatacaaaatctagctgggcatggtggcatgtggctgtaatcccagctactcaagagcctgaggcgggagaatcgcttgaacccgggaggcagaggttgcagtgggctgacatcacgctacagaactccagcctgggtgacagagcgaggctccgtctcaaaaaaaaaaaaaaaaaaaaaaggaggagacagaggtgagggttggggaggaaaacaaaagatcatgtctaagatgctgttattagagatacatcaccaagggtctggaaggcacagaaagtgcaaggaaaggagtgttttcattacaacgaatgggctggcagatctgggtgagattgccacagggtgacatctcgaggggcagggaccctgaggtctatgggtccagtttctgtcttggttcccctgcgcccttctctgggggcaggtgaggggcagagggagctcccagagagtccagctggaacccactgtcatccctcctgctctgagccccccggggtccctgtggccatgaagcccaaagcggctgagctggaatgatcctcagaggtcctaatgccttgtcttttggggagactgaggcaggagatgaactgagcggccccagggtgcacagctggttcatggcaggattagaatctggggctcctgaaacgccattttgtgcccatgtggctatgtcccggaaacattcctggggcacacagcagggtgtgctggtgtgggaggtgacagggacttggcgggaacattcactgggtaaggatagactctaatatgggttgaacaccagtcttgtgccagggatcatgcctcggggggggagctcttttcaatcctagcagctgccctgaaaagcaggtgttattattcttactttccggaggggagactgaggctcggaaggggaaactaaggctcagagacctcaactggaagaggctccaatgccctggctcttcccccaaagctcgctggggagagaagagaagtccagggggtaggcacagggctgagctccaggcagagggcacacccctattggtgtcctggaggcagctctccctcggggatgggcagacagagcaggctggcccctgggatgggggcctcttgggcagcggggcgtgggggtcactcaccctgttctgcagcagcttgtgggggcaagagcgagaggaccaaggtcagcagacacagcgccatggtccctggccttggcatcggagctctgagcacgtctcacttgcctgtcacccccagaggagctggcgaaatgagcctcagagaaggaaactgataaataaatgggtgccagagacctttggtccctgagacactggggatcaggggccagcctgagcctgagtcagtctggaagcttccctcatgacttggggcgcagggcctgtttcaggccaaagggcagagggagggggtgcctctccctggcccggcagcccataggcatgagggttatcagctttatcaccccaacagaggggcagcccagagggcctgtaggagccaggggggaactgatgagatcccccgaccgagggtggtgggagatgggcaagagggactgggcctgagctgggaaaggaggagggtaccacctgcatttgaccctaacccctagcagggacaccccctttgtctcttttctaacccttcttattggccgggtatggtggctcacacctgtaatcccagcactttgggaggctgacgcgggaagatcacttgagatgaggagtttgagaccaacctggccaacatgatgaaacaccatctctactaaaaatacaaaaatcagccagacttggtggcgggcgcctgtaatcccagctactcaggaggctgaggcaggagaatcgcttgaacctgggaggcggaggttgcagagagccaagatcgtgcctccgtactccagcctgggcaacagagcaagactctgtctcggcaaaaataaataaataaaataacccttcttattgtcctatgagtatgccctgaagacatggccatgcctgggcagggagttcttgggtttggtctgtgggttccgaggtaagcacagctcccatggccatctggagtgaccctgccttgtgcaagctcagcagagccaagtgctcactccctggccaactggggttgaatctgaggtcctctcctgtccccagaacctgacattaggcttttctgccacagggacctcagcagaggcaggcctagacctgtcctgactggagccggggagggggctccctgcaaagacacaggaaggggcccagagcattcgttccatgccccattcagcagccagtcctgggagaaatcccatcccaggagggctctgacccctaacctgaccccaactgcagaaggaggagaaggaaacctctcacttctcattctgagctttcagatttgcttttattggtagggaaattccagagtggggagccacccaggaggagacaggggtgccgaggcttctgggagtctggaagctcccggatggagaggcttacagcccccagccttccccagcaggagcacaggcaggggactggccaagtctgtcagctcagagcaggaccggcttcagggcctgacttcggtctcctcttgacccgccccggaggcttgtggtgggctctgtgtttgcagctctcctgaacagagctagatgagggtgggaggcccccgttggctcacacagtggatgctaccatctccggcctctggatgtggagctgggggacgggagagaagaggtgaggccaaggggcagacccgggaaagggggagccccaggaggaagagggagccctggcggggaggagggaaccccagggggagggagggagtcccagggggagggagggagtcctagggagaggagggagtggcgggggaggggggagtcccaggggaaggggtggccccagggtgaggagggagtcctgggggaggagggagtcccaggagaagggagggagtcctagggggagaagggagtcccaggggtagggagagtgtcccagggagagggagggagtcctaaggagaggagggagtcctgggggaggagggagtcccgggggaagggagggagtcccgggggaagggaaggggtcccagggggagggagggagtcccagggggaagggaaggggtcccagggggaggggagggagtcccagggggaaggggaaggggtcccagggggagggagggaatccaggggggaagggaggggtcccag

SEQ ID NO: 586713 - DNA, 4001 bp, Homo sapiens
cttctcccggcaccctgctgctgtctgggctgactccgctttcaaagagaaaaagagagaacccagccatgtcctggcagggggcgcatcacaaaaaccaggagacagggaaagctgaacaaagagggccaggcacggtggctcatgcctgtaatcccagcactttgaaaggccaaggcaggagatcacttgaggtcaggagttcgagaccagtctgaccaacatggtgaaaccctttctctactaaaacaaaatacaaaaattagccaggcgtagtggcgtgtacctgtagctgaggcaggagaatcgcttgaacccaggaagcagaggctgcagtgagctgagatggtgccactgcactccagcctgggtgacagagcaagactccatcaaaaacaaaaacaaaaacaaaaacaaaaaactgcccagagaacaccaaagagaaacaggctaagctcacacactaatgacttcaaagggcatggagtgaggactaggtgaagaggcagagagacagcatagaaaaggaaacttccagaaggagctacctcagcagtcaggcgtgatgagttctggagaccttaaggcttagcagtgagtgttcatcacacaaatagacatatttttctatactattcccttttggccgtgggattcattagtttacaagcatgaaccccagcatgtggatttcaacccatttcacaatttgtcagagttaggatcagagatccggctgtcgggggtgtcagggacaaggaagacaggcagccacagcagatgggaagtgggaggtacccgacctgctacccctcacctcgggcacagcccatcttgtggctgagagctggggtgtcacgtctcaacctagctcgtgggtgccagggaagtggggtcagggattatgagaatccccaggctacagcccttggctccaggatgtggccctggaggtgactgagaaggggactcatgggcctgtaggctgggtggcctgggatcggggatcagaagcagacactgaagtacagagaaaagagaagtatagaggaattgcgaggtgttcctgcagggcagaagagagaagcctgggaccccacgacgggtagtctcagacgcacccttggaagcgaagtggacatcaggagctccctgccccggccctggtaccaacagctgtacccagacacatgggccctggccggggtaagagagtgacggcagagctggggaggagccgccgggggacaaaaggcagagaggctgaaaccagaggaccgagaccaggggtagaagttagagggctgtcagggagggagaggccagtgtgaaggggacactcaagctgggggcgtgaggcaggtgacagaaggagtcaagacaggaagggcactgctctgggaagacgtaaatcccaccctctaccctccagctgcagatacagattggggctcagccgctgcaacctgctcagtgcttggtggagagtggcagagacccagctccctcactctttcccaacctcggttttccctgcacctggagctctggaagaaacctctcctcaccgccccctcccccagtcaggccgtgcctcggttctccctgcacccagagccccaagcggtgccttcttatcccccctccccaggccttacagccacttttccctcccctttcctggaacatcacatcaggagcttttctccaacccccttccgcctctcccccttacctgtggcccacggggaggccttgagcatccagaggaggccgaggagccccaacagctgcatgggcccagcgggcagggggctggggcagaacaggcttcaggaccaagacagcggcagggacgtggccctggggcgtgcacgtaatgaaagtgctggttatcggttttgctgagcgtcagggctgagcacagcctcacctttgcaccgccccacctctcccctcttcctcccttctccctgcacccggacagacagacgtcagcgctgtgggaagcgggacacgggggaaaaagataggacaagtccaggaagtgtcaggcaggaagagctgctattggctcagccccacagcctgcctggcccacatggaactgcctggaagctgcccttcctccccgacacccgtggagggtacccttgaccgagggcttggactctggagtctggtcctactcctgcagcctctcctgagtttcaattcctcctgctggggagacagtggcacctcgctctccttcaagccccttctgtccctcagtctgcccctgctccatcctgtcccccgcaggaccccataggccagaaaaaaccgtgggagtaattaacacagaattccatctgaagtcattttattatctgaagagttggggctaggtcccagaaaaggaaacatggatgaccaaaggaaacactcaaaaatactagtctgggcccggcgcggtggctcacgcctgtattcccagcactttgcaaggctgaggggtgtggatcacttgaggtcacgagttcgagaccagcctgggcaaaatggcaaaaccccatctctactaataggctgaggcagaaaaatcgcttgaaaccagaaggtggagggtgcagtgagccaagagcacaccactacactccagcctgagcaacagagcgagactccatctcaaaaaaaaaaaaaaaaaaaaaaaactggtttggacccagcacattgtttgacctatccagtttgggcaaaggtgtgaagaataaacgttcttacccagctggtggatgtgtaggtgggttgggttgttttaaaagagtaatttgaggatcacttgaggtcaggggttcgagactagactggccaacatagtgaaaccccatctctactaaaaatacaaaaattagcctggcgtggggtgggcacctgtaatcccacctacttgggaggctgaggcaggagaattgcttgaaccccagaggcagaggttgcaatgagctgagatcgtgcctctgcactccagcctgggcaacagagcgacacttcatttcaaaaacaagataaagtaaaacaaatgttcttatccagctggtgggtgtgtaggtgggttgggttgctttaaaggggtaatttggtggcatctattaaaattttaaatgagtgccttaggacccagcaatttcaccctccatctctgtgtccaagaaacccttcaaggcagcattcatgaggatgtttattgactctcgattatggcaattttgatggaaattggaaacagcccaaacgattgtttcaacccagaaagaagatggaatagtcaccctacagaacactgtgctcaggccagattcagtggcttacgcctgtaattccagcactttgggaggccggggcaggaggatctcttgagcccaaatgttccaggccagcctgggcaacatgccaagaccccatctctaccaaaaaaaaaaaaaaaacacaaaaaaaattagccaggcatagtggtgtgcccctgtggtctcagctacttggtaggccaagatgggaggatcacctgagcccaggaggtcaaggctccaaagagtcatgatcgagccactgcactccagcctaggtgacaaagcaaaaacctgtctcaaaaaaaaaaaattatgaatataaaattaggtcagggccaggcacagtggctcacatctgtcatcccagcactttgggaggccgaggtgggcggatcacttgatgtcaggagtttgagacaagcctgaccaacatggcgaaaccccgtctctactaaaaatacaaagattagccgggcatgatagtgcactcctgtaatcccagctactcaggaggctgaggcaggagaattgcttgaacccagggggtgagggttgtagtaagccaagatcccgccactgcactctggcctaggtgacagagtgagactccgtctcaaaaaaaaattataaaataaaattaggtcagaccaggcacagtagctcacacct

SEQ ID NO: 586714 - DNA, 4001 bp, Homo sapiens
taaaaaagaaaaggaattgcggagtgaggtcaggggcaggggcaggggcaggggcaggggtgggagggaggggaccgcagtgctgaagccaaagacacaacagccacaggcctgagctccccagggaggaggtggaggtgagaggaaggtagccgtggcagagcagaacaaccccagcctaccatggtctggagagctccctgaagctgcagttggcctggggatagctcagagatggcccttaaatagtggtcctcccagggcccctggcatgcaccgggcccagtgtggaaggtgatccatgacaggacggagacctccctgccaggcacctgccttgggccattcagagtggatagggttggggggaatccgtgggcaaataccacggacgcagggactgcctaagcctccaggatctccgagagccctgggccaactgttttctctagagccaagggaccaagacccaggaaggggcatttggccaaggacacagagtaagttgaggctgcctaccccaatgggaagacttggccttgagccgtcagggagtgttgcccagggtggggccacccatgctggctgggacccactcagactgcagtgtggccggacctctggagctgtgggactctgggtgggacatcaccctctaggaggctcagccatctcataggaataggggggagtgtatgaaacccccggtctgcttatggagagagtttctgcaccaacctggccctcgggggccccttctaccaatatgcctattatcagggtgtccattaagcacccccaggccaggggaccccctcagggcactgaaatgctcaatgaacagagaaagcaacaggacaaataaaagaaaaatggggtgggcgcagtggctcacgcctgtaatcccagagctttcggaggccaagagggaaggatcgcttcaggccaggagttcaagaccagcctgggcaacatagtgagacccctatctctacaaaatatcaaaaaaattagccgagcatggtggtgtgctcttgtagtcccacctactcaggaggctgaggcaggaggattgcttgagtccaggagtttgaggctgcagtgatctatgattgtgccactgcactccagcctgggcgacagagtgagatattgtctcttaaaaaaaagaaaacagaaaactggaggtgactctgatgaggaagaactgaaaaatgagacctccattccaccctggcctcacacacacacatccatccccaccaggcctggcccagcccaagaattctctagtagatctgccaaacagagcccacacctgccctggaaagcccctcctgtgtctagtgcagccccagcagccccagctcggcctcagaggctgccactgtccatctggggcccgccatatctgaacagctgccagggccggcagtgctgggttcaggcagtgagcccacgggtccccaggggctggagagcttaactgtccctggagctggcctcaggccttcagccccgggtacagctgatcccctgcctttggggaagggaatatcataataataataagaagagcagctaatatacaacacagaaggtcaggccatgtcttaaaacacgtgtcctcacattcaatccatatcccattttccagatgaggaaactgaggcacgcatgggttaagtcactcacccaaggcagataagaagtggggccagaggccaggcacagtggctcatacctgtaatcccagcactttgggaggccgaggagggaggatcacttgaggccaggagtttgagaccagcctaagcaacatggtgaaactctgtttctacaaaaaaattttttttaattaaaaaattagtcaggcatagtggtgaagtgaaaaagttcccttatcccgttcatagggcatgcgatgggggtgtggctcgcttcttccatgcccagctgctcaaacctctaggcggaccatgcagacaggcaggctatggggctccgaccccacggcagtgtctaggggtggatgcttacagctcctgaagccccagtgggcgtgtgttacaggatgctcttttacttttgccatctgtaggtggcttgtgttcatcagctcagttagaccctctgccttattgcaaggacaaagggctttttgtatcctggggttcttgccttggtgtactgtgaaaattgaatcacatgtgggcttggagaatgagtgcgaggttttattgagtggtggaagtagctctcagcagatgatggggagccagaagggggatggagtgggaaggtgatttttcccctgaagtcaaggtgctcagcagccagactctcctctgaccatccccagccaaattcccctgggcatttgtgttattcagccagtcgatggcctgccagcatctgccagtgctgtcggtgtgctcttccgatcctctgctcctcttgatgtccagccacctgtgtgtgtacccactggggtctcagggttttcataggcacaggatgggcgggggggcggggggcgtggtgggccagggtggtcttggaaaatgtgacatttgggcatataaacaggagtgcctgtcctcacctaggtccgtgggcacaggcccaagggtggagcccttgccagggaccctgcctttctcctctcagcacttccctgtcccccctcctgtatcagtggcacatgcctgcaggcccagctacttaggaggctgaggtgggaggatcacatgagcccaggaggttgaggcttcaatgagctgtgattgcaccactgcactccagcctggacaacagatcaaggtctcatttctaaaacaaaaaaaaaaaaaaaaaaaaagagagagagagagggagggccaggacaagagcccctctttctagtgtttccagaaggaagcttccaaaaggttctgctcatccaaactctcccctcctcctgctccctcccagtcatccctgactacagctatttctgatgtccctaaactcctgtgactgagtgctcctcccagagctggggccaggtccagccatgatgctgtgcagcccgctttctgcagcaggaaaccgtgtgcctcagtttccccgacagggctgctctcctggtgtcctggcgttcctctccggggagaaaaaccacacgttccacaggtgttcaacaagccaggcggaaaggagaacccagctctggggacgggagcctggattccagtcccagccgcctggacctgctacagaagggggcctgtgtgaccgcgacagtggctagggtgcaggctttccatgcccggtctgtgagcctggccctggggcctcctggctctgggcttacagagtgggtagcagacctataactcctgcttcctgcctctggcttcctgctgccctgaggcctctgcaagcaagggctcttgcctccggggagcacgcccaggaccgtggcaggggctcccaaaggccggggacaggcctgagcaagcggagagcccccccgcctgcccggaggaggggaagcggcgctggtgaatcacaccgggcttacaaattagtctgagtggatttcctcccctggcctcctccttcataggaccggaggcaggaagaaccggtgagaaatctggtagagacgtgaaaaccccggggtgagatggttgggagatgtttgttcctggggggcgggaagtgtgagggtgcagtggccttgagaagggggagccgtgagttctgcacccacagtgggaccctcagttttccccatctgagaaatggtgccagcagccaggaccccttgaggctgccatcgggaagcttagtgccattggaaggaggtgggctttggggtcatcggcctggggtttggagggcagagccttcccctgtccccctttccccctgtgtagatggagtccttgacagaacttgcagcctctccaagctgcagccccctcacccaggtgacactgcaatgagtcagttgt

SEQ ID NO: 586715 - DNA, 4001 bp, Homo sapiens
cagtctccctgcctggcgcaccctgccctcttttctgactccacatctttaccctctaggtctcaacagagatggcacctcctccagaagggccctcggctcacccttccagcaactgcctcactggtactgggctctgggtcatgggtgaaggcccagagaaggtgctggggatgagtattgaaggggctgggcagcctcacctcagctggagagaacttgtctgcctgggtcaggagaagctgcttgaacctggggggtgaggagggtctgagcaggagactgcgggggagtgactgcacagggaaggtgggtacggaggctcccatggcgcagggaagggttggctgcaccccaaagagcagtgtaaggccccgaagcacaggcagcccccctcactaggggcctcaccccgctctctgcttccaccacggtgctcctcatctggctgggcccatacttactcatccttgttcaccacccctttgccgctggggtcaaacatgcggaaggcactcaggatggcttcctcggggtctgtccctggaaggccgaggcagccaggtgagcatccatgtctccagcatcccaggtcccccgcaggaggaactgggctgcatgaggagcctcccacatcccagaagaggtgggggtattccctaacataaaatgtttctcggggatcagtggggctgggaatggtcatcctcctgaggcgggcagcttggctgggagactggaatttgggggtgggggctgaaggcacatttcctggctccaagtcagcactggggtgaccagtgcacatgggattctggggcagaggatgtgcttggaatgggtcatggccaggaagagtccaggtgggtccaggtggggttcagttagggttcaggtggggttcatgtaaggttcaggtggggttcaggcagggttcaggtggggttcaggcagggtgcaggctccctgcctggccaagggtgcccagctctgtcccaggctcaccattgagcttctccccaaagagcgtgaggaagacggtgaagttgatggggcccttgccctcttgcagcatggcgtccagctcctcctctgggacactcaccttccctggtgggggtggggcatgaggtgcacacagggaccctgggtgtcccccagaaggcccaggccgccctccctccatcctggccacaggggctggaggggcagaggcagctgtgggtcgggaaggtgaagtggaagcaaggcgtgacaaggggggaagggcagtgtgaggagacggggaggaggggaagcaggggagcagagtcctgtccccccagccactcccacccgcccagcagctcagagtagggaccccagtgcgcagggtgggaggtgggtgcacgcacccagctgggagtaggtctccctcaggtctgccttgcagatgatgccatcacgattctggtcgatacagctgaaggcctgtgggatgggggccttcaggtgggagcagcccccagctctagggaaggtgggaggtgggggagagacctgggtggtgtgagaggcaaggtcagggtagaaggggggtatgtatgtggggtggggtgggggggccaggatgggatctgaggctactgggagtgggcactcacttctttgaactcctgtatctgggcttgttcaaacatggaaaagacgttggaagaaccacgttgggcctgcttggtggctgccaccttgccccgggtccccgccttcctgctggcctgcaacactgtgagtagggaggggtcctctccccaactcctcagagtctccccaccccacccatcatgcacagtcccagagcattcccaggagagccagggccaggatcctcttcctctccctggggaccaccctcaacccaacacaagcacagaaaactctgctcccccagcccaaaggccagcacctgggagaccgctagcctttcttccccagcaggcactcaccattctctctgcagaggtgtggctgctgtcgtggtggcagggcccagcctcctttatgtctcagccttatcacctgaaggtccaaataaggagaggaacagaggataggcccaaacttggcagcccccgcctgggctgggggaggcctaacagattccagccacattcctgatgaccttcatgtcctcaacgtgtaacatcctgctgtctatccatcctggcagggccagacacaatgtctgcctggagcagagcaggctcaaagctctcaccaccctaggtcctgatgaagggatccagttactcctgtatctgaccacccctccttgccagtccagccagaaccctggccagtgcaagaagacagctggtgagggccagtccagggcccccgccaggcatgggagggcagtgtgtagttctgaggatggtctgtggcctgagacccccggggcttcccagaggttttggtgaccctaggctctgaccttttgcccctctgaccaaggggcagaaggcatccctgagctagctgtgaccccaagaagaacactttgcttggctttggggcaattccagagggttaaggagctccatcagctgccctcccatgcagtctaccttgctcccagtctgccctgctgtttggagccttgccttcctcaagcctcatctcaaccacactacttcagaatgctctccctaacatcctcagcagggagcttctggggcacatttcccatttgcctggtggctgatgtgtttgtcattcctggcttctgtgcccctcctgagcaccccacctggttgacatctgtatccccagaaggcctggtgcacagtgggccgatgggcaggcctgcgtgatgctgttccagagaagcagtctcgccagcttctggggccgagggcacagcagaggggctggggaaacaggggacatcctggaggcagcaggagtgggccaccccaggctgggctcactggctgctgcccctccactggagccagacctatgtctgtcagtagctggctggtagagtgcaggagctcttatctgtcagacccaataccctttttatataacaagagttttcttttaaatttcttaaattcccttttttttttttgagacagagtctcactctcgcacaggctggagtgcagtggcgcgatctcagctcactgccacctctgcctcccgggttcaagccattcttgttcctcagcctcccaagcagctgggattataggcatgtgccaccacacccagctaatttttatatatattttttattttattttatttttagtaaagacggggttttatcatgttggccagccggtctcgaactcctgatcttaggtgatctgcctgcttcagcctcccaaagtgctaggattacaggtgtaagccactgagctctgtcacccaggctggagtgcagtggcatgagtagagctcactgcagacaacctcctgggctcaagtgctccttcctgcctcagcctctggagtagttgggactacaggtgcacaccaccctgcccagtgttttttttttctttttttaattaattaattcatttttgagacagagtttcgctctgttgcccaggctggagtgcagtggtgcaatctctgctcactgcaacctccgcctcctgggttcaagcaattcttctgcctcagcctcctgagtagctgggattataagcacccgccatcatgcccggctaatttttgtatttttagtagagttggggtttcaccatgttggccaggctgatctcgaactcctgaccttttgatccacctgctttggcttcccaaagtgctgggattacaggcatgagccaccgcgcccagcagtgcccccccgccccacccttttttttttaagagatggggtcttgctatgttgccccaggctggtctcaaattcctggcctcaagcaatcctccacctcagcctctcaaagcactgagattataggcatgagccatcacactgg

SEQ ID NO: 586716 - DNA, 4001 bp, Homo sapiens
ggcttacaggcacccacaggcctttcgccagagcccatatcagggcctggccccagtaggccagcgctcccaccctgacgggctgagagtggagaaggaagaagggggcaggtgttgaccttgcgtctccctggtgccatcctgggtgagctgagccactcagagactgtctccattgcggcatagagtttggggtccacagtggtctccccagggatcccaaggtcactggaaacatgaccactcattttgcaaaggaaacagacttgcccaagactgcactgggtgccgtgagtcagggctggctcctggggtgaaccccgcagggcagatggggagatggggttgagaagtgactgggctgggaggggaaggaggggcctcctcggctgtttcctgtctcaaggcctgggcgggaacccagagacaaaaggggaccccacccagccccacccagatgacagggagggagttgatgtcgttgtctttacacccccgaccccccagcctgtggccagtggctgctgcctctcccctggcacagcctcagacttcttgaccctttccttcacaaacctggtccccagtgggggtggatgtctgcccttctcttgacctttctgcccctgggaggaggactggcaggcctgcccctcagacccatctccccttggtgtgtggtacccacccttccctggatggccctgtctcccggcagcctgtcctgggtgggcctgtcctgaggttcctctttctccaccacctctgacatgggttttcctgggcctagctcccatcctcctacaagctggggatgagggcacaagtcacccacgtctccagggctcagtgttctcctcatcaaaatagagaggacaatgtttcataagctcattttataagaatgaggtagaacaatgtgcacaaagtgcttagctcacgtcctggctagccctcctctttgagccaggctcgtggtctcttgccttcggtgcttagtggggatcctggtccccaagctctccccagggagcttccggagtacacagcgagtggccttctgcccctccctgggagtcctggcaggaagcccagctgcctgtatggccaccctactgtgccatgcccctacctcccgggcttctccctgccctccacctgccctccttgatggtaaattgggctccaatatcacttctaccaactgtgtcctgtgatactccatgtaccccaggagaatgtcacctcaacttggtgggaatgtttggaccctagggtggagcctgactgcttcatctcagtgtccccagggctcaggccaggccccatggatgagatgcatcgagggagcatcaacaactggctgggaagtggctggagggaggtgcccctggtccctcctggaaagatagtgcctggtatgtatctgtccaagaagtgtcatgccctggccccgtcgggcaggaaagaaggggcagaagatgcctggactgtgtgggaggcaggggtgggttgaggtggtgggcagctccggtgctgacttgccagccctgacagggacagttgcctccttgtctgttcctgtcccctggggccgtgctttgaggcactcatttcagccccatctggtctgggtgggtgtgtgccactgccccctcccttggacagcagcgtgccttcctctttccctcaggtctctgcgaggacgcaaggtgggagaccctggaggaggggagccactgcctcctgccctgggcctacctgagctgcaggttcctcatgaagtcctccatggtcacttggtccaaaagcacaaagtcaggtttgccatactcagggccttcctcgtcctccatcctgccggctggaaacaccttgcctcaccttcctgtgcctgctggaaggacagtgaaggagagggggagggaaggctaggggaggccccaccgcccccgccctgccccaccagcctcctccagtgctggtgtaaagtaggaagtgggttctagtcctgggaggggctgccctccgcacttgccactccttccccctcgaggtgctctaaaccctgcttcctgtccctgcgccccacaaggaggctgtgcctaacggtctgacccgtttgcacgccaggggcgaggggccggatgctgggtcctccccgctttggagggttcttcgctggcctccttcggaagctcccctccacccacaagcaggagacaagactccgtgggttggcttccaaccctggcagcacgttagagtcacttgtgggactttaaagaaagattttttgacgtgatcttggttacctggctgtgtgtgtctctcaagtcagaactgaacactagatgcaatatactgtatgtacattgtacattaatacaaaaatgaaaaaggatcctaatgcccaggcctttggggtgggggcaacagccttctttgcagtgtgaaggccacactggggtgtagacgagcaaagcttcttgtgtgacctgccaagggccagtggtcctagcactgcaattccccaccccagccacgggggagggacagaggaccccagagcatcctctgcatggggctggccttcagtgggacccctgtgcccctaactgtcctctgccttgtacttgtgtccagccgatcccccataaactgcagtgaggaccaggaacatgcctggagccctgtggcctcatctcagagctgctgtccctgcactttgaagatgaggcagcgcatttggggagcggctgcatttagggagtggccaaaatctccagacactgcattcctgacacttagtgctcctggaagaagtgggaggggtgcagttctcttagcttccaggcagactggaaaaagttctttttcatcccaggacagactggggcaggtcacacccatcctctaggaacactggggcgattctctcatcaaaggtcaaatggatgcagttctctctcatcctacaaatagactggtgacatttctctttcaccccttccctcatacagggaggtcaaagggcagactccagaattcccaaacttcagtcattcatgtgctgcctttgagatttgttgtactcataagcactagtttaactattgtctttcagtcatcccattttttaaactttgaagtaatggataggcaagttaagtttatttttttctctcgaataccttaaagcaaatgcattcctgataaaactgaaagtacttattcaagtacctaataaaactgagtcacgcaccactgcaataaggggccactggcctgaaaaatccccaaatttgtaagtgggcagcctctggctccaccctgggccagacctggggctcctcttgggcaaattcaaagtcagtccttcggaactctgacaagtgtggcctcctccccacccccaggctcttgggctggtgcttttgaagggtttcccaaacctacactcaagtctgggaattctcacccagactcttgccagctcatctgtcttttcaagtttcacttccccaacccccagggagtcaagccaaccagtggaaccaagatggctgtattccagtaaaacgttaaggacaccgaaatctgaacttcgcaaacttttcatctgtcacgtaatcatactattttgggtatttcccccaccactaaccacttaaaaatgtcaagaccactcttagctcagagatttggctggtgggaggagtttgcccgcccttgctttagctgctgctggttgctgggaccctgggcgtccttccttggtagtttgcacaaatttgccatgcattgcctcatttgattctcatgacacatgtaggagttactgttattttcattttacatatattaaaaccgaggctgagatgacatcactacaaaggaagttccctcctgggtcaacagacctctgggcccttatagcactgaattcagtgggtcctactcaaatcccagggaaaagtcggtcagtcagagtcacggcc

SEQ ID NO: 586717 - DNA, 4001 bp, Homo sapiens
agtcctctccttggtggcagccaccccatgggtgaccaccagttccttcccgggtgctgggagttcccaccctgccctgtgggccttctctgggtcccatgatgcactcccccaacccgctgggcaggcttcagtatgaggaggctctggtactcagtaaacgtctgtgagctaacacacctccagctgagaaaggagtccataggaagtagccctcatgggtcagaaaggacttaggggactcaggaagatggaagaaaacccctccgaggttgcggcacaccagaccgctatggttttctgcctcctggactcttactggcctgtattttatcacaggcgagatcacattgcacattcagttttgaatctagctattttcacccaacctaatctcataagcattttcctgtgtgctctaaatgctcataagcttcattttaaatgtctccattatgtccactccctcacttggacctaggccaaaggcacctctgtttgaagcatccaatgaaggcccttcagagcccaggccaggtcttgcccaaggtgggggagcggcggcacacaggggccagctctccaggctgcagatgcctgcctggtggctcctgctctcccgcactcactggtgaccaggacaacatctcttgcacctcagctttctcatctacaaagcagagccaggattagagttgaagctgaaagaagggggaccctgttgccaggctgctccagctcccctcagcagcatcagagccctgagccctgaaccaccagccaaaacttgtcacccaagggctttgctgctggggtgatgggacatccagggggtcctgagacaagggggtcctttgggttcttgcatgcctgacacccaacatcaggagtgggcgtggctggtggggcatcactgggtgccctgaagctgggctcttggttctggcccctggtgtggcccccagggcaggggaacggctgagctgttgggatggagcagaaaccaaaggccaaaggtttttataactcattcaaggtcaccaagcaagccagaacagagccagcacaagaccctggggctgggaagtctgggcctgcactccctgcctcccacctagagcagaggcagcagcctgtgtcaccccaaaccaggccccaggccccagcagtggtcccatctctgggtgacttcttgcccacagcaaggtgcccttggccctacccacacatggctgacctccacgccaggactgtccaggctcggctctttctaggccccgtagaccccatcagcctccaccagcatttgttgacccagcctaaggacaggtggtctgcacacccagggccattgctaatcaggccacctcccccaaggccttccaccttccagacccaacttaggctttattccaccacctggccctccatccgggcttcctaggctctggccagtcctgctcctccctccagagccatgaccagtcgccggcccaggacagaccgggtgcaactgaggaccctcccggtggtcacctgatcgtactgggggtatcagccggacaccccgcctccagaacccgctgcctctgtccagagcggcccagccccagcaggctggcagctcggtgcaaacaacgggatgcagcgggcgggatgcgagccccacgatccctgggtcggaagccaagggcttaagcccccacgttctttctggctcgcggcgggcacttcgtgcgccccaccttccccgcagttctgagagaggcggtagcagggttcagatggagggaaggacagggcgcggaaaggggaggggactcgaggggggccagggggatgggggagaggggtgaaaggtgagcgatggaaagagaacccgggctggagaggggagaggctgaaggcagggaaagagtggccacggcctcacctgtgcggggcccgggtcggtccgcctcgggcagcagcagctcggcgcgggcagcctccccaggcatggcctggccgtgcgcccgcccgtccctcagtccttccgaccctccgtcagtccgtgccgccgccccgccgagcctgcgcggccaccgcccctcggccgggcggtgggggcagtgggtgacgtcaggccgccccgcccgcctgtcccagcgagtgagcgtgcgcgggctcgccaggcactgcggagggcgtagggggggctccctccccgcccccaccccacccggctgtggcctccctctcgctgtgggcggtttcgtgggggagcgggggtgggcgcctgcgcccggtcccaccctttccacagcatttacgagggagggtttcagggccaattggaagctgggttgcctcagggtggcattcgcccgtggccaggaagaggcggggacgcccctagaaccctggttgtgggaggctggggaggtggttgggattctgggatgctcggagcgctttgggtggagttggcggcgcagcctccttccccgctgaccaagcagagggtgcagggcctggggagggagggggccccgcccagcccgatgcctccatgcaaaaggtgagctggagctgcagctctggagtgattggctggtcctggcagtcgtcggtctccgtggcaaccgcctcctgtctccatggcaaccagggatggagccgacgagagcgcaccagggaaggcgacccggatgggtcggtctccaggtctctaggcaactcggtgatctgtcctatcatctcccctccacccccacactaggcagtagaaggaaaaggaagaaagtgtttccctctattcctggcagcaccctctgccacacctcccaggaggaagcccgccccgtgaatttcctgaaatgcctcttgctttcacacaggctactgcgccacccagattcactgagcacccctcctcccccgtgccaggcaccagggagacagatgaatgagacattgtcatcacccctgactggggtggggggaatcagagtagccattgtcacaggcagggagggaggtttcaacatcctcagtcttctgtgggttctaactttgagctcatgaagccaggggctgccctctgactcccccagacctgcctcaaggctcagtgctacacacctggctgcctgctgggcatctctccccgctgtaccccaggagtcagacacaccacaccattagaattaacatcaacttcaaacaatctcttccagaaaacaaaagagaaggggacacttcctaactcattttataaggcaagaaatatcctgatgtcaaaactaacaatgtgtcgccaggcgcggaggctcacgcctgtaatcccagcactttgggaggccgaggctggcggatcacgaggtcaggagatcgaggccattctggctaacgtggtgaaaccccgtctctactaaaaatacagaaaatgagccgggagtggtagcgggctcctgtagtcccagctactcaggaggctgaggcaggagaatggcgttaacccgggaagcggaggttgcagtgagccgagatcgcaccactgcactccagcctgggcgacagagcgagactccgtctcaaaaaaaaaaaaaaaaaaaaaaaaactaacaaagtgtcaatacaccccaagacccccaaaacgaaaactgcagaccagcatctctcatgaattcaggcacaaaaattctcaatattggcaaatcaaatataatgatgtataaaaaaaatacaccatgaccaagtggaatttattccacgtatgcaaggctggtttgacagttgaaaatcaatcaacaatactccagaacaccaacaggctaaagaagaaaaattttggtatcagttgacacagaaaatgtgtttgacataaccaacatcattcatgatttaaaaaaaaacactttcagcaagttaaaaataaacttgataaagatcttatataaaaaacttatacagctaacatcatacttaatggtgaaagactgaatgctttttaagattgg

SEQ ID NO: 586718 - DNA, 4001 bp, Homo sapiens
aaagttgacagaagtaaaatttattaaataggtgcaaattctaatagtgcaattaagtatggctcactagattagaaacctttaagataattcactattctaactaaaagcaccccagaaaactgatgttaaagtaattttacattccttatgtataatggttagaggaactgcaaactaaaggaagttgcattcttctgtttttaaaatttagactattcaacctccctttacatttggctaacatgtaaaaaaaaaatctgacagttattttagatttagttaagaaaaaaattctacaaaactatcaatgaggctattctaaaatcactatttaaaattttgaaaacactatgattgaaccaagagaacacaagaggaggttttaggaccaagtaaaggaccatacttgaggtattatcacgtatacttgacaatattcaagaatcatacttgatagtgttcggattttgcaatactttaaacttgcatctaaaagacaacttgttgatggatcttggctcgatttcaagaacctatctaaatatcataaacagcattttaagctgattggaaaaaaacagacaaaacttaagtaaaatggaattctctaaaatactttctcggaatatcggaggagggctaaaaacaaaggaaaaaaaaagaatcaaaacaaaaacatgagagtactatgttttaccactgtattccaaaccactatgctgctcaagtaaaatttactttacctcttcccttcactactgcgtgcttcatatcaactgaatgtggcagctacccacacaagtgttcaatgggcatgtgaacgcaacgctgtgccatttccctctccacatgttctctagggttaaaactacagttcctttaaatcctcgtgtttcattttccttttcacagaaatcctgtaatgaccctaaagcagataagagcagagcggcctctacacccagggataaggagcacgagcaatcactaggtgccaaggagtttgaaacggagcccggcggagtgggacaggggaatccactacggctaccggggccaggcgagtgtcctccgcgccggagccgcagaggaccgcggctgctccggcgcccgcgccaggacttctcccacctcgcgccccgggagacttacctgcccagccaggggcgagcgcgccgggctggcccgggggaaagccccgctcactctccactgcgggtccccggggccgttacctaactggtcccagctccaggccaagaggccgcgcttcagggaagggcatgcgctcgccggcgacgcccaagccccgagccccgagccccgagcaccggcgcccgggagtccgctggggcccgcctcagccccccgccgcgccgccgccgccgcgcgcccccaggccccgcctccaccgcccagccctccatcctcctcaagccacctcctgcccactgcggcgcctcctcacctgccccagccgccgccgcccgcgcctcccccgggcctccccgcgccgcgaccctagccccagccccagccccaaccccagccccagccgcccccgcccccctgccgcgcgctcgtccccagcgcgccccgctcctcctcatctgcccgggccccgagctttaccttgtaggagtcggtggccaggaggatgttgaactcggcttctgccgcaggattcatctcgggccggaggacaggggccgcgcgccgcgagctccctggcgcggctgcgaggaaggagaaaaatgagcttcaccgcgctccgttgcttaagtcactgctcggtcggcggaggagggggagagggggaaacggagagaggggaggggtcagaggagggcgggcccgggagccgtgacgcggcgcgggtgacggctgcggcggctcgcgtgctcgcagtctgggagctctggcggactccccacctcggttcccccgccttcaccccgtcaccctccgggggccgagaaagggcggggcgcggcagcgcgctgcgcagtgcgcggaggcggggcggggaggaggacgtgatgcacgcgctcttcctcccagacgccagctctgggaagctggaggcagcggggcagccccggcgcgtgacccgggcgcttacctaagttcgagttcccggcacgggcgcgggagggcggggcctggagggggcgttcccagctttgccagtgccacgaggagccggttcgcccgccccgcctgggaccttccgtcctacccagtcctggccggttttctgggtcctcctgaagtcacgccacccggctagggggcgaggagcctcctactgcccatcttcccgtccaccacgcgcagttactcacctttgtctccggcctggattaaggatccagcctttcgcctccatccctcttgtccctcctgatcctcctgaccctgtctttaagatcccaggagctgcggtgaggagtgaggctgaggggcccctttcatctgatgcagcgactccgctttcctccggcggctctgtctatggctgagctctttgatcctttgagagatggtttgacttttcccgagcaaagagcctgcgttgaaaagcgggggtggaattcagtcctcacagataatgaggggacaagacctaattgaaccgagtattgccgggaaggaaaaggcaacgggccaagcctttgacagggtgcgacactgacttttatcatcgttatagtctttaaatcctgggaaacgagttggcaaccccaaaataaagaagtgtaatgacgtctgatgacttcacccaaatacagaccattccaagaaagacttgcgcagttctcatgcgtggttgcgtttttgcataaaactaagattccctttgtccgcatgtttaatagcttaaaaataaattgaggtttttatcggataaaagtagccaggaaaaagtgatacagtgaaaacgattacaggatatttatagacttgtctttcaagttattagaagtctcattctatctgggggcagtgatggtggtggtggtagtggaacttgtgaattgagattcatagtggaacttgtgaattgagattcatctcgaaactggaggcatggctgagacttctaataaagacaacctcagtcaacactatgtcttgaagtcagtatatatttttgacaatcacctcatctacacgtagatacaatacagggcaaagatcatggaagtggaaggtatcaccaggcactcaccaatgtagtaaatactagtacacttacaattattttcagcaacgaggtttgaaacaagagggcttatgtatttattggttgatcttccctgtgttttaccggggaaaattatttgtaaacgcatttaaacaaattattatttctattttgagacggagtctcgctctgtcgcccaggctggagtgcagtggctggatctcggctcactgcaagctccgcctccctggttcacgccatcctcctgcctcagtctcccaagcagctgggactacaggcgcccgccaccacgcccggctaattttttgtatttttagtagagatggggtttcaccgtcttagccaggatggtctcgatctcctgacctcgtgatcctcccgcctcggcctcccaaagtgctgggattacagacgtgagccaccgcgcccggcctaaacaaattattttttaatatttgattttgggagtttttttatattatttcaaggagtgcaattcaaagaaggaaaaagataatttttgtccttaatttggtgttttttccttcatttaaaatttatataacctactttacttatagtacaaattcttatttgtttagcttcctggaattcatgtatctataaatgaccgttgttctatgctgctttatgcagaaaagaaagtaggattctgattataatgtgggctttgtttatggtagtatttttttaagatgcaaaatttgatcttgcaatctttgagttgaatttgcagttttaaaataaa

SEQ ID NO: 586719 - DNA, 4001 bp, Homo sapiens
ataaattcaaaagacaaatcaagcaaagcactataaattgtagacagaattattcagtagtataggcgttagaatgaaatattacttgaatcttatgctggaaatcacatgggtgatattttaatgccagttttatgcatgccctcactggcctccagaataaaagtgctctttaacgattaattatacatacagttcatttccctaataatacttcaatgaaaacactttttatgtgtatgcatttcaacctaaaaagcccagatcaacagtcctccagctatagctatattcttatttacaaagtgtagaaagcaatggaaaaactcactatatccacagctatccatcaccacaaagaaaaagcagaatgaaacaacaaaattaaaggcaaatactgcttttccaaacacagactaaatgttcataaaaatcctctcagtttaccaaactcacaaatactcaaagtaacataatacccctttcgaacaaacacaagaatgactgtatcaactaaagtataaccaaaaccctgtgatggaatgcttatgctaaaatgttcttcatatagttataactggactaattttaaaattagaattttgtaacatagaatttctacaatataatttggaattctgagtgaaaataagggtatgagaaatacactaagtatttttatctcttggagacttaccataattcttgtagcaggaaagcctgcagaatgttaacaaaacaaaatctctgaaaatcctgactatattttcagttgacttgaaacaaatttaacccctcaatctctccttaaattattattttaaataagtacttttaccctaaatttcttctttaacagacccagtattttcttgcaacaaaaatcacactattgtgggatataggtaatcttctttttaaagattacataacttctttctaaacgatgtccatgtctgcggctaattcataaccaatgtaactgaaaatagaaatggaaatgttagagatttccattttttaacaaacatgggaattatttctcaatttgaagaactgcatctcaggaatgacttcctggacaaattaatcagaattatcaagtagcaaacatttcatgctaagccaaagccaaccaggtgagtcagtcatattataacatgtatatataacaacgtacagtaaaggcaaagacaagaactaaatgactttttaaaaggctgttaaactttactcactcccttaatattttccaggtttaactgacgtataatgaatgcatgtgatcccggaacccatggaagagtatctaccatatcgagctctagcttgaaaaaaaaaaaaaaggaaaaaacaaacaaacaaaacaacaacaacaaaaacctatctgaatacgtgttctgaaaagcccacaataatacccaatttataagaagcaaacaaccacagaacagaaaactcaagaaagcacagccttccaccacccctccccagctagccccatttttttttttgctcttcatttccattccatagttaaataagtacacttattccaaaataaaaggggagaaacctgttggaatggatttttagaagataaacactatagatgaagcaacaataagttgctcggaggaagttgtcgacccattcatttacatacaaccaaaagaagataaacccacatgtattcctatcagtgaagatgcaacctggtaatttgcagggaagataggatctcaaatcccagacagctactctcccaaagagaaaaaaaataatgctgtggctcttcaccgaggcagcttcagagatgcaggctccgcaactcgcgaggtgcgaaaattcaaatgaagccctgtcgctcacaagtgcggcatctccgagatgagggagggctcggggacgggaaacccactctcagcccgctccacttcgccgaagaattccaaaccaccccaggctcagcagtgtggattgctccgcccagagaccgtggaggaggcagcagagaggtcacagagcacagcaggcgggagaaaaccgcctcccgcgaggtccaacagaaaccacggagctccggacactcgggatcccgggccgcgggcgcgcggccagagcggcggggtgcgagcgcgggggtgcggactcacctcgcgcttggggtggccgggagcgcgcgccgcctcagttccgcggcttccggccacagagtccccgcgcaaagcgccgccgcgtagcgggaggggcgaccgcggcaggcgctcgggttcttcctaacccgagcccgccgcgctggctccgccgaggacgccagcagctgcaggcagcgcttcagctctcgccgcctcgccatcgttggggcgagtcgtcgccgggtcactcccttattatgaccttcgaatctgacagcagggccagcggtggcctccttcaggctgcctctccagcccttaccaagatggccgcccctgtgggccggggcgccgaagccatcttggtaaaggaagcgcctgggagcacgcggcctgccccggcccgcctcgcgactcaaacactctgcagggaccctcctaagatcaaattggttccccccgctgtcctaagccagaggcttactttcagatcgcatgaacgcattcctggacaccagccacagttgctaaaactaaatgggatcctgcagacccattgacggactgtcatagccaactcaatcacagtcgagaagcatttgaatacttacagcctatggcgctaggatcctggtagcgaagaaactaaactctaatttgaaatgttgtacagtacgtattgaatattaatgggagcacggcattgttcactgtgtgatcgtttacttttaaaatgatgtcacagccccctggtacacacggttctcatctaaatttgcatcttttttaacgctaggataactatgaaagagcatacgattgtgattctgagtttcttactggatttgctttttaaactgcagaatgaaattagttgtttcaagaagtaaagtacaggcatgtcgaagtaaaattcaacaatgggttgttgggcaaaaagattataaaagtcctggggtgtgccagggtcaaaaaaaaaaaaaaaagcttgtccctggggttatcttggcaaaaaagaaaccaccaccacaggttctaaatgcagataagactggcagaaaaatgcagaccaaactattctgcattttgaaagtgaatgtgcctgtgtgacattggaggaatgtaaagaactgtatgtcaagtgtggactttatctcctcaggctagcttagagtggctgctgaacttaagggtgattaagagctgcttgcacctgggtggagctgaaactgcataaggtgaataatacctttgtgcaacagaagaaaaaaaaaaaagtaacagcatacatacaaacccaaagggtaagttgaagttactactcaaaagttcttcatagtgttcttgactaagcaacggagaagtaatcccggcactttgggagggcaaggcaggagaatccttagagcccaggagttggagaccaacttgggcaacatagcgagacttcatctctacaaataataattaaaaaaaaaaaaaagtagccagccttgatggcccgcccttgtggtcccagctactccagaggctgaggtgggaggatcgattgagcctgggagatcaaggccgcagtgagctgtgatcacgccactacactccagcctgggcaacagagaagaccccatttccccaaaaaaaaaaaaaaagctgggcgcagtggctcacgcctgtaattccagcactttgggaggccaaggcaggaggatcacctgaggtcaggagttcgagaccagcctggccaacatggcgaaaccctgtctcaagtaaaaatacaaaaactagctaggcatagtggagctcacctgtaatcccagctactagggaggctgaggcagtagaactgcttgaaccccagagatg

SEQ ID NO: 586720 - DNA, 4001 bp, Homo sapiens
tacccctgttccattttgggggacatgaacaaaggttcccaggtccttaaaccttggaggaggcgagtaataaaacaggtcagcgactccaggccaagccaaagctgtgggctagcctgtaacccttgcttcacatggtgaccacttcctaccctccagtccagcaccctccagcctggctccgtggaactcttaactctcatcagatgtctaggcagaggcggaggcagctggtgagtccagggcactgtcagaaatgtagtccaggtatctcctggaccaagcgccctcctaaaagagggacagcatttcttggccgggcgtggtggctcatgcctataatcccaccactttgggaagccaagggaggcggatcatctgaggtcaggagttggagaccagcctgaccaacatggagaaaccctctctctactaaaaaaaaaaaaaaaaaaaaaaaatacaaaagtagccgggcgtgctggcgcattcctgtaatcccagctactcaggaggctgaggcaggagaatcgcttcaacccgggaggccgagattgtggtgagccgagatcacgctattgcactccagcctgggcaacaagagtgaaacgctgtcaaaaaaaaaaaaaaaaaaaaagaggaataacatttctctcttcatgtctatccccacatccttggggacattctttaaatctcataaatatgaatgatctctttggggagggggtgatcagagtcatagctgggcatgatcggagtcagagctgggaatgccggcagcccacccacccgcaccccactcccaccacaccccacacacctgaaatatcgatgcccttgaggccgatggcttcttgacactgggggagggaggagagggagggaagggagagcccagtcgccggagaggcggagacaaagaaggcagctgcacaaagcgcccaaagatgagagcgaaaaggacgggaatggaggcagagagcagacaaaagcggacaggagatgcggccgcaggggacaggcagggaagccggaggaggcttcgacaccgaatcacagacatgacacctcgtgactctgggcccagcagatgaaaaaaaaaaaatcctagcacgcaccccctcccctgggacactgtaaatagaaagcagcgtgacacacccccttcgccccggggtatggggggcggggatccgtggaggggaaggggtcaaggggaaaagaaagtcagaaaaaaggccgtaagagaacaaccttggaaacagagacggggagaggcgatgaagtgggggcgggagagaaggcctagggggtgggcagaggcaggggccgaggaagatggcccagccaaagggggtggggggagggccccagagggccacagtagtggagaagggggggctgtcctgcagggtcttcccgagtgagggtcttccctctgcctctaccccggattgggggcttgggcttgggggagagggagattgcaaagggagcgatctgcttggcgggggttcccctgggcgccggaccctggggacaggtgggagcgacatggcaacagaggggggcgggggagcgcttctggacacctgaagcgcagcctctgactcagttttctgggtcttcggactgggaggggctgggcagaagggggcgcagccgcttggtccccctgaggggcggtggccttctgctgccccattctgcggtggaggagcacgctagccccctccccagtccccaggcccggccgcccccctacctcgccggagccggagctggagccagggccgagatgccgcaaagccaagcggggcgggcggcgggcgcagacacccccggtgccaagagagaggtccctttggagcccccaagagtcaaaggaggatgacgcgcggggactcggccgcgctgtcggagcccgactctaacgtcggtcagcgctggggcagcgccgcagctccgttggcgacgcgggccggggcgcccatcggttcaggggttcgggtggcacgcgtggctcccccggcgacgctccggcggcagcttcgaggggcggagaccccggcgacgcggaagaaacccgggacggatccggagcggactcgtgccctgctggcggggccgggggtcggggtgcgccctgggcagctgggtggcctcaagccctactggcgagactccgccctgtgtcccggctggggagtgggactgaggatggtggtgtctcgggttttggtggtggtgatgctggtgttgctggcttagttatctccccaccccacgcccagcacctccgttctctgtccgggggtcccccactgccctgaagtacccctcctccaggagccacccctcaatggaatctcctctctccattataagagcggctgggaaggggactccgagccttcgtccccggaaactgatagagggaatcagaaaccctagaacaccgggaaggcgaagagacatcaagagacagaagttgaaaggctgaaaagggcagagggaggccaagatctctccatcttctcaccactgcgtgggtgcctgagcaccctggttccccgggtgcacaaggcccctaaatccacaatgtaccccacgggacagcaggcagaaagacctccaggtacacagcgcacacccaggcacattcacacagacctctgcactcaggaggcgctgcaccccacgctgatcctggtggctggggaggaagagggaagtgtggagctgggacccgggtgggtgcagcgctgcccctgctctaataaggcggtggcccaggctcttaactcctacaaggttctccatcccacctataaagtgagctcaagactgggtgcggtggctcaagcctgtgatcccagcactttgggaggccgaggcgggggaatcacttgaggtcaggagttcgagaccagcctggccaacatggtgaaaccccgtctctactaaaaatacaacaattagcctggcctggccgggcacggtggctcatgcctgtaatcccagcactctgggaggccgaggtgggaggatcacctgaggtcaggagttcaagaccagcatggccaacatggcgaaaccccgtttctactaaaaatacaaaaatcagccgggcacagtggcctgcacctgtaatctcagctacttgggaggctgaggcaggagaatcgcttgaacccgggaggcagagattgcaatgcgccgagatcgtgccactgcactccagcctgcgcggcagagcgagaatccaactcaaaataaaataaaataataaataaagtgagatcagaacaccttcagttctaccctgtaaggagccaggaaagtgatggacaaagccctttagcaactgtaaactgctttggagatgcagggaataattttttttttttttttttgagaggagtctcactctcgcctaggctggagtgcagtggcgcgatctcggctcactgcaagctctgcctcccgggttcatgccattctcctgcctcagcctccccagtaactgggactacagacgcccgccaccacccccggctaattttttgtatttttagtagagacggggtttcaccgtgttagccaggatggtctcgatctcctgacctcgtgatccgcccgcctcggcctcccaaagtgctgggattacaggcgtgggccaccgtgcccggccgatgcagggaataatgttaaggcctttcaaggtctgctggagtcctctctccaggggccgcccagctctcatgctccccctaccctctcccccaccccaaaattcattgttcacccatcttattccattttttctttctttactttccgaggtgataacttcataatcaggcaaactgatcccattggatgtgccaatgcaataagaaggaaggtcatgttcctggaatcccacatacaggaattccaaccgagggttaaagggctaaacaggaataacaccaagggttaaagggatgagaatcccg

SEQ ID NO: 586721 - DNA, 4001 bp, Homo sapiens
ttaacagtgaagtctggtcatctcattcctcaactcaaatggctgaactatgaactacggtcatggaccacataacatttcagtcaacaacagaccacatgtatgaccgtggtcccataagattataatgccatatttttactgtgctttttctatgcttagatatgtttagcgatgcaaatacttgccattgtattacagttgcctacagtattcagtacagtaacattctaggagcagtaggctacaccatacagcctatgtgtgtaggctacacctctaggtgtaggcaagtccactctgtgatgttcatgcaatgatgaaattgcctaacgacaacgtgtctccctctttaaatcaagcatgactggcacatttttcactgacaaagaaaatggggagggaagggagagtggccagtaacaagcataatgaatagtggctaggacaaattcatgattttagaaaaataatccaataaggtgcagcaaacacatggaatcatacatcttcgcccggcaagtctgtgaacactctccactttttcatagttctggtcacttttcttgtttgctctatttccaagtgtacctctttggcatgttagtccaacttacagtaatacacttcctctagactaccaaacttattcctatatttcccattttccctcttatattagtgactgtaattttttaatggttaatttttcaatctatctcccaaagtggcaatattccatgtttcttgtaccatatgtgcataagacctcagccctgcagccagaatgctactttcaaggtaaggagtcatctcaccatccagttatcagtccgaagagcaggttactcttcgcacaggaggtctggtactaaatcaagatgagcattaaaaagaagaaatccctgttaccttctcaccacctgtgacttcccactccgtccccaaactccttcctcatggacacaacaagaggcaccaaaccagcaacaagagttcaggagactgatgtctctgaggacaatgcccacgtccacagctggggagatactctctgagggcagtgcctacacccagggctcagggggactctctctaagggcagtaccgacacccaggactgaggggactctctctgagggcagttcccatgcccaggacagagggggtcgctctctgagggcagtgcccatgcccaggactgaggggacgctctctgagggcagtgcccatgctcaggactgagggggtcgctctctgagggtagtgcccatgcccaggactgaggggacgctctctgagggcagtgcccatgcccaggactgagggggtcgctctctgagggcagtgcccatgctcaggactgagggggtcgctctctgagggtagtgcccatgcccaggactgaggggacgctctctgagggcagtgcccatgctcaggactgagggggtcgctctctgagggtagtgcccatgcccaggactgaggggacactctctgagggcagttcccatgcccaggacagaggaggtcgctctctgagggcagtgcccatgcccaggactgaggggacactctctgaggacggtgcccatgctcagggctggggggtcgctctctgagggcagtgcccgcgcccggggctgggattttcctccgacacggacaagaaggacgggcgtcgctgagctgggtaggggggatggcccggggtcgccagttccgtccagttccgtcagaggcagcactgcccgcacgcaggtcggccgcctccttaggggaggggaggctgggaccccgaccagccgaggaggggcttcccgcccgatccctgctacttcccagcccctgctctgaacccaatcccggctcggcaccgcagctcttacctgggctcggggacccgccgtttcccgcgctcggaccagattcaaacgcacccgccggcgccccagacgggccccgccctcccggtcgtcatcaggcgccgctctcgcgagagctggggcgccgcgagcctcgggcctcgcccacacgcccggcccgccccgcctccagatcatgccccgcccacatgcccgccagtcttcttcctgtctatgccccgcctcttagggcgcggcctcgagcagctaagcccagtgccctaccgggcactacggaacgcgcacgcggggcgccacagctggggaacccatgcccggtccgcgcgccgacgtccactgcgcgctcgtgcgcgtcctggggcctccgcggagggagtgcgcggtccaggagagggcggggcgctgcgagcgggcggtgttgtgggaaggaggaaggagaggaagagagagagggggagagaaaggaaaggcttggggcggggagaggccacagggccgtgtctggatccccgggaggaccccaccccgacctggccggcccccgtgaccgccctccctgccgagggggcacctgtccgggtggtccgcagcctgcacacggtaggtgcaccctgggcaggtgcttcccccgcaggagcccctccggccaggtgcggcccctaacaggtgcttctcctgcagttgctcctccagcaggtgaggcccccggcaggtcagctgcccatagggtggagagggagaggccttagcggggaccctcggaggcacccgtgtgaaggaggagtagcaatgtcattcaattctttggacttaaatgccaaaatcacatactgatgtatcaatctcttttaatttgtgtcagcgaataacttgattgggcgttcccaatttttgttgaaagcaaattcttagaaaacggtgctctttaccaccgagctctgcatcccttcgtgaggacttggccttccctggagctatattctttcatgcttgagatgtctagagtggtatctgttttcctggcttaactcaagccagaggtcttggcgagattgaagtcgttgcactgtgggagcacagcaccaaccaataggaacatcatgggagccacaagtgcacttgtaaatttctagtgaccacattagaaaaatgaagataaataggtgacattaatttttaaatatgttttatttagcctagtatatcaaaaatatttatgttacttgttggaatatcgtttcaacaagcaatataaaattatagcagggagaagactggtttactaggaagcttgcaacagtgaagcaaggcaggctgcagaggggagggagaagacccactcagaggatgctgagtctgggacccttgtcaacaggtggccgatatctaacattgcctatttcatcctggggctccagccacctctgacctcctcctccctccatacacagatccttccctgccatttcttgaattttggtgccctcatcttctcactgctttcttcttagcaatttccttcatatccaaggtgcaaactgccaccttcaagcagtgacctctgcatctggatttgcaagacacggttatttctgaactccagaattttcaacagctcactgcctactcccacgctggtgctgacatgcatccaaaacagatatcgacttcccctcccacccctgaatcctgcccctttccttatgctggtccctcctccaatcagccatctgttcctggggtttccacttcctgagtaggaataatgtaacaagttacgcatgtgagctctgaagctgtaccacctgggctaacctggttctgtgctcactagctggtgacctttgacaagccatggacgactgagcctcagtttcctcatctatcaaatgggacctacttaagtactgagcctcctctagggggttgttatgaggcctaaatgtctgtataatgcagagctcagcctcctctagggggttgttatgaggcctaaatgtctatgtagtgcagtgctcagaggcacgtggaagcagggcagcaggagcgcccagtgcacccccaatgcacctgcccatgcagccactaatgtcataggatcctttgggtatc

SEQ ID NO: 586722 - DNA, 4001 bp, Homo sapiens
aaaaaaaaaaaaaagactgatccagaatcaatatggcaaaaccctgtctctaccaaaaaatgcgagctgggcatggtggcgcgcacctgtattcccagctactcaggaggctgaggcaggagaatctcttgaacccaggaggcagaggttgcaatgagccgagattgcaccactgcactccagtctggcgacagagtgagattccgtgtccaaaaaaagaaaaagaaaaagaaaaaagactgatccagattaaagaaggttaaaggctatgacattgatccttgactggatcctagacctgaaaaaagttttcactgcagaggacaagcaggataatcggggaaacctcagtaaagtctgtgggtggataatggtgttttgtccatgttaatttcctgattttgacacgtgtgttgtgattatgtaagagaatgccttgattttaagaaatgcccaacaactagtatttagaggtaaagaaacacgtcttcaactcactctcaaataattcagaaaatatccccagaaagagaggtgtggatgaaggtgagtgaaagactattggagtgactggtaccgttttgacacccagtagcctttctgtaaatttgaaatttcaaaactgaaagttacaaagaaaaggagaaaagtgactaggcacggtagctcacgcttgtaatcctagcactgtgggaggctgagaccagagggttgcttaagccgaggagttcaagattagcctggacaacatagtgaaacctcatctccacaaaaattttaaaaactagccaggcatggtggtgtgcgcctgtagccccagctactcaaggggctgaggcaggaggatcacttgggcctgggaggtcgaggctgcagtgaactatgatcgcaccactgcactccagacctcatttcaaaaaaacaggccaggcacggtggctcatgcctgtaatcccagcactttgggaggcccaggtgggtggatcacttgaggtcaggagtttgagaccagtctggccaacatggtgaaaccctgtctctactaaaaatacaaaaattagccaggcgtggtggtgggcacctgtaatcccaactactctggaggctgaggcaggagaaccagttgaacctggaaggcggaggttgcagtgagctgagatcgtgccactgcactctggcctgggcaacagatcaagactctgtctcaaaaaacaaaaaaataacaaaaaagagaaaggtcttggcacataggactaaatgttccatacaagcttcaatttcctaaatgtagttcctccctggccttcctatgggattaggggacccagtggacttgtgtgtctgagcaggcatttgtccagcctccttggggacagatgggaggactctattggcccctgtcatggtgtcaccctactggagaggataagactctaactgacactacaggcagctggggagagagagagctttagtttccaggcctccctcttgggagggccactctctgatagctgggctagtcagggaaggcttcctggaggagtgggcctcggacctgagagagcgctgggctgcctggccatggcaggggagcagaaagaggactcctggctaaggctgagggcctggctggggacacaggcggggacagtaaagggctggggcccagggcgggtccaagggaactgtcttcccagggatcagaggggtagatccaggctcaaagaccagggaccaggtgcccaagaccctgccccgttagtcctcactggagctggttggccctgggactgcaagggtggccgtgctgtccctcccgtattccccccacgggatgccctccaccagctactcacatagtgctggctgggtacgaagcgcttctcaaagcccagcagggcgatgtgacggatgaaggtgtcccccatgactgggtggcctccagtgctccctggcacttccaggctgcgccttaaatgcactggaaagaggaagtcgcttttgtcgcggtcgggacagggggcagggagggtacagaaagggctttgcttcttctttcagtttctggggactcttcaggcttgcagggtgtaaacatgggcagactcatgttcacacacacctgcagggacaaggaaaagggtttacacttgtccttcccgtcgcctgcacgggccccacgggttttgggggtgaatcaagctgctcctgcctcagggcctttgcatttgctgcgtccccttgaccatctttccccccttgaccatattcctggtcttgaccatgttccccccattcaccatcttccctccataactctcctccatttctctgctcaaatgtcacctcttccgagaagccttccttgataacttcacattgcatagcaaacctcatacctttctcagcctcttcctgcctcctttttctgcagagcacttatcactgatgcatcgcaaattgcatttaatttttctttattattattgctattgttatttgagacagggtcttgctttgttatccaggcttaagtgcagtggtgggatcacagttcactgcagcctccaactcctgggctccagcgatcctcctgcctcagcctctggagtagctgggactacgggtgtgtgccaccatgcccggttaaattttttttaatttttttgtacagacagggtcctgctatgttgcccaggatggtctcaaactactggcctctagtgatcctcctgcctctgcctcccacttttttttttttgagatggagtctcgctcttgtttcccaggctggagtgcaatggcgcgatctcggctcaccgcaacctctgcctcctgggttcaagcaattctcttgcgttagtctcctgagtagctgggattacaggcatgtgccaccacacctggttaattttttttttttttaattagagactgggtttctccatgttggccaggctggtcttgaactcctgacctcaggtaattcactcgcctcggcctcccaaagtgctgggattcaggcatgagccaccgtgcctggcctgacttaatttttttagtctccccttaccacaatgtgtgtcccaggaaagctagggcatgaccgggttatcaggggctctagccccagcccctccatctagtgcctggcacacagaggccataaatatttggatcgtgactgcaacattcactgagtgaatgaatgagtgagtgaatgaatgaatgagtcaatgaatgagtgaatgaatgaatgaatgagtgaatgaacgcgggcatgggagtgtgcatgcaagcgttagatgctcatccttgggtgtgtgtggatgagggccagtgacagctgggacgaaaatggcacagactttgagtgagacttgagttccaatcctcaagtaagcaaatggttcattgaattgttccttagggctgactcagttttctccagagtgatattaagactgtcagctttgccaggaaggggatttgggacaaagaggtgaggagggggcagcatgcccagggacaggctgaggcctctctctcccactccccctagagcctgggaggcccagagcttttggagctcattcaaggtcatgagttcatgagtggcgggcctcagccccaggcagcctgctgcagcctgtgcctcccagcaggccagggctgcaccaactcacccttgcctgagtccagggtcagctcatggtccggacctgatctcctgggggtgagggttgaggtctggcagatgaaagccaagacatgctgggcgttaatttatttgtttgaagcgaagtttcgctcttgttgcccaagctggagtgcagtggcacaatctcggctcactgcaacctctgccttccaggttcaagcgattctcctgcctcagcttcccaagtagctgggattacaggtgtgcgccaccacgcctggctaattttgtatttttagtagagaaggggtatcaccctgttggccaggctggtctt

SEQ ID NO: 586723 - DNA, 4001 bp, Homo sapiens
gcactatttagtgttttgtactaagaatacatttttgaacagatcaatcttattttctattagatgaggtatggtgttatttcattatgaagttgaaacaggtagaggatctataataagcaatctcatgtaatcaattagaaaaaaggtagaacacagaatccctatcacaagatactttttatctggctttcacaaaacctttccatttaattaataaagtgatatacagaaaagtgcatagaataatgatgaatcaatcttttgattgtctattgtttttcaactgcaaatgtgcaagtgaaggcaaaaaacatttacatgtgccgagaaccatgattattttataaaaacaattatttttatgtcaatcctcaaaacattacaagatttggtattagcagttctactttaccaaagagaaaacgagactcagagaaattagataatttcatgaaccaaaaaaagtaaatgaaaacagcagatttgagatctgaacttattgtatgactgtaaatgtaacattctttctactaccctaatgttatcgccctacagagactgtggctcctaaactgccttgatcagctatcaaagttttaaacatttttaagtacttaccaaacatctggattgaacaatgccagacgcaagagatacagtgttgctccagtagctccagttccaataaatacaaagagggggatcaactaaaccaaacacaaaatagaataaccatcttcaaatacttaaaacactggccaacgagagattacagtagtttctgcacattgatttccaagtctcaaactgttattggactgttttgtcttaaaatttaaataaagtagatcttacattgaggtaagatttcttataactgtgttctaaagaaagaaatggaatttggaaaggatgttaagatgactctggtttaagtgtcttactttttaatgtggagcaaattataggtacatttttaaatttccaagaaaatgtatcgagtcttcttcacctctctaatatttacatgtcattcccattaaattttctggcttcctttatcctggggcttgaaaaacaaattctttgcaaattatttaagggtgcctctataaagatgtatgaaaaatagaatctgaataagtaaacgtatctattacaaatactggctttaagcattatctctgaaaacgtaatgctaccaatgcttgctgcgtatttagggaaccggatttaagacagattaaagattgcatagacttttagctctacagcacattgatgtgctgaggaaaaatgagatgccaaagaacttaactgcaatttccacacttcgaaattttcccaaaagcaacgacgtccagacaaagtgaggattccaagatcacggacccctcttatttaccaaaaggcctggtggtgcaatgcggcgaatacaagaacctccagagatggtataacacatagggaacctgacctatgctagtctctgacccacacagcgcacatctatccctcctggaccgcacaacctgcaaaagagagcggccaccagactgttccaatattcactaactagaaaaaactaggttttttttccgagcagtgtccgtctccttcctcctgtcagacaaaaccccacaatgcatggcgtagagggtcacagaggcctgggacaactaagatgacaaacactaggcgaggcagggtctggtctgacggacggtaagtggctgtaaatgaggacgttcccagggaacagaaagaggcgcaccccgacgcaagaaggacaagggaaaacattaggagagcggtcacgaacttacgctcggatgcttcttggcctgaccgatgatctggcggagcatgtttgcggcagaggtctccgactggaaaggagagaaccgacctagccaccaggccctaagctaaaaattatctgcaatgagacactacggacttccaaagtcacccaggacctcctacctgaaggacccttggctgggagggcagcttgcggcaggagggcccggatgcgactgtctttaatagtgcctgcttagatctaacccctcatatgttcgtcctgacctggtcggaccatcatcattccacttcatagtgaaatgccttcattgccgtgccatgcatatttctgaggggaatttttttggtcgaaacgaggactcttcgattgaccagacaggcactttccaagggtgccacgtactgaggaatgcggtcggagcgtgggcgcacgggccgcgcgctccgtgagtagggggcctctcccgcggcgcctgagagccgggtccgcgcgcagaggccctgggggcgcgcgtgccgggtgcgcgctggccagctgtgactgccgctgagggagctgcgcggcgcctctgggagccgagcgccgggcgcctggagggcaggtcgggcctcttgccgctaaggtcagcggctgcggtttgagaagactgcagctgcttcctgtgttacgctgtcgcagacaagcagaagttaaaaactagtaaatgacttaaaggtgataatagtcctggcagtgtatttctgaaccctcagatcctggccctcggttgaaagttcgtcgccacaaagacctttccaacacgccactatcccccgtccctggtcccaaattgcatctttaaaatgtgttttcaatggtcgtgtagctacagataatctttcccactaccccagtcgaattttcatttgtcttttgttttgttttcttcgttgttttttttacccgaaggacttccataggacaggctttgcgggggagggtggggggattgggataaaatgtacactctgaaccctctccaatctcatacgtagcttaaagcattaatcaaatgatcaagcaagtattaataattgggactagaaatcataggagaaggctccaccggaagttacactagctctgaaggaggagcggacattaaccaggtgaaaacggaggatgcaggtgtacagggcggaggtaataacacgtgaaggtctgaagctattgaaaacccgagggagctgtatgaggtctagtgtggctggaaagtaaaagggagagcaaggtggggatcagatctgctgggccaataaccgcttaaacatcatgggttttatgttgagagcttgggaaggttgtgtttttaaatgattgctttgtgaataattgattagaagggataagcgtgagaggggaaagacctatcaaggggccattgcaatagtccataatctgtgtgacagataatggtagcttgaactagtgtagagaatgtaatgatgagaaaaaaagattccagagatgtttagaaggtggcaccaacaggacttggtggttggctctccaggagtgaggagagagaagttaagaataatttcagaggttcagttttgagcagctctgtggttgttgatgccagttattgaaataagccgtagagaatgatgtataagtgcctatgtaaaattcaagtggatctctatggggcagaagagaactacactataagtataaatttaggactcagtttactgataagaaatgaacccatgtgactgaatgagattacttagggagagaaagttgactgagaatttagacagaggacacagagccgaggaattccaacatgcaatgcttagaagaggaggtatggccagtaggtaggaaaaaaaaaatagatggtaactgttaaggtgatatgtcatgaagcttatcaagactggtgtcttttttcattcattcagcaaatctttcttaagtacctactctccactaggcactgttctagccactagagttatagcagtgaacaagaaaattactctgcgttgctaatggagcttacatactaattgaggaagacaaacaataaacaaatgagataatttttagacagtgacaagccaataaaatagaataatgagacagacaatgacatggaagaggtggaggagaggaggtt

SEQ ID NO: 586724 - DNA, 4001 bp, Homo sapiens
ctctagtagcctggctggaaaaaaagaccaaatggaggctgtgacaagcattgagaggcagttaagaagtgaatgcaattatccacatcagtgatgatggtgactgaggaagagggtagtagcagaggaggtagtgagatgttgtcaaaatcaagatatattttgaaggtggaacctagagggtttactgaaataacaaatgtggagtgtaagagaaaggaaggaatcaaagatgatttcaagtttctgacctgagtcaaaataattgagctgccattaattgagatgagcaagactgagagaagagcaggttttaggcagaagatcaggaaccccattttggacatgttaagtttgggttgcctgtctgacacatacaaatagagatgcccactaagcaattaaatattcaggacttttataaaggaagaggtcagtgctttacatggaaatctgttgtcagtgtataggtggtatttaaaaccgttctctatttggatttgctctctcttggtgacagagtacaggtccaaaagaaaaggtccaagaactaaatcctgactaactcaaattttaaaagtgggcataagagaaataaccagaaaaagagaaagccaaagagtagggggaaaaaatcaggagactgggggagtcctgaagcccagtaaagaaagcgcatgatggaaaaagtgtcaaatgtgtcaaaaaaaaaaaaacgctgctattaggtcaatgaaggtgagaaacataagctgaccattggatttggcaacatggagataactggtgaacttgaaaagagcgtgatggaaaaagtgtcaaatgtgtcaaaaaacgctgctattaggtcaatgaaggtgagaaatatgagctgaccattggatttggcagcatggagataattggtgaacttgaaaaacgccaagggtgactgagtgcattcaagggtgaataagaaagaaattggagaaaatagagataactcttttgagttatctgtaaagtgaagcaaagaaatggtgtgattatagaagggacaagaagaataaaaaaattttgtgggtttttttgatgaaaacattcgtgaatacagatggaaaagacctaacagaaggaaaagggggcagtacctttagtaagcctaaatatatgtaatccaacgcacctaagcagaaacggtaaggcaaggagaaaagatggaaaacggagatataaatttgagatggcgctgacagaagcaagcacaagtgaagccatgaaaatgtcaaggaaaaagtcaacaagaaaactggcttaataaagaggtcatggcaaaaataaataaaaatgtgacatcggatcaacgaagtaggtggacagcgcccgtgtctcaagagctcacgcggcttgtaattaagggcttgaaacatctgtatcccgttaaccctgcaataagcaaagtgacaggaatttagtcttccttgggaattcaagaacgaagaaagaacaaaggtacatacctcgtgaggagtattgcacacagccaatcccacaaggccagtggtctgttcaaaaacaaaacacgattcatgctgtttactacggtttccatacatccagcacgctaaggaaatacaaaaccacgaatcccccggctaaaactggtctaaagccagctactggtctctcagtctcgcttgtttggagcttttttcctgactctcggagcggaaccactaacctgccctacccggtaaggcatgcagaacgagtccccgaaaagcaccgccgagcccgcgacagtaggggtcaacacccgcgggaagtagggctatcggactgagtctacccccacagtctaaattccaacagtgacctccattcgtctcaccttcttcagcacacccgccatgacagcgccaacgactcggtgacgcacaaccctttgggaacaattctcagacctgctcaatcgaccaccgaggtcgccactctgtcaccctggaaacagcttagctccaccccttcaggatcgccaaaggagcaaagactctgccccgcccatcttaaaagagaaaaattgacgcatgcgcgatgggcatacaagcctaaagctaagctagaagacgattggggaaagaaagggtttcccagctgtctgttcctgttcctgccactgctgacggcttgcccaaagattgagggaaacactcccaactaccaaaaaactccagtcgctgtaggaacctgcactgtgcttaaccgttgatgcattcctcaaccttcctttctcagtttagtaaaatgaaagtgataacggagcttgagcatcctctgaattgatctctcaacagcaagttagttcttcgcacaaggatatcagtattctctgtgtcttacgaaccaaagccctatggagtgtgaggtcattttccatcgctcttttcgatttcactggctgaaatacatcatcttatttccagatgaaatgatatcagaccataccactttttcctacctccacaaacactgaccactcactatgtgtcagttactgggacataatttctaaaatgggatttcacatcctggaattcaaagaataatgaagaaggcgtgtattaataaataatttggtaactgttctaaaagaagttgatgcaaagtgtgatggtaccagggaaaaggaaataactaaaaagcgtgggtgactttctaaaaagtcagtaggagaaaagaacaaattgagaaaacacaagtacaaaggaaaagaggttaaaaatgtatatataaattccaggtgattttatgtgattggaaaggtgggtttgattgttaaggtaaactggttaagattatgaaaggtgttgtttgccattatacaaaatttgaattttactttttaaggaatgggaacaatgagaagacttttaagcttctaagtgacaccatcaaatttatgtttcagatatacaaacaacttaggcaacagttgaagagaatgagttggaagagatgaggcctttcattagaggcatgagactagaaaaaatgaaagctaaaccaaaagcaaacagaagaaaggaaatattaaagattagaaaagaaggagacagaatatcaataaagaaaatcaatgaaaccaggaattggttccctaaaaggatcaacaaaattggcaaacctttagtgaaactaagaaaaaaaagagagaagatttaatacaagcaagaataaaagaaccatcactaatagccttgctgaaataaacaggaataagaaggaatactatgaacaactatgcttaaaaaagataaagtagataaaatggccagattcctagaaaaacacaaactacctaaatcaactcaagaaggcataaagaaaaatctgactagatctaacataattaaagaaattgaattagcaagaaaaaaaaaaaaacctatccagaaggaaaagcacaggtccagatggcttcgctggtaaattccactgaacaattaaagaataacacttaagaaactattccaaaatatagaagaggaggaaacaattaacaactaattctataaggcaagtattactctgattccaaccagacaaagaaatcaacaagaaacaaaaacttcagccaggtgtggactctgattccaaccagacaaagaaatcaacaagaaaagaaaacttcggctgggcctggtggctcatgcctgtaatcccagcactttgggaagctgaggcaggaggatcacctgaggtcaagggtttgagacagcctggccaacatgacaaaaccttctctctactaaaaatacaaaaattagccaggccttgtggtgtgtgcctgtaatctcagctactctggaggctgagacaggagaatcactcaaactcaggaggcagaggttgcagtgagccaagattgggccattgcactctagcctgggtgacagagcaagattccgtctcacaaaaaaaaaaaaaaaaaaggaaagaaaaaagaaaataaaacttcaggc

SEQ ID NO: 586725 - DNA, 4001 bp, Homo sapiens
taacaaaataaatcagtagaatagtgaaccagagggtcacagtaagaaacttgtctttatttagagtgaaatggaaagccattagttttaaggaaaggagagatctgacctacctcatattttaacagactaactctagtagcctggctggaaaaaaagaccaaatggaggctgtgacaagcattgagaggcagttaagaagtgaatgcaattatccacatcagtgatgatggtgactgaggaagagggtagtagcagaggaggtagtgagatgttgtcaaaatcaagatatattttgaaggtggaacctagagggtttactgaaataacaaatgtggagtgtaagagaaaggaaggaatcaaagatgatttcaagtttctgacctgagtcaaaataattgagctgccattaattgagatgagcaagactgagagaagagcaggttttaggcagaagatcaggaaccccattttggacatgttaagtttgggttgcctgtctgacacatacaaatagagatgcccactaagcaattaaatattcaggacttttataaaggaagaggtcagtgctttacatggaaatctgttgtcagtgtataggtggtatttaaaaccgttctctatttggatttgctctctcttggtgacagagtacaggtccaaaagaaaaggtccaagaactaaatcctgactaactcaaattttaaaagtgggcataagagaaataaccagaaaaagagaaagccaaagagtagggggaaaaaatcaggagactgggggagtcctgaagcccagtaaagaaagcgcatgatggaaaaagtgtcaaatgtgtcaaaaaaaaaaaaacgctgctattaggtcaatgaaggtgagaaacataagctgaccattggatttggcaacatggagataactggtgaacttgaaaagagcgtgatggaaaaagtgtcaaatgtgtcaaaaaacgctgctattaggtcaatgaaggtgagaaatatgagctgaccattggatttggcagcatggagataattggtgaacttgaaaaacgccaagggtgactgagtgcattcaagggtgaataagaaagaaattggagaaaatagagataactcttttgagttatctgtaaagtgaagcaaagaaatggtgtgattatagaagggacaagaagaataaaaaaattttgtgggtttttttgatgaaaacattcgtgaatacagatggaaaagacctaacagaaggaaaagggggcagtacctttagtaagcctaaatatatgtaatccaacgcacctaagcagaaacggtaaggcaaggagaaaagatggaaaacggagatataaatttgagatggcgctgacagaagcaagcacaagtgaagccatgaaaatgtcaaggaaaaagtcaacaagaaaactggcttaataaagaggtcatggcaaaaataaataaaaatgtgacatcggatcaacgaagtaggtggacagcgcccgtgtctcaagagctcacgcggcttgtaattaagggcttgaaacatctgtatcccgttaaccctgcaataagcaaagtgacaggaatttagtcttccttgggaattcaagaacgaagaaagaacaaaggtacatacctcgtgaggagtattgcacacagccaatcccacaaggccagtggtctgttcaaaaacaaaacacgattcatgctgtttactacggtttccatacatccagcacgctaaggaaatacaaaaccacgaatcccccggctaaaactggtctaaagccagctactggtctctcagtctcgcttgtttggagcttttttcctgactctcggagcggaaccactaacctgccctacccggtaaggcatgcagaacgagtccccgaaaagcaccgccgagcccgcgacagtaggggtcaacacccgcgggaagtagggctatcggactgagtctacccccacagtctaaattccaacagtgacctccattcgtctcaccttcttcagcacacccgccatgacagcgccaacgactcggtgacgcacaaccctttgggaacaattctcagacctgctcaatcgaccaccgaggtcgccactctgtcaccctggaaacagcttagctccaccccttcaggatcgccaaaggagcaaagactctgccccgcccatcttaaaagagaaaaattgacgcatgcgcgatgggcatacaagcctaaagctaagctagaagacgattggggaaagaaagggtttcccagctgtctgttcctgttcctgccactgctgacggcttgcccaaagattgagggaaacactcccaactaccaaaaaactccagtcgctgtaggaacctgcactgtgcttaaccgttgatgcattcctcaaccttcctttctcagtttagtaaaatgaaagtgataacggagcttgagcatcctctgaattgatctctcaacagcaagttagttcttcgcacaaggatatcagtattctctgtgtcttacgaaccaaagccctatggagtgtgaggtcattttccatcgctcttttcgatttcactggctgaaatacatcatcttatttccagatgaaatgatatcagaccataccactttttcctacctccacaaacactgaccactcactatgtgtcagttactgggacataatttctaaaatgggatttcacatcctggaattcaaagaataatgaagaaggcgtgtattaataaataatttggtaactgttctaaaagaagttgatgcaaagtgtgatggtaccagggaaaaggaaataactaaaaagcgtgggtgactttctaaaaagtcagtaggagaaaagaacaaattgagaaaacacaagtacaaaggaaaagaggttaaaaatgtatatataaattccaggtgattttatgtgattggaaaggtgggtttgattgttaaggtaaactggttaagattatgaaaggtgttgtttgccattatacaaaatttgaattttactttttaaggaatgggaacaatgagaagacttttaagcttctaagtgacaccatcaaatttatgtttcagatatacaaacaacttaggcaacagttgaagagaatgagttggaagagatgaggcctttcattagaggcatgagactagaaaaaatgaaagctaaaccaaaagcaaacagaagaaaggaaatattaaagattagaaaagaaggagacagaatatcaataaagaaaatcaatgaaaccaggaattggttccctaaaaggatcaacaaaattggcaaacctttagtgaaactaagaaaaaaaagagagaagatttaatacaagcaagaataaaagaaccatcactaatagccttgctgaaataaacaggaataagaaggaatactatgaacaactatgcttaaaaaagataaagtagataaaatggccagattcctagaaaaacacaaactacctaaatcaactcaagaaggcataaagaaaaatctgactagatctaacataattaaagaaattgaattagcaagaaaaaaaaaaaaacctatccagaaggaaaagcacaggtccagatggcttcgctggtaaattccactgaacaattaaagaataacacttaagaaactattccaaaatatagaagaggaggaaacaattaacaactaattctataaggcaagtattactctgattccaaccagacaaagaaatcaacaagaaacaaaaacttcagccaggtgtggactctgattccaaccagacaaagaaatcaacaagaaaagaaaacttcggctgggcctggtggctcatgcctgtaatcccagcactttgggaagctgaggcaggaggatcacctgaggtcaagggtttgagacagcctggccaacatgacaaaaccttctctctactaaaaatacaaaaattagccaggccttgtggtgtgtgcctgtaatctcagctactctggaggctgagacaggagaatcac

SEQ ID NO: 586726 - DNA, 4001 bp, Homo sapiens
gtccaaggacagttcttctaacaccgtgcttcaactattttaacctaagactcttcatctttcatatcagttgctataattatcattttgaaacagtacatgcatttcttgctatatatagatagaaggaatgcgtatttggatgtcagtgtcattttgtataccttccttggaacaacagtagtattcaactagtccttcactgttaaatctgacccctccctgaaactcattctcaccagacaaaactagaggcactgtttgaaaagctaggactcattttgtttcccctttgagaaaacccacaggaaaagccagctttcatagaggcaaatgtggaagcgattactagcattatgaatagatcattctttcaaatatatgagttactcaaagtatgtcttattgtgtgtgcatagatgactaactacttgaggaataggcctcattaaaatggtggtgccatggtcattgtatcatcatcatcatcatcactcccatactacagataaataatctcaaaaatgtaaataatgcatctacagaaacagtaagtggtaaagcaagacgtgttcacaggactatgtcttcagtaacaggctctcatttattttaccacatgatcttattttggcttttctatcattatatgcattattttaaatgttgtatggtataggtagatctataacaactattatataaacggataaaacaggcataccatcattagtttaagagcagaaaagtcactgcaatgtgtcaagccacactttaaagtgttaggtgcacattttcccacacatttgcattatactctaaagctttatatgaatttctaatattgtaagtaaaaaaaagttgtataaaattaaagtgtttcacaatgctgattgcttttcacaagaattcttcattgaaaaattccaaattagattaataatgataaaatgtagacaatgtatgcaatgatctaacttttacccttgactattgcaatacacagttaatagtggtttaaacataaaatacttctcagtttgctttgaagatgactgaaacgcaccttcttttatcacagttaaagaggagttaggacctctcatttcacatttacggtttctcaatttttgaaataaaactggcaaattcactacaatccacgtatttatattcattaacactgagtacaaagaaaatgtcagagatgagacgaaaaacaaaagcgtgtagtgctcccagtagcttaagaagtagagagtttcaggaaaaagggaagaatcactggcagcaaatccaatgagggtttgtaaaataagaaatgaaaatgaatataaaatatgaaatgagtttctaatgtaagtcagaaagaggtcactgagacctgcaaaacgagttgttttagtaggggggtgtaggggatagaggccagatggctttgtgagtgccgatggtggcctgagttaatccaaggatagctgtgtcaaaacaaatttaaggcagactattttcattggaaaatcagtaagacaataaacttaattggttttttaaaagaaaacaaccttcctcaattaaaaatcccaatttttttgcttgttttattaatacatttgctactcatttttttagactatatatgctcaataacttgacctaaaaattcttgatcagattagatgtcactgactgccctatctccgtctgtatatcagactagcaattattaaacaaaaatcaaagacagcaaattagtatgacaagaagattgtatttaatgaaatttgacctgaatctgaaagatggagaaagaaaaatagtgtgtattaaaatatgtcaaaagtggattaggctctgacaacacaaagacttacagatttgtctcttgaacaaatacctttaaattgtgcgttaattccaagtggtttggttttgttccatcagtagcaacactccctgcagctgaattggcaggtcctttgttttcataagagttctttgaaccaatcaggacagagataatcttattatacctctgtaggcttgcgtttcttttgatgagagtctagagaagtcatgggtaatactttaccgtgtgccagagaccgcttatgtttcagttgtacaaggtcaggtcttaatttaaccaccaactggatacttaattttagatacacagaagcacacattggctccagggcacttcctctgatttaggaaggcaagtccctggataagaatgacaagatgatcattccaaaaggtgagattatgaaatatttgatctgtacctcaccaactagcttattgaatagttcattattggtaatattttaaacagattgaaatacaaattatagtagctactcattactttctttccacttgatcacctacgggcttacctgtttagagcctttttaattagagactaaagctagaatttgtttgcttatagaatatcaactcaattgcataattactaagcataaaaaattgtatcatgagaaaaacagattaagaatgagtatccttatagaacatgtcaatatatttactatagaatcccagaagggtctcagctcacctcttggtttctaataaaaaaaattaaataatttttgtgaataaataaaataaatcttttaaggctttttcatcacttgttgaaaaagatgaatgctttctgcccagattgaaacatttctttaaattagttagattttttaaaaaataaaccgaatagaattggaaatttactcctgcaaattatatcacaaaatctaaaggttggaaagtccttaaaatttatctgatatcgtcactcatattgttcttaaatgcacagttaacttctaaggagctttctatatctaaaatgatttgacttccacgaagtaaagcagtgatgtggacaagaaaaatcttatcactgctttgtgctgagattattaatttattgtgataaaaattataattttacacttcagttattttatgagaatattttatcttcaaatagaaatttgcctacaagttttatatttcccctggagttgttcgatgaatttgttaggtagttgcttaaactttttgagaaaactttttctcaggtttatgaatttttaggttacaaaataagaccctcttttcattaattcattcaaagtagctgagtcatagttagagtatactggttaagcgtgtgtggcctccattgtcagatgactgggctatatcccactctccactgcccactagatatgtgggcttaggtaagttacctaatgactctgtgcttcagttttctcatctgtaaagtgggggagaattatgtcatagacgttaagtgacatccatttaatgcacttagtgtaatccctatcacaggtaaacactcaatagatattagttataataattattaaactcaatataaaaatacttattaaagacttgctatgctatgtgctttactgtgtgctaaaccttaaagagaaattggtattatttctggagaaaaatctaaaatacattatttaaaggcagaaaactctctgagggcatggatcccatatatatgtgtctagccctgtgcctggaacacaacagacgttgaatgtatatttttgcatggacaaataggatagtctgaacatccttaggaaaaaaataatcactaagaattggtgggttaattcttttcctttgtctttttgattagcagagcaaaggaatgtagtatcatagataactgtgcatttgtattacaacaaggtatttgacaatattccttgatgatggtcttattatcaaaaaggagacattaatactaggtggtggtgtctttaagagggtttgtagctggataaacaccttttctgggagggtgcaaaataatggatcaatgtcaacatagaggcctctgtcctttgccaatttcttttcaacatttatctttatcagtggagcttaaggacatatagaaggcatgcttatta

SEQ ID NO: 586727 - DNA, 4001 bp, Homo sapiens
cctgcgggctctggcctctccacctgatgcctcctctgccctcttatgtccaccgggctcttcccttgaggtctctgcatggctgacttctcatccctcaggtcccgcttcaaatcacactcccaggcattcccacgccatccccaaatacaatatcccttctactcccacaccacgcattctccatattaatccccagctgtattctcttcataacccttaacagtactcaaaaaaggtctttcttttctactggtctctcctctccagaatgtacacttcattctctctcgtattctgctatatcctcagcacctagaaaggagcagccatatagaagatgctccataaacatttatgcacttaattatcacacactctgaaacaagtgtgtgttacgaacaagccagcacctcagggaagatcggcattcccccatctcctcatgcaggaccaagggctgtcgctcatggctctccatcactgtctttgcccaagtcacacagggctttgccttctgcccaccccacacctgccccagctccagattcttcatccatgtgggacttcaggcaagtcactcctttcatttcctgggcctcagttccttaataacaacaacagttaaagaatacttgtacggtccttagcaggcaccagcaattgttttaaacactttagtgagaccaagcgcagtggctcgcctgtattcccaacactttgggaggccgaggctggagaatcacttgagcccaggagttagaggctgcagtgagctaggatcgcgccactgcactccagcctgcctgacagagttagaccccatctcctaaaacacacaaacacgctttagataacagtaactcatttagttccttgcaaatggacgccaaatgggtgaggaaactgaggcattaagagaataagaaacttttccaaggtcccacagctggagtgtggcagaggtgggatttgaacccagccactgtgcggccagaatcccgcttggaatcacgaccccacactgcctcttggtaaagtgtagctgatgatctaagggacctggaatcatccatgactcttttccagtcctgctcttacggaatctctgcacaccactaactcggcttcggcagctgctccctacctcgcacccgctccctacctcgcacccccagccctccgccctccggtctgcgtctcgggccacctcgcgggcggctctgcctgtcactctcctaaacgccacggctgccccagcgttggcttccggctttctgctcctctcacccgacggcgctctctctgggcgacagcctccactccctgcagccagagtgatttttcagcattaaaaagcggccacgtgacgtctccgattaaaggctgccgaacagactctaccctaaattccgcagccaggcaccgggaccctggaccgcgccctccctaggcctcaccgccgccgccccccgcctcgctccaggagcgtccacacccgccgcgcacgctgcttcctccgcctggaccgcccgcgccggcgccgactggctcagcccgctccgcattcacgcgtgcgtctcccgagggcaggcggcccctactaccatgacggccctgcacacggtgtcccatctgcccagcgaagtctctccctctccctccggccagcggggtccctctcctcgagtcgcggcttcaggagacacgcggactacaggtcccagcatgcctcgggacgcggcctcttcaggcgccccagtcaaggtgagagcgtcccagggacccgcgctgtccgctacaggccggcgaggcccccatccccagccccacactcactgacggactccaccatctccagcagtccgtgcgcagccgcttctgaaaaggcggcctccaacgcgagcgaaagacgccagccgagtcagagcggacatactcgctcccgtccgccccgcggtccccagccgcctcgcccctgcctacttcgcttccccggcgctccgcccgcgcctcccgtgacgtcacagagtcgctcatctccaggagtgggggagccggcagccgctcctgacccagattagctgtgagtccttcggctgcaggaaacctctctcccgagagcaaagcccacgcataacttatggttgctgagctgccccatgccttctgaaacagcttgttggttgcccctctgatcctgtagggctctccccgtgttctgcccctcctaaaactgagtggtgtataattcttttttttttttttttttctttttgagacaaggccttgctctgtcacccaggctggagtgcagtgacaccatctcggctcactgcaacctctgcctcccaggctcaagcgattctcctgcctcaacttcccgagtagctgggattacaggcattgtgccaggctaagttcgtacgcagcaatagataatgccacaaatggcttgattcgatccactggctttaaggctgggttggcataggctcagggaagagactgccgtctttttgtccctttcccgcctccacactgtacctgatgcgcactggcacgaggggctgcgtgaccagctggtgttctccctcccagccatctggagccatcccaacccctctctgcctgctttgaatgtcccctcaagacctgggaaggaaaaaataacatcacctccttgaaaaaaactgcaccaaaggaatctctgtccacctaaaccatactgctcactaaaagacaggaatgaggaactttatcctggagaaggaaagaatgggagaaactagtcctgtagtcagggcaggactctcggagagcgcaagggcttgactccattcgctgcctggtggtctctaagacgagcaacataatctatgaaggtgcagggataaactgtgattttacctaaaaaaaaaaaaaaagagaaattaagctttacaaataccccccctccaggctgaccccgggcccctcctagtcagccagacggccacatcagctcagctctgagaagaaagcccgtggttgggcctggcagagaggggcaggtggtggtcactgcaggtctgtccctgggcgctgccatggagaagaggacacactggttatattaactctcttcatattcaccaaaattaatgcctgcaagtggacaggcgcagacactgtggcagagaaactgtagttccggactagcgggtgaacccggggccatgttaaggaagtggccaagccgttctgctcacgtccccggtatgtcagccactttcatcagttttgttttaccttgtaataaaagttaccaaggagttagcaaaatctattaaaaattaccaagaagataatttgaagtacaatgaaatttgccctaagtgtatattatgctggcaggtagcacctgcatgatatttatacataaagagtgtgtgtgtgtgtgtgtgtgtgtgcacatgccacagatcagtaggacttgatggcattttctaacctgaatatcaaagtctgggaactaccagcagtacccatctgaccagggagtatagcgggtcaagaaatgagaaaaacaggaaaacaaaataaatttattcgtcctcctccacataacattttccctgaaggagagtgtccctggcacctggcccagcttccacaatggaatggataggccccttccctccttttactccctaattggcccaaagcttttgaacagaccctcaaaccaagcagaggaagccatggtgtgccttccaccactggagggttacatttgaaattggtgtcccaattttaaaacgtcccagctgccataggagaggctcttgggagtggcctccagctcttgacaagggcccacagaggccactgccccatcacggggggcacactgggcccgtgaggaggaagggcctcgctgcctccaggatgtccagtttggggtccagtgagcggccaagcccctccaacaccatgatggcaaacacaatggaggcaaa

SEQ ID NO: 586728 - DNA, 4001 bp, Homo sapiens
tccagagcgtcgttgaggccgtgcatcctgttcctctcgcgcgcgttcgcttcctgtctcctgaacttgaccctttccaatcgcagctttgttgtcttttttttcctaagacccctccttctaggcaacccattttcatcttcctcttccctgtcttcctcctcttcttctttctcggtttcttctccaggggcccttttgatgctctttcctcgaaggacaatctgtttggaaaagctttctggcttcttaatttgcttctggtcctcgcattctctagaaaactttctgcacatctgggattctggcattacaacagactcatcaaacggtagtgttaacatggttctctaatcttaaattacctgaaaaaatgccagcacaatatttaaagagttttcatttttaaagtttatacacttaaaacatatttaattatttaatcataagattacaaaaacacgtgaaaaagactgattctgggcctgattttttaacattaaatataattttgagtttgtgaagataagtaattatgaagacattgatgcattcaataggattatttatatgagcaaattatcaaaagaaaataaaaatgaaacatataattattgtgatatcattaccatctacatttctctttgcctttaaactggattttaatacccccaaaaaagattgtggaattcaagcaaatgcaaaacatgaaattgcaatgcagaatttcattaattccaattcccctgagcacaaaatgagaagataaaccagtttttaaaatggactatctctccattagctgacaaatttgtgttctttttttaaaacaaacaaacaaacaaacaaaaccttaactttatttgctgtatcacacaactgtgaatttagataagtgggtgtgggaatatacaaatttaaagaaaagattataatcagagtcaatttttcaactgattttttctgatcagtaaagaattatgtaaaagggcactattttcccaggcttcaaaaagaaaaggggattaggctaatttggaataaactctataaataaatttaaaacataaaaatcactagcaatttcttttaattaaaaaaaatagagactgattttatttacatttaaattttttccaaatagaattgtctgtttactgctgttcaaatcatcctggacaaaaaccactctcgtagtgtttttgttctacgagccatagaagtctccctctagctaatatctgacaggaacggtccaaggattctgactgcaattgtgcacgtgtgttcagaatcccaaatgaaaggggaaaataatttgtgtttcaaatgcattttggtttttgtctggtgaagcagcaagtattttcatctaaagtcttcaaacaaataggcacattaaagcagagacttttcaatttaacaatctccagccccctcaacacacacatatacacacgaacacatacacaaactcttagtaatgtccacatacttgcagtgttacataatagcagtgaaagtatgtgataattacatcataagaatgaaatatgataagttatagatggcaaagagcatataaatactataagacagtgacactgtatctttaaatacttgcatgcaaagccagcatcaattgaagtatatctttatttatattaccttaggttttaatttcattcaataatcagttttcattttgggtcttccaaatcttttcaggctgagtgtcgcatcgtctcctggagtctctagatctgtgtatatctgcactatctcattgatctctaaaaagtgacattgatgccaactgccagagctggtacccatgccatctgctagtgacgtcacagggcagagagagccatgtgatcctctctcttgggaccttcattctgcactgatcatctggcatccctgtaagtgggtaccagccttcatgcatcaacacagaaggttagactgataggaaaaaaatctgcaccagcatttcacgtacagtaggtgcatttctcctcgaactgcttcggtttcactggcaatctgtagaaatagctgtgttagtgttcagtttcgccctgccaaaggtgcaagtattaggtgatcgttaatattccattcatttacaaggtgggcttttgtgtgagcaagaggttttttttgttgttgatgatgttgttttgtaaagatcaccatcccatttgtgcacctgggtacccagggaaagaaagccgtgaaaaggagctggaaactggtcttaagacgtttaaccaaactaagatttgtgtaagtgaacaggggtcaaaaaaggtctcctttgcttgttttgtttcacagcgtgtaacttatgagtgtgtgtctctgtgttctcttattaacatgtaagacttctgtgcttcttaggcatttggaataaaagaacagcttctccatctggggtctgtgaaagacatcctcaaatactccccttcctacacttgctggtatctttcaccaacttttgcagagacactgcaagtccgttgttaaggatttcaaactacatactttgtcctctgcagaaagtcactaacttcactcttttattgtcccttatctcttcccagcgttaacttgcttgttccctctcatttcatttcagacacaataaacataaaaattatcacttaggtgtttgtcttcctctccctgacattctgctgagtattttaatcaaagattagctttcctgtttttgtttttttttctttttttttgactttcagatttttttctttctcttaaaaatcttgtcctcacatttttctctagaccaacatcaatttaaatatcttcttgttcttgtatcagtgtccagttgtttttccctgtcaggtgtatttcagatttatcttttttccccgctccacacttttggtttcttcttaacaaaagcagggtggaaacagttaagcaaagctggcaaagccttatagataatacgaactgtggaggcagagacaaactccaccttcctcctgttttctcttctcccgtgcccccacccctataaaggacatttgatttcaggattgcctgccagtaaagtaaaaagtgcacttaaaaaaaataagtaaaagttttaaaataaacaaataaacgcaacctttgttgtttggcaactgagtaatctctttctataaagtgagagagtatgcttttggtattaaagtaatccctgcagagctgtaactgttgaatctgtgttagcattccccttataaatcccagttttgcaaggtttagaattctgctgctttaatgcactttggatccaaattggcaccaagggcctcacactaaattcaattttgcttctgtcataccccactcatttccaccttcttcaaaaagttgcttgacttttcctggacagttctagaaatgttggggaagctggcaaaaaggagaatcaaatatgtaaaagcagataatttttctctcttaatggcccagtaaaaaatgcaaatttaaaataagagtcaggctataaactcctaagttaaaataggtaggttggcctagcttctgttttttaaaaagccagatataccatagccattgtaaaatttgttgtttaagaatatattacttggtaatgggtgcattgagtatatttcagatggcttttaattcaagaagtacacacagtttttatattagcatagagaatttctataggaaggccagttgcagaattttgttggtctcccatatgatttaatttttaaatgtaaaggagcgtaagtatcagagtcatgagccacaaagcagccagtgctgtcttgaattttgtatattgcaccatattctaaacttgcaaagtctccaaaagctgcattgtattaaaggcatcacaaacatgaaaatcaaaatccaaggaatagatgacatgatatgccagtagaaaattaccatggatgtacttcattgaaagggtagattttatattttat

SEQ ID NO: 586729 - DNA, 4001 bp, Homo sapiens
gatccctccaagactctcactggcccccaccccattggttccggtccccaggaagaggaagggctcagatcagcataacagtgaatcaccgagcacttccacacaatgacccctccaggagggtggagaagcttgtctggcaacagcctacacaaacggcaattctgaagagcaacaaacaaaccagtttagccccaattcccattttgcataagaatgcgccccacaaaaacaacacccgaagaacattagttgatcaccactggttgatcgttaccagttgcaaacactaaagtttgagccaagacagaattttaaaagtcccctggaaggaactttgggtaaagtggttttgtggaaactggtgttaaagtgtcattagactgaactcaaacgttccatggggagcaccagatgtttcaagcaacagatcttggtaaacttggtttcagaaagaagttaagccagagaagggtttggacccataaaccaaagggaacttgttagtcactaagtgactgccaaggtacctgttttcgttatgctaataagaggttacacaaattccaggaaggaggattgctaggtgcaggggatggttaggtcacagggggaccgcctgccggctggcctctgaatagaccctgaccatggctccttaatccagggaagcagcaaaaacgaacagcaattgggctgaaaacagggcgaaggtccttgcgttaggccgggagagtcgttcttaaaaacatgcatcctcccagaggtcacggcctccttcacatcgtccaggtcgggcacgggtcccagagaacgacaccccagtgtacatgaggtactgagcgaagacagtgggcattgcttctcccctccccatccccgaactactcttgccagccatcacacacaaggaaaggtattctctataaccaaacggatgatttcgtccacttcttccttaaacacctaaaaaccacagcgacagcactagtagcccttcattcggaatcagagcagcagcatctgcgaacctgcaaagaccaggggctaagggtgccaggacacagcgagagtggcccctgctcagatccgacacaagcctcgggggctcccggcggcgtagacgccgcacttcgctcgcttcccgctctgcacctacctcgctcgcacatccgccagcgtccggcacctgagccgtcggttccgcgggtgccttctcctcttccccggcgtccaaggggccactccgagccgctcgggggtccccgccgcccccctgcacagcctggctgccgccgtccacgctggcgccggctcctccggtggacgaggcggcggcggcgccgagcagcccgtgggcctcgtccgcgctcccggcagccacgctgtgcaccagccatgcatccacgctggtgcgagggacgaaggggaccccgagcgcgcgcacctcccggagcagctggccctcgggcggcgcggcagggtccagctcccggcccttggggtgcaagtggcccgcgcgcccccaccctcccgaggccgagaaggggctgagcgcgtaggcggagctggccgggccgcccaggaacagcagctcgtcctgcagcagggtgggcggcggcagcagcaggtaaagatctaggtctacgcggagccccgccaagctcagcaggagggtgaggtgcaggaggccgccgccggccgaccaccaccgcttcaggtgcttcatcgccgccgcgcgcccgggaacgcccctgccggcgcccgcgggtcccggcgccccagccgccggggtgacacgtgcggaccccgcgcgccgcccgcacctgcctggaacccagataagcgaaacaatggaccggggcgcgtggcggccgtcgcgggttcccagcaccgggcacaaaggcgttccctcggcagccggcaccgtgcctggcaccgccggggatcgggagaagcgaagaaggagccacctgagcgccgagcccgttcgcccagccgcccgcagcccggcgcggtggccaagctccgcccccggccgcgggcgcagccgacaggaacacgccccctgccgcccggggcccgcgcccgtgggaggggccgcacggggcggggctccccgagctcaaagcctctttatgtccggggaacgcaaggctttctgggagcagaagttgttctgggcaccaagtggccccttgccaccctgtggccgtgagctgggccatccttgctgaaagccaagggcgggagttggggtggagggctaggtggtgggtagctgggtgggaagggacaggatgtgtagactgggcggagagtgactgggcagctacgaggggcctggcagcttgcaacgggcttccaccccaacgtgaggacacttggcgggcagagtgggcaagagtaacctctctgtctcagttccgctatctgtaaaatggggatcatagagcctgtcaaacagggatgtgttgaggtcagatgaaatatttcgtgtaaagttcggagtttcacatataaattccaccgttgccattgggatcagtcatcccaccactccgcacaccccagtcccagcctcacagacccctctctcttctctgggcgtgctctgcatagtgctagacctcctctcggtatcctttgctccttatccgttgtttccttgagggttgacagcaccagctctacagttaccctgagtgagttcaagtcccccctccacttgaggggcgaccttggacaaatctctccttttctctgtgcctcagttttctcactgtaaaatgagactaataatagcacctccccagcagaccttttgtgagccccaaatgagataatgcatgtaaaccaccgaccacagcactgcatgggtaggaagtgctccctgctacccattgtttgtgttactcaccctcaaggcttagctccaaagctacatcctctgaattttcaccagttggcattaatctctcccccatctgttgcaccgtgatttctccgtttgccaacattgtaacagttggcccattcaactctgtgttgtagatgagaatcggtctgatttgcccattgtaaattcttgaggacaaggaacctgtttggttcacctttgtccatgcacagtacccagcactgggccttgcaagggtaggttttactaaccttagctcccttccttggaagaaaaggggacaggaggggatgcccaactgagaatgggcagttgtgtaaaaagttgagcaagacttgttttaaaaggcccctccctccacctggctttctcatctctctcctgggctagtgtagtaagaagagaaaagaatggggaccaggggagcagaaacaggggagcagaggaaagttgcttcctctgtgttaagccttggaagatgggttggggtggcaaagaggatgaagaaaggtgattgccaggttatcaagaccccgttcacagcatttagtctttgaacagcggatttagagtctcagcttagtaaatgctgccttcagctttttactgagaacctactaactgcctgaggctgtgctggaggcatgaaggatatgaaacggagttctttccttccgtaagcttatggttttactagggagatgagataaaaatttgtgagacactaagaaacaagagaaataatgtactcaattgccaaaatacttagatgtaaattacttcaaggtttatatagggagctctaaaactattgagagtagaggcggtgccttcttcaaggcggtgccctccagaatcttacacacagttgatgctcaaaaaaaatattagttgaattgaggaggttacacttgagatgtattttgagaaatctgaatagactgggaacaggaagcacatacaaacttctaacatttgttgggaagtgggctaacccctcaccattttacaatgtgaattggtaatcatagtgttaaatatctttcagactatacacttcaaaagcatggcttaactctgg

SEQ ID NO: 586730 - DNA, 4001 bp, Homo sapiens
gcaggagcttggtgatgaattgtatcagcatgtacctgagttagggtccagatacagccccagtcttctggggtgagggtggaagagaggataatgtagaggtcatgccaagttagttcataagactgggtgaggtactgaaactctctaatgtaagaggtagggtcttctggaaatgaactgagtcttttgttaatttgagagagatcactgagggagaggggaacataaactttaacaatgcctccagttcctgctactttctgaagggggctctctagcacaggggctgaactaagggtggggcatgggccaaagatggtgcctgagcgagtatgggtgggagagaaggaagaacctgaaagtggttcctgctgagggtttgaagggggaaggagggttaagttgataggcagtggaggatagataggggcgtaaggtggtgggatgggtttacaggcttcaggagagggcagtgaggaaggagaatgagtaatgagtacagacaatgctagaattgtcctgaggagaggacagtgtaggaaaagaagtggatactgctgcttgggaagatgggggctgggaagatggcgactgggaagatgaaggctgagaagatcgcagctgagaagataaagaggaggcttagggggttaaagaagacggctgagagggagaggcaggggctgagaggaatggacagcagtctgctggatctaacgaggaaaatatgtcgagttgggaggagaaaggtgatctgggtggcgagaatagaggaggatttgaacaggtgagcaagaattacagaggtcgggttgtgatctgagtgcaaacagggctggacataaggagtttttccccatttctccagtcgtcagcaataattgcttaaatcagttaaaattgtaaagtcgaatgttctatttgcgggccattaggacccattattcaattcgtattgtggccagtctgaattgcaaaaaaagacaaggaggatggatatcttgcctgaggcctaaggtttgcaggtttttgtttgtttgtttgttttacggactctcactctgtcgcccaggctggagtgcagtggtgtgatcttggctcactgcaagctctgcctcccgggttcacaccattctcctgcttcagcctcctgagtagctgggactacaggtgcctgccaccatgcccggctaattttttgtatttttagtagagccagggtttcaccgtgttagccaggatagtcttgacctcctgacctggtgatccgcccacctcaccctcgcaaagtgctaggattacaggcatgagccaccgcacctggccaggtttacaggttttttatgaggcagcctagagggctgttttttggaattgaggatggggagtttcccataactgagggtaggctcgggaaaacagggaaaaaggagaccatcctggatggtggagggagacgatgaaaggagcgatcgtcaccgctgcctttttcgttcccggaacgggatcaaatggcttagaggcgtccccctaagaccagatgatcagcaagtacctggcacacgtcggagccttcttggaccaatgttggattttcagactggagaaaccaagagaggctgtatggatttttccttgttaaccgggctcccgggaaacttaccagtaggtgagatcagtgactgatgtgcatgcacagagaagcaactggaggctgaggagcttcctttgtccggctgctgtggcctgctttctggggcggaggggtaggtccacgggggacgaagaccggagcccctcccgggtttcggcaccagatgaaagattcttgtatccgttcaaactcttgagagtgtgccaacagacaacacgaggcagtgtggagcaacctgctgttttaatgagcgcctgggtgcaggcaggctaaggcctaaaatggcgtcagcaccaaatgagtagggggcagggttttatagtcttccgtaaacaggaattgtcccagtctgatgtaactgctatgtggtacccagatggcctgtttctcgatcttcaggggtacgtgtcttccggccagggtaggtgtcttctggccggctctcttcctgcttctgctatcttgctgactcacgctgctggtacaagtggccttgtgccttgggactgggcctgagaagagaggagttactcattccttcaagctttcgggcgttggggagaatctttcaaaaacaaaatgaacacaaatgaaaggaaggctgataaccatcattttactcgttacttccgtaagtccaacattttaaaatttcacatagaagtgaaatcatggagaatttgtctttccgtgcctgaaagtgtagattttaaatgttttcttcacacacaaaaatgataattatgtgaggtggtgatttcttaattattaacctgatttaatcattccacattataaacataaatcaaaacatcacattttaaccataaatgcattttaattattatttgtcaattaaaaataaaactaagaaaagaaaatagatagctacattaatattgggggaaaaacattaaagcaaaaagcatttttaggaataaaaaatttttgtcttctaaccaatacattttgttaaatttattatgattattgatatacttgggttcatttttctaatttcattttatactatttattatctttttatttattatttattatctttttatatgttttatttttcccctttcctgactttattgaatttttaaaaaataaaaacgtttaaagtaatttcaatagcttctgggatagatgtggtttttggttacattgatgaatggtatagtggtgaagtcagattttagcgcacccattaccaagtagtgtactatttattgagtatttaaatctacccccttttttctactttcatgttttagatgatatacattctatttctatgattttactggttactcttaaatatttttaacatgttgtagaagataaccattctatttctactattttactggttactcaaatatttttaatgtgtacatttattaataaggcctaaagtaaattaatatttatactttcttcttgaagaataattgaaatttagaacactaactcttgattactctctctggtgttagagtgttattattatctagtgtttttgttccatcttattgttctacccccacgttttcatcatgatactgttttataaagttaatggctttacccatatacttattagattttttgcccattgttattatttgcatttcatgcctttcttctgatttcagtgttctttagaagttcctttgtgaagggtccattggaagcaaactctcagtctatgtctcaaagtgtctttaaatttttttttttttttttgagatggactctcactctgtctcccaggctggaatgcagtggcacaatcttggctcactgcaacctctgcctccctggttcaagcgattttcctgccttagcctcccaagtagctgggattacaggtgcatgccaccacacccagctaatttttgtatttttagtagagatggggttttgccatgttggccaggctggtctcgaacttctgacctcaggtgatccgcccaccttggctttccaaagtgctgggattacgggcatgagccactgtgcctggccttaaattttttagagacagagtcttgctatgttacccaggctggccttcaattcttgggctcaggtaatcttgcctcagcctctcaagtagctgggactacaggtgtactaccatgcctggcaaaaaatgtctttttttttttttttttgagacggagtttcgctcttattgcctaggctggagtgcaatggcacaatcttggctcaccgccacctccgcccgggttcaagcgattctcctgcctcagcctcccaagtagctgggattacaggcatgtgccaccacgcctggctaattttgtgtttt

SEQ ID NO: 586731 - DNA, 4001 bp, Homo sapiens
agtctaccaatctaggatagcagttatcccaatctggagccatggccagggcaaaggcactgcaggatttcttggtcaaagtggggactctagagggacagggtgccaggaggagctccgggtcaaaccccaggtggccagacagccggggagtccttatacctgttaagcctttgttctgcaacatctcatcccacaggctttgattattgatgactgtctgcaaagtggaaggcactgtaaaaggtattcaagcactagtgcaccagataaagaattgttgatatgtcagacccacctgtaactggacttctcgttttttgcttgccatttatctactatcataggaaaaagaaagaaaaatttttaagtaggaaatttaaataacattttctttatgcatgcaaataacatcttttaaaacaatttttaatttttgtgggtacatagtaggtgtatatatttatgtatctctgtatttatgtacttaaatatttgtgtatttaaatctgagatattttgatacaggcatgccatgcataataatcacatcagggtaaatggggtatccatcacctcaagcatttatcctttgtgttacaaacaatccaattatactcttttagttattttaaaatgtacaatttagattttttgactgcagtcacctgtttgtgctagcaaatactaggtcttattcattgttctttttttttttttttttttttgagacatagtctcactctgttgccagactggagtgcagtggcacaatctgggctcactgcaacctccgtctcctgggttcaagcgattctcctgcctcagcctccagagtacctgtgactacaggcacccgccaccacggcgggctaattttttttgtatttttagtagatacagaatttcaccgtgttaaccaggatggtctcaacctcctgacccgtgatcctcccacctcagcctcccagagtgctgggattacagtattcattctttctaactgcaaataacatcttaatgtactagtgaaaaatttccccactgtacattggattatgcagtgtcatctttgctggggagagagaagctaatgtcatggaaggactattgtatgctaggctctatgctaaatgcttatagctgccacactatcttatcctcccaacagtcctgaagcaaggtaagaatgttaggagttacacgtcgtctggtttttttaaaggttttgttttcctgaaatattagaaagtgtttcctatattatcaattgcaaacaaatgaacatgcccgtggatctttctggggtccctcttcagatctggctgctctaaggatatttaatcttgagaacaaggccactagtgttttctggggcacgacataaacttctcaaactccctattcagtggtatcaggggcggtgtagaacaggggtcagtcagcgtgcgggcgatagtgcacgctagcgtacaacaaaggaaaagccacaaacaagactgtattccaggaaaggtgctggttgctccggcaagccttacacaaaacaggtcctcctctaagctagactgggacgtttaaagaaaaggaaggaacaggcccagaggatctaaatcggctccctcgttgtggccgtttgagcggtgacctcggcgaagttccattccagtacctaggaccctggtagggcccgaggctgaggctagcaggcctcctgctgggctttcttctccagctgattcagcaaaaggaagaagagggattccctgcctgtctgggaagaagaaggggggcaatgttttgtccaacccatctgcccgtgagacttgagcggcgtctcgaggcccctgctccagacagcagctatacctgggcagtggggacaagaccaggtggcgcctaaaatcctccacctcttctgcccacacaatgaaggaacaacgaagtcctggttccaccatcacaagactctgttcttcagctgcctcatccccaaactcccatcccccatcctcccatccctacgttcctctatccccagatgcgcaccaaggtgcgctttcccaagtgcagatttgatcatatctctcctcgcctttgaatcctcctgtgactggccacgctttacagcataaaatgcatacacctcaaatcggagcagaaggctctctgccagcaccagccttttctttctttttaactttgtcttcatctaccctggtttggttcttcttgttcttcttgttcttcttcttcttcttcttcttcttcttcttcttcttcttcttcttcttcttcttcttcttcttcttgttcttcttcttcttcttcttcttcttcttcttcttcttccttcttcttcttcttcttcttcttcttcttcttcttcttcttcttctcttcttcttcttcttcttcttctttcttctctcttcctcttcctcttcttcttcgtcttccttcttcttttcttcttcttttcttcttcttcttcttttcttcttcttttcttcttcttctttcttcttcttccttcttctttttcttcttcttctttctcttcttcttcctcttcctcttcctcttcttcctctccctcttcctcctcctcctcctcttcctcctcttcctcctcctcctcctcctcttcttcctcctcttcctcttcttcttcttcctcttcttcttcctcttcctcttcttcctcttcctcttcctcttctttcttcttcttcctcttctttcttcttcttcttcctcttcttcttcttctccttctttcttcttcttcttcctcttcctcttcttctcctcctccttctccttctccttcctcttctccttcctcttctccttccacttctccttcctcttctccttccccttcccctccttctcctcctcctcctccgtctcctccgtctcctccatctccttcatctccttcttcttcttcttcttctccttctccttctccttcctcttctccttcctcttcccctccttctcctcctcctccgtctcctccatctccttctccttctccttcttctttctccttcttcttcttctttcttcttcttctttcttcttcttcctcttcctcttcctcttcttctcctcctcctccttctccttcctcttctccttccacttctccttcctcttctccttcctcttctccttcctcttcccctccttctcctcctcctcctctgtctcctctgtctcctccgtctcctccgtgtccttcgtctccttcgtcttcttcttcttctccttctccttcctcttctccttcctcttctccttcctcttcccctccttctcctcctcctcctccgtctcctccgtctcctccgtctcctccgtctccttcttcttcttcttcttcttcttcttcttcttcttcctcttcttcttcctcttcttcttcttcctcttctttttctttctttctctttcgttctttttctctttactttccttcctccctcccacttgcagcatctggaaataatttttcacaatagtttctgattaatccacaggctgagatacagaaagcaactgtagagtagagagggacacaatgaacctttttgtagggatcctcatccctggagtggacctaatagatgagcacggctacctacagaaggatttttgaccaggatcatatcctatcaagacaggacatgtagtactccttcacttcaccatctgcaattttctttcctttttttttttttattatactttaagttctgtgatacatgtgcagaaagtgcaggtttgttacatagatatacacataccatggtggtttgctgcacccatcaacctgtcatctacattaggtatttcccctaatgctatccctcccctagccccccaccccctgacaggccccagtgtgtgatgtttccctccctatgcccacgtgttctcattgtttaacttccacttatgagtgagaacatgcggtgtttggttttctg

SEQ ID NO: 586732 - DNA, 4001 bp, Homo sapiens
gcatgaaactttttttttttttttttcctggcaaagtcttactcatcctccaaaacccaacccaaatattccctttctggggaagcctggctcagccttccacagccagaattaactgccccctcctaggtcctccccttgtactgtgtttacatgtatattacatcactgcatacaggctgaactgattagcgttttgtgtattctccactggattgggagttcttagatggtaacatgcatctattcaggcccggtgctttcttcttgctttctaagtatcaactcattgaattctaacaacctatgaagttctatcatatgattatccccatcttattgaagaaaatgtagcataaagagtttaatacttctccgaaggtgacagtggccacctcagatttgaacccagttagtctggttcctgcctgcactcctaaacactaggctacactgtttatttgattgtatccatcactgtactggcatagtgaatcccgcatgggggatggatcattgttcagtgacaaaaagttgaccattgccaggagttagggagcaggggagggaagtggctgtgagttcaaaagcgtagtagcagtgatggaaccgttctgaatcttggctatagtggtggttccacaagtctacacacaagataaaactgcacagaactaaatacacaccagtgcatgaaaactggtgaaatctgagtaaggtcacagactgtatcaaagtcaatttcctggtgtggtattgtactggcgtgacagaagatgtaaaacggggaaagtgtatatggaatccctgtattatttcttacaactgcatgtgaatctacaattatctcaaaaagcaggaaaaaagttgatcctagtgttctgaccacaagtttggttctcctggacttggttaaatataattcacagaaataatgttttggtatagtagcattattaacttttgcttaatagtaactttaaaatatagatttaaatgatatctacacctttaacaggggtgtgggtgagcaagcaggagaatttatatctaatttgttctaaaagtaaaacaataacatgtctcataataggaatgcaaatttattagaaaaaagggtaaataccgaacaactgaaaaatgaagaagatgctatttctcatcaaacaacagtatcggttattaacaatttggcacatttcctcacagcattttttccattattgctgttttgtatatgattttcatgattgtaattacactccatatataatttcaggcatgtctcccttaaaatgtactatgaaaagcacagttctgtattgtttcaaagtcttcagaatttattgagtggcagtactgttatttaactatttttcaactgttggagcaatcttttgaacttaaatattatacgttttaaaaaattaaaaaggcaaatttgaaatacagcttgcatatttttcccttaatggcttttaaaaaataaaaacctcttccacttggttattcatctccctctagatttttttaatagtcccaaacccatgagaagccatgaggctgtttatttcacaggaatagacaggctgcctggctggcaagtggatagctaagcgtaacttcaagaaggggtccgggattctaaggtcgtaaacctgacagccagcagggcagctttagtgagaggcaagaaatgtccctgaacaaggtattttttcctcctttggtatcttgggtctgtaccagttctgctggtggcttgatagatttttccaatgtttgagtctagggtcactggctcccaagaggggatgctctaccaagagtcctcagtgtatgggaagacaactctgtcttctgttcagagtgtggtgctcacaattttgctgttgcttccaggacatgagctcaccctcctgggctttgaagccatccttgtctctggtgtcccaggtaccctccaggtctggtgatgttagtgtcaaaaggagagccatgtcatggccagcaggttcctctatccttttggggcaacacactttaagctcactaactttatggtgacaattctagatctgtaaaattgaagatactcgagcttgtctttaaatatctcctttgcttgatgtcaattgagggcaagatcagtagtgtgggttagaagctgggagcagcttcctttgcacggaggagagaatggtgaaatattaggcttgcgtttagtgaggcgtagagattaaacaatgatagcagactagattgattacctgacaaataattaggcctgcaaaacctgtcattccgttgcttggaaggaagcaatcaaactggataggctatgagatccagcctttgttttgcaaagggattctgatcgtttctgttttacaagctgcattgctgtatgctgcacatgttattaaggtggtgcaaggcagtgcaggttgtgagtgggcaacctggagctcagtcaggctctcattcagagcagtcctaaggaaaaggagagcagagcaacagagagggaaaagccatatttggaactagagatgtactagatatcactggatatgcattcttgagtcaggagacctagtttatgatctgagctcttagagatcctgctccaaggtccagttcttcagcttctcggttgatgtgggctcctgagcaagggaaacacatctctcaaacttaacctgattttcaaactgaattcctgattcccacccgcaaacttgtcactcctcctgtcctcccgatctttgtatcctccacccagctggaatcacccttgatttctctctcacacacagcatctatagaaactgccagattattcctgttgccctctttttactcccagcccactgtcacccattttccagagatttgcatgtgaaagtcttaaaatgtaaattaaggccgggtgcggtggctcacgccggtaatctcagcaatttgggaggccaaggcaggaggatcatgcggtcaagagacggagaccatcctggccaacatggtgaaaccctgtctccactaaaaatacaaaaaaattagctgggcatggtggtgcacgcctgttgtctcagctactcaggaggctgaggcaggagaatcacttgaacctgggaggctgagcttgcagtgagccgagatggcgccactgcactctggctacagagcaagattctgtttcaaaaaaaaaagaaaaaaaaaaaaaggtaaattaagccatatatgtttttctcctatttgtatgcttcagtgattttccagtgtacttacaggaaaattaaaacttcttgctgtggtcctgtgtgatccggctccggtttaccaccccagcttcatctcaggtgactcttctgatccttcaagcacttgaaatagatcaaattttcccatttcaaggtgttcacatatgctgttcctgtgcttggccaaactattctctttgttcttgtgattagttcatagtcaggattgagtttaaatggtatccctcaatgtcaagtccttcagccacattatctgcttaacatctgcctcctgatactttctgtttccattacaactcctaacacaacatataattatatgtttatttgtttacaatctatctcttttactatattttaagtttcatgggtacagaaactatcccagtttgtttcaacaatgtatacctgtgtataggacatatctagcacagtggctgggctctaagtgttaactgtttgttgaatgaataaatgaactaataatgtggaccttttagttggaaaaaagagaaaattatcagatttatggcacaaatggcagttttgggaaattcacaatttgatacattacaggtatttggtaagcagattaagttacaatgcttcctgaaaatatggattggccattttgagaactgaagaatccagaaactagggataaaatgtggcattttaatgtccattctagagaatataatgagacttgcattacac

SEQ ID NO: 586733 - DNA, 4001 bp, Homo sapiens
ggatttgcagcctaagatttcagacttaaagcccgctaaggccctgagcggggcagcagggcaggagaaggaatggagcgttgaagggaacattttatagacattctccctcatagtggctgtactaagtaaacaattaacgggcacaaactgccactccagtgtctaataactacctctgccagagcacctgccagcgccaccaccttccaggtgtgtgatgcacatcatctcgctgaactatgctagcctcaggagagggttgctctttattttacaggtgggaaaacaggggcttggagaggtcaaggaacttgcccaaagtcacagcatagaagtgacagaatccgagttttgacccagatttgatgggttccaaagcgtgaacttatttctccactccacaaaaataaaacctactcttcttacaatatttgaaagagccctcttctaccactctgctgtttgttttaaacacagcttgcttatctgtctggcatattcggtagaagtctgtactttgtcaatgcctggtttgcctggatttcagctacctggcccctggcatctaagcctgggtgagaacagggaatccactcctctctaagatgcatcgtggagttactcttttactcttccctgaaagtgatagttcaatcttcaacaggggctttgagggagaacaaactcgaccctttggcaagcacgacttctggcttcaccgtttttttgttttttgtttgtttgtttgtttttgacggagttttgctcttgttgcccaggctggagcgcaacagggcgatctcggctcactgcaacctctgcctcccgggttcaagcaattctcctgcttcagcctcccgagtagctgggattacaggcatgcgccaccacgcccggttaattttttttttttttttttttagtagagacggtttcaccatgttgggccaggctggtctcgaactctcgacctcaggtgatccgcctgccttggcctcccaaagtgctgggattacaggcgtgagccaccgcgcccggccctggcttcacccttaaagcagaaaggccagaagtcatcaaggccatgggtttactagcttagcttccccagacttaatttcaaacaccaacaaccgaaatgtttcctagaatgcagagctaatgagacatcaacctctgtcatttcctatgtttttcacaatgtgccaaaacaactgcacacattggaggcgtttttgaatgtgatattcaggcgaccttgccaagcattgtctcatttccttactttgtggagcatgaaacccaagggaagttctcaccctctctccaggaccaagcaggacactgggagctgctgtcccgtctgcaggcgggactccatgaaggcccctgtctgcccttccagcctttgccacaaaccctcgaacgctggctgcacactggaatcacttggggagcttttaaaagatacggaggcctgggtctgactccgtgagattctgatggaattgatctagggtgcagcctggatatctggattttaaaagctccccaggtggttctaagctgctggcacgattgagaacccctgcgttcgaccacagtgggataaacgattccgctgactgtgaagttcatccctctcaactttcgctacatgcttcaaactcgcgggtttctccgcttggttccacccagagctcctccagagccgcgctgcgttccgcccgcacgcaaatcccgcctccctgcgcctcctcactcgcagcgcccaggacctcagaaagggcctgccccgcgcgaatccccagtcgctgggacttacttggccaccaggtttacagacttcgcagccgctgagagctagagaagagcccggagagcgccatggtccggggacgccggggccgggaagcgccgtggcccgggaggacgctgctcccgcagtagcgcgagggaggggcaggaccggggcggctgcctcgcgggcccggaacgggaactggctgcgactacagccgcagccgcgcccctctgttggcgcgcccaagagcctgccggctgctgggagaggccgccgaagggcgggggcggtcaaggcagggtcccacggtgctgccattcgcccgggtctggcgcgggggggcgagagaagctgcgcgcagagggacgcccggtgcgagagggtgagcccctggccaccgcgcagggccgagtggacaggcccaagttcgcccagaggtgacacacttgggaatttgtggtgccatcgtgccaggtccctcctcgtaaaagtgcctacccagcgcctgcaaccagagccaaagcctggacatgatagggaaactcttgttaaaacgcgacacgtggtcctgatgaaatggaggttaacgtaatcaaatttaaattacactgcatacatttcaatttatactttttaaaaaatgtaagcttttcttcctatccttaaatttgttcttggcagtgtacattttatgttctatgcatatgctctaataggttgtaaaagagttttaacatgctaataaatgtccccaataaaatagttttaaaacgttttgaatggggatcgtgtccataagggatatcatgctacagaaagttgtcacttactcacactgaagaagtacattcaatcatatagccactgatgcttgtgagtattaaaattcccatcagaggctgccctctgagaaacagaaagtatgttcttaaatcaaaagtgaaagtgcaaactaaagttgataggatcaaatgtgccaacttgtgtcaggcctctgagcccaagcctgcatgtatacatccagatggcctgaagcaactgaggaatcacaaaggtagtgaaaatggctggttcctgccttaactgatgacattaccttgtgaaattccttctcctggctcagaagctcccccactgagcactttgtagaccttccacccccccggcccccgccttgcccaccagagaacaaccccctttgactgtaattttccactacccacacaaatcctataaagctaccacacccctaactccctttgctgactctttttttcgtactcggcccacctgcacccaggtgaaataaacagctttattgctcacgcaaagccttttggtggtctcttcacacggacacgtgtgacatttggtgccgaagacccgggacaggaggactccttcaggagaccagtcccctgtcctcaccctcactctgtgaggagatccacctatgacctcgggtcctcagaccaaacagcccaaggaacatctcaccaatttcaaatcgggtaagcggtcttttcactgtcttctccagcctctctcactacccttaaatctccctctatttccaattccagttctttctcctctctagtagagacaaaggagacatattttatccatggacccaaaactccagctccggtcacggactcaggaaaacagtcgtcccttggtgtttaatcactgcagggacacctgcctgattattcacgtacatttcattggtgtctgatcaccgtggggatgcctgccttggtcattcacccacattcccttggtggcaagtcaattgtgggtcgcctgctttggctgctcagccacattgcagcccagggctgctcaccaccccccttctccgggtctctaccttcttttctctgggcttgcctccttcactatgggcaaccttccaccctccattcccccttcttctcccttagcctgtgttctcaagaacttaaaacctcttcaactcacacctgacctaaaacctaaacgccttattttcttctgcaataccgtttgaccccaatacagactcaacaatggttccaaatagccagaaaacggcactttcaatttctccatcctacatgagctagataattattgtcgtaaaatgggcaaatagtctgaggtgcctgatgtccaggcattcttttacacattggtcccttcctaatct

SEQ ID NO: 586734 - DNA, 4001 bp, Homo sapiens
aaaaaaaaaatcaaaaccaactcactgctatttcctaaattatcaaggggggtggtggtgtttgcaaatcattaaggacacaaacatttgcaaggcacgatcctcactgctaggtagtttaaacctggttcaataaagaatatttgtatacatagaagctgaatatttacatacatagaactagtgcgatgtggggagaaggaaatgcaggcaattccacacagctgcctccaaccatgagctacatgcaaaggaacgctgagataaaatatgcaagatgacagcccatgaatgccttgattgctacgtcctagattctgaacttttttttttctttgaaacagagtctggctctctcgcccaggctagagtgcagtagcgcgatctcggctcagtgcaacctctgcctccctggttcaagcctcagcttcccaagtagctgggattacaggcgcctgccaccacgcccggctgttttttgtatttttagtaatgacggggtttcaccacgttagccaggctggtctcaaacacctgacctcaaatgatctgccccgcctcagcctttatctttaattcaatgttggactttatctaagggagtgctgtaaattagcttcgagttttagaaaattcactctaaaagtcgggcacggcagatgtcctcggatactcgaaagaggccttaacagatgaggtagggttaacaggtttagagacctgggctggtaaacacagaatgaagatgctgcactgtggaaatggcccttaagtccccgggataaaaatgtctctatattgcttttctcctaaactttacattatgaaaatttaaaaacatgaaagaagaccgaatagagtaacgtactcgatttactcacattcagctgaaaccattatcaagacaccaagtctgtgtcatttctgcctcacgccccattccctgtcccgttattttgaaggaaatcccagagggcctagagagtgttcacacgataccttatccgttatgtcaccgtcctccgaggaattttcactcttttcttcatcttctgcaaaacggactctcttccccctccttttctcctgcgctcccttttccttttcttccccctgttcctcttctgtatcctcgtcgtcgtcctcgctctgcgcttctgcttcctgcgccttcttttccttttctacgtctccctcctcctcctcctcactttcgtcctgggagtcactctctaagtcactttcggggagtgtctgtccggcatcttcctcctcctcaccactgctgtcgtacaagccgctatttttcccagactccagggctcccagaatatagtcaagaccgtcgcgtgcaaagctcagcggcacggagctgctgccgtccttctttttgcgcttgttcaaaccgaggcaacgctccagctttcggatctctcggtcctcctcctcgttcgccgctaaaagcgcccgtttccgggcagcggcggtggcggctgcggagggtctggtctttgcggtggcggccgtggccttggccttgacccgggacggccgcggcttcctgggaggcgaggggtcccgactaggggctgggcgggcgcgctcctccgtgtcctgccggtgaccgctggcttcttcggctccgcttcggcctcccaggccgggaccctgttcggggcccgccgtcctctgcagccggcgtgctttccgcaggtgccgcttctccttcctcagttccttacggctttttctccctcccgggcgaaagctcaccggggcgccgcgcccctcgcaacccccgggagcctcgccttccgaagtcgcgtgcacgaactcctccaccgctagcttcagcctcttcagggccttctccccaccgccagcaggaccgcggcgcggcccgcgcccgcctctgcgcttcatgcggaccacgcgtccctgggagccgcccgggccggcctctcccgcgctcctggacgccgccatctttcgaaacgcgtggacgcacgacttccggccgaggcgggacttccggggaagaggcggctgcgcggggcgggcgggcggcgccccctgctggccggagggcgacagcgtgcagagctgcgcggagccgggtgcgggggcagccgggcaggtggcgcccggggcaggcgcgcccgcgggtgggcgccgcgtggacgtcaggctcgcgatgagcatggaggtgccttcacatttaaaagggaaatccggccgggcgcggtggctcacgcctgtaatcccagcactttgggaggccgagacgggtggatcacctgaagtcaggagttcgagaccagcctggccaacctggtgaaacccacccacccccctacaaaaattagctgagcgtgggggcacgcgcctgtaatcccagctactcggaggctgaggcaggagaatcgcttgaaccacggaggcggaggttgcagtgagccgaaatggcgccattgcactccagcctgggcgacagagcgagactccaaagggaaatcctcgcgtatgatggaggggagactccgcgcgggtcggcgcggtgccggaggttggcggcggcgacgacgctgggatgcgcgggccccaggttcgtgtccgcccaggacccaggaatgcgaccttatttggaaatagggcctttgcagatgtggtcgagaggagccctcgtgggttaggactggccccagagccagcgttctcctgagaagcaggctctggatacggaccagggagacgcctgtggcccccaggcggccgaggacccctgaggagccggccctgcccaggctgggtttggacgctgggccccgagggcagagcgtttgaggttcctctttactgggtaacttgaaccgggaagcgaacgcagaggccgcgcagtttgcgtctggatttttgggaagcccggaggcgcaggagcagcctcgcctagcagtgagctgggggaagacggggctgctgctgtggggttctcggcctgaccaggggccgcttctcttcccggacagcttcagaagcttcatttccacagagttcccacccttgacttaatttaatttaatttaattttttttcttttttttttcttgagaccgagtctcactctgttgcccaggccggagtgcaatggcggaccaaagtgctgggattacaggcaagccaccgcgcccggcccgtccttgactttaaaatgatttaatttttgtcaacttgtcagctcaaaatggcatcttgtcatttagttcctgatgagagtgggtgtctttgttcactggccatttgtatttcctcctctgtttatggcctttgtccattttccttataggttttacgaatttttttaaatataaaatttatttaatataaatttaaagtagagacagggtctccctgtgttgtccaggcaggtctcaaactcctaagctcaaatcctaaagtattgggattacaggtgtgagccaccacacccggcaaggaattctttacaaataaaaaattttgaataatcctctgtatctcctatgtgcaaatattttcctctctcaaatatttaaggtactttaaaaaaataagtaatttaatttttaataagcaatatactctatgtacagggtccaaaattcaaaaggtacaaaaagatataaatgaaaaggtcaatttctgtgctgtgcctgtccacaagccacccagttctccttccatgaagcagcaatatatcattctgaagtgatcttcccaatagattctatactcaatgaagcataaataggtgtgtgtgctgtgtctcatgagtgctagtttacaaaacactgttccacatcttgcttttttcatttaacaatgtatcttgtagaccatcctgcagcagagggagggaccaatggaccttccctgccaccatcatagctgcctggattattgcaaaggcctctgtctggtctctccactttcatcccctcaacccttcagtctgctctccacat

SEQ ID NO: 586735 - DNA, 4001 bp, Homo sapiens
tcagtgacgcacgcttcccggggccgcaggtcagcagagagactagggctgaggcagggtcagccggccagggaagagcttgatgccctggtgggagcatgggggactagggaaactacagttcccagaatgcaggtggggtacaccagcactctccaggcacttcaggccagagtgcatgctggggtttgtagttctgtgccatctgaggggctggagaaaggccactagctgggcatctggtccacaggggtcgaagcctcgtgatttcgagacctcagagactgagagaaagtttaagaaagaaacggaagctgagagactgggagaggcagagactaggagcagcagacagacagacaaacaaacaagaggatttgtgttggccagactcctctgaaaagcagtggaggataaggttggggtgggcctgggtggggggccggcaggcggaaggaacgggctgtgctcagagctctggggtcacaccaagaaggtggggtctgccagttttggaggatggagggtgaaggggcctcataagctgctcctggacactagtgtgccctgctgcccctgtctcaggaggagggagatggaagggcggcattcagcctgggctttgtcccatgaccccaagcctgaggccccaccacaccccaccacctcgccttcccagtgaggcaggggatgggatccagcccctacttttcaggcatcttctaccatgctggaggagacaacagatcccaagtctggcttccatattaagccaccatttgaaatgtgcatgaccaaggatgactcattttcctaggtcccagttaatggagctgtgactggcatcctcagggtcaaggtgacaggcagcatcagatgctgacatccttctgtcttttttttttttttagacagagtcttgctctgtcacccaggctggagtgcagtggtgtgatcttggttcattgcaacctctgcctcccggagtgattctcatgcctcagcctcccgaggacgacaggcacccaccaccacgcctggctaatttttttttttttttgagacagagtctcgcttttgttgtccaggctggaatgcaatggtgctatctcagctcactgtaacctccgcctcctgggttcaagcgattctcctgacccagcctcctgagtagctgagattacaggtacccaccaccacgcccggctaatttttataattttattagagacagggtttcaccatgttgaccaggctggtctcgaactcctgacctcaggtgatccacctgcctcgacctcccaatgggctgggattccaggtgtgagccaccatggatggccattgtcttcttgcctgcaccactggctgtggcccgtccctgtggccacctgacccctcccaggccttccagtcccatctgggctccacactctgctagattcttctggaaagcagggcttaccttacgctttggcactacccaaaaccctcagccaagaacaaagccactccagcacattggcctggccctcattttccttggtgcactgcttgaatcctctgttctagacaaatgggctttctcgtgtctccctaatggtcctgtgcttccctgcccctgggccgctgctgtgctgttccctccacctctcccttccgcctctgacaaatgaaaatctttttcttccttgaggcccagcctgggcagctctggaggtgcaccacccaggcctccctcttagagagcaggtacctgctgcagaaggtgctggtggctgacagcttccagatgccagccttcagtccaaggccatgtgcttccctggagtcttgtgtaggatataataaattcctcttctaaggttttagcctgtaaattaagtacaatgagttctgagatcctctccaaagatccaatgcatcagtatgttcagctttgttcttcatcttaaagtttaactttcatgttctcttcgtctccttgcccctagtttcagtaaacaaccccctcctagcttctatcacctgctccgaactgagtcaccactggtcacctgctctgacctgagtcatcctgagtcacctgttctgtgaccgtccttcctgccaaactacttaccctgccaatccggctcttacccctgctctctttaaaatagccagtaacaattagctcagacggtgtggtccaaccctagccaataggggaacaacacagctgtaggggctacctgccttagggataaaaaccccttcccttcccttgttcaggtgtgctcttgccattgctccatctgtgagatgcacccttctatagaagtaaaattgccttgctgggaacatttatatctgagtgctatttcttttgtggcaccgaaaatttatttctaacacttagacagtaactgagccccggggcgtctgtgggcgtaacatcccccgctgggctgatgtgaggcccttcttcttcttccctcctctgcaggtgtgagcctggcattgtgggcctgatccttcccctgcccaactcactcctgctcccggtccctgttatctttctcaggcattgcccgcagtattcctcttatgcttccaactcctgggactctgcttcctgaaggacccaaccaacacagtcgcaggatgactcctctgtgaggtcttccttacgtccccttctccatgatctctgggtggctgtcaccctgtccccaaggccccggggacagctctttctctgggccctcctggtcgtggtttttgggcagcttgctctgtaagtgtgggttctcacttaaatgaacctgtgtgctctgaacctgtgtgctctggaagacacaggtcagttcctctctgtggggatcctctgctgggttgagctcctgcactgagtgggattgcttcatacattggcttgttttgttgcaaatgtgtgcagccgcctggggactggaagctgtgctctggaggcaatggagagggtccactgagaagggaattggctgaggctagatgggtctgtgtgggcagaaagaagtcagtctaggtgaaggggaggagtgcaagaaggagcactctgtggccacagggaggatgggttacagttcagtacagccagcactgaaggctgagggtcacagggaggatggggtccagttcagtacagtcagcgctgaaagctgagggtcagagtaggcctggattgggtttgaattggggcagaggatgccatggcagggtcttaagaaaaggaggaaaaaaaaaagttaaacagacagaaaaagtcagagatgaatgctctctggacaggggattccctgcttcccctttcttgggccgtggccagtgttgtccggagtgtcctgccttccatcagggtgctctgatgagaacagttgattcccccgcctgtcggaggaggcctgccgtccccagggctctgcctggtgctggcctgctctatgcctgcagccctgccaagaatgatgcccatgcatcttagtggctgactgctcatattggtaaccatgttttaaagaggactttccgaaaaaacagttttcaaggttggagatttggtgttcggctgaaagaatttccatcttcaatcatgagatctgaagctgaatgggctttggagatgatctggttgggaactgagcccccttgtccctgacagtggctgtgtttccgcctcggggagggctggcccagaccccaggggtaaggtgacagccttctgtgggtgagtagggatccctccctggggagggctgtgccctgtgccccctgccccctccataatgccaaagaggcggcaaatcttgcccctgccttccctctcagaccagagtgctctgcagggctgggcgggggacgccttgaccttggagggctgtgctgggaagggaaggccttgggcctggggtgtgtgcatgggggcctgggtggtgagggcaggggtgactgagcggaagtccctgactctttatagccca

SEQ ID NO: 586736 - DNA, 4001 bp, Homo sapiens
aggggtgcaggggtgggtcggggcagagggaggagggggtgcaggggtggaatggggcagagggaggaggggtgtaggggtgggacgctggagagggcgggagtgcagggtgggacggggagagggaggaggggtgcaggggtgggagagggaagaggggtgcaggggtgagatggggagagggaggaggaatgcaggcaggggacggggggagagggaggaagggtgcaggggtgggaggggggaaaggggtgcaggggtgggatgggggagagtttgagccagggttgggggtaaggctggaggctgagggtcacccaagtcccgtgcatgtccctcaactcctctggttcttcccagtcctctcctctttttggaaacaagggaccaattcaaagaagggttgagcttccctctccggccccatctgaggccaggccttacccaccctttccctggagacgatggggacagggcatgccggccttacctgctgcgcctgggcgctgagggtgtcataggtgatgctccccacctcccagttcttcacacgagggaacttgggcccctctgggggctgggttagcggggagctcggggggctgttgggagccagggatagggtcatcaggaagggtttgtttcctttcagccttcccagatgtcacccggaggcccctgttacagcactggcgatctcacagcccacctgccgcatgccttctggcgttccccatgccttaggagctagaggcgagctgtgcctccgtttatagaccagggtcctgggctgcaggggctgctggtgctgagctcctgagcccctgacccgaggctaagttcgcatcccacctgcagcgcccacctcacctcttctggagatggggtgtccaccccccgcaaagctgctataagccctaccctgagggggacagagcctggtgcttgagtggagggaagccctgcagggattcctcagctctgatttccctccgcactcacaacccctcctgacagcagccccatgtgtgaagggaagcctcgcaggccttatcacttcctcccagagccaccagcggcagggaggaagggagggactcaggccaagggtgcgcctgagcagcagggccccggccctcagccttccctgcatagctgcctgcagccccagcctgcccccggcctggcaccccaccaggcctccgggtctttcctccctcctgggacctctacccccgggaggactcttgtgggaactgcatggtccagttttcgggtgacagccacgaggagagggggctggagcaggggaaaaaagcctggtggctctgtcttctcagcctgcttaccccaagggcccgagtttcctgcccaactctctccctcttctgggagaccccactttctcactcctgtaaccactgctgtcagctcctttcttctccagctaaataatcatcgctgctgttgaaggcttgctgtgagctagaaacttacttccccatggagtaagtattgccatatctcgttttatataaatggaggttcagagagattaagtaacttgctcaaagtcaaacagctcctggcggcagagcagcattcaaaccctggccagattctatagctggcacccttactcccagctttcacctgccgactctgatcctggtctcctttctgagcctcccagactgtcctgttctatgcacattaatagcccttttgcatttgtgacctggccctcccgactcagctacaagttccagaccttcccagccccaggcttcaggccttgacaccacccttgttgcccacctgctcctagctgcctggcccttacctgtgttctggcgctggtgggagtagggatgctggggcccggctgggctcaggggccggggtggctgggccctgcttgccgcacagcccaaggcccagccccagccccaggccgcagggtggcccaggctcctgggccacgctcttcaagttgcccatgttactgtgcgtccactctgctgcctgctccagcagagccctggccttttccttaggaagagggaggggaccgagaggagggggcagtgggagggggctctccagtgctggccctcgccccgcccctatcccatacacaatgggacaggaacaagcccggctgggaggctctaaagcctcagctccacgcccgctggcctgaagggtggggggccggacgcctgggttccgctgtgaggactgaggctgataagtgggagcccaggtgtccagcagagccctggggctgcagcatgggggctggggcattggggagtggcagggtagagccaccagggggtcataaaggtccttctgtgatgtggcaccagacggaagggccttcggcctcacccctgtgtgcctttccctggagggttgggcagaaggtgagcaccgtttctgtagcaggggatggcagcccacactctcagtgaccacagggacctctagggtcatgcaggttctctccttcacctccccccatacatacaagaactcctggatccccacccttgagtccttttgggttcttggggatagaggcccagcaaggatgtagtgactttttgtccttgagtctgacattagggtatcccttcccctcccagccccaatttcctggaacccccacacccccatgactcaagtgggggacacaaaagagcaggaagctgccttccagtgcctccacccccaccctgtcattcagtgacgcacgcttcccggggccgcaggtcagcagagagactagggctgaggcagggtcagccggccagggaagagcttgatgccctggtgggagcatgggggactagggaaactacagttcccagaatgcaggtggggtacaccagcactctccaggcacttcaggccagagtgcatgctggggtttgtagttctgtgccatctgaggggctggagaaaggccactagctgggcatctggtccacaggggtcgaagcctcgtgatttcgagacctcagagactgagagaaagtttaagaaagaaacggaagctgagagactgggagaggcagagactaggagcagcagacagacagacaaacaaacaagaggatttgtgttggccagactcctctgaaaagcagtggaggataaggttggggtgggcctgggtggggggccggcaggcggaaggaacgggctgtgctcagagctctggggtcacaccaagaaggtggggtctgccagttttggaggatggagggtgaaggggcctcataagctgctcctggacactagtgtgccctgctgcccctgtctcaggaggagggagatggaagggcggcattcagcctgggctttgtcccatgaccccaagcctgaggccccaccacaccccaccacctcgccttcccagtgaggcaggggatgggatccagcccctacttttcaggcatcttctaccatgctggaggagacaacagatcccaagtctggcttccatattaagccaccatttgaaatgtgcatgaccaaggatgactcattttcctaggtcccagttaatggagctgtgactggcatcctcagggtcaaggtgacaggcagcatcagatgctgacatccttctgtcttttttttttttttagacagagtcttgctctgtcacccaggctggagtgcagtggtgtgatcttggttcattgcaacctctgcctcccggagtgattctcatgcctcagcctcccgaggacgacaggcacccaccaccacgcctggctaatttttttttttttttgagacagagtctcgcttttgttgtccaggctggaatgcaatggtgctatctcagctcactgtaacctccgcctcctgggttcaagcgattctcctgacccagcctcctgagtagctgagattacaggtacccaccaccacgcccggctaatttttataattttattagagacagggtttcaccatgttgacca

SEQ ID NO: 586737 - DNA, 4001 bp, Homo sapiens
tgacagatagcaccaagatggtcagaggccacgaagccacccacgtgccccagccctggaagaactggccaaggagggtgtgggtggagaagctgagcttgtcagagaggctggtgcccttcttggggtccaccatcttgcttttgtccctggcgggggccacacggaatcccacaagcaggatggtgaccacagcgaagacagagcagaggatgatgatgaggaccagactgcccggcatctggcccaggtagaaggtggagtcgagggcctgggggcgggctatggcaggacaggatgcagcacagtcttggcaggagcaggtcgccacgtcgtcaccttgggactcattgcaacgtgcaaccccctcattcagaggctgaatcccactccccacggcctggccaggctccaagaggtggaaggtgatgtccagtggggccagaccattgcctgtgtctccctggaagttgagccagcgctgggcattgcaaagggcagagccatacacgccacacatggtgcccacagccagcgtggcagctgcagggacgcgcacacggctgcaggagtcatagctctgctcggcaaagctatgctggtagaaggcctcataggccaccacagctgggagttgtccagcccctagctgggccacgcgggtcacattgatgaagaggctctgattggggctgcacgtgttgtggcagtgcaggttcacaaaattgtcagagcaggctgggcagcgggtgaggagggccttggtgatcgacagactcgcttccagtgataccagctgcttggcggagcagcaggcttgggtgttggggccggtgtagaggcgggggcagatcttctgtaataggatcaggtgatcacctgtgatcttgcgggccggcgtgttggacaggcaggacacgttggagagtgtcatgaggcttccagacagctctgggttcttcccacattcgtcatagaaggcgcagtagccaggctggtggatggttgtgtaaggctcactctgggcctgcagagcacagcaacatcacgcgtgggccctgacacagctgggtgccatccaggcagcaggcagccagggagggtgtgagggtaagaaggacatggagcaggggcagggaagcggggagtgtggggagtaggaagcctcctggaggcatgtgccagccagccagtgttggagtgacaacactggcctttcttcctgggggtggcctgatagacctgcagcttaggaaagtcatgctggagaggccagagatgggtaaggaggcaaagctgactccaaggtcccgggctctgcccacgtcaaagtcagcctgagtccccacactgtacaccacatccagaggccagggtctctcatggagagtctgttcaggaggccccccgactcccaccaccactaccaccacctgcttgaggccaaaagctgtcacccacctcccagacacaaagtaagcgaggaacttaagaggtgccagcgctggatcttctcccagcctccagagtgctcagtcctccctaggtgatgctcaccaggtaaccccatcccagcacctccttgcctcagacctccctcaactgcaggcctggaccccacagtagggccagtgacaggagggacttggagcaccccagtccagcagcctctttcacccctgtgtgcattcaagcctgtaacctggaaaccctccacctgcacccctcctctgtggggcctggcatccctcatgtgtccagagacttgcccagcccgcaggccctgaggctcccttgctgtcacccagtaacgctcgcctggtacacggctggccccagggtccctaactggaggccgcaggggaggtggagccaagccctgggactcaccaagcgcaggagcagggcccacagcagccagcccctcaggccggcctccgccatcccaggtctgggaaggggtcagcggggagccaggccaggcctcaggaacagccaagggctgaacacacattaaggcagcctcctccccttcgatgacaaccctggcctgactgggttagggaccaatgaggctgagccctgctggttaatgatccaccactcccactgtttggccccagtccacaggcccccgctttagatgagcctcatcacgcaggtgctagggtctccactcacttcccaaagcgaccgaagccagagggctgagtcagctaggggagagaccacgctattagcccctaacactgctggagttggtgccagggcctggaggcacagatgggaccaggcactggctgggacccggcctcaggagctcagcatggccgaggaacctccgcaccctccctggctcagcctcagaccccagctctgccctaccccctcttgggaccagggccagcaatgggctcagaggaaccctctgcactgtcatccctagcaactgttgttaattaatattaacagcctgataacggaggggcaggcagggtggagtgacgcagtgacaaaagtcccctcctccaggaagcaaagggaaagaacagctcactctagggcctgacagttgacagagaccccagatagtggaagactctcctttgctcactttgctcttcatcccctcttccccccgaccttctccctcttgtcccttgcccaggcctgtcccaccggtcacccctagcaagggacagagcatggctgggagccttgagcagcagccctgctccacctgggcccaggggtgtggtacacactttctgctccctcctgataggaatcttcaaggcctaccttgggttctcactatcaccaggatgggccatgacctttacccccatttggtaatgggcccccattaccaaagctgagctgcagataagggcagcttgttgggaacatctcctgcgtggccacctactggagacagctgcaggaagggacctgtctctagtgttctgtggacccctgcctgattcacaggggagccacccagcctcatgcaggagaagacagaggctgagaggaagggggccaaggcagggtcaggctgacccctaagttctcaagacagccatagtggagaggaagacagtcagcagccaaggacctgcccctgtgagtgacagctccatccagcaccttcccagcactgctcccaagtccctggccggcagaggcggacaccccaccacccatgaagctgcctctctaggtcctctgttcccggtgttgtcatctagttcctccagaaacagatcctgaaacaaggatcccagtgcaaagagtttattggggagatgaccccagatgacagcagtcggtgaatggggaatgagccaggggatggaagaaagctgaccagaatgcatccaagagcttgctcctgcccccagggacctccgggaactggtggggacgtgcccaagaaggtcccctccaaggaataaggacacagacagctttccaccacattcatctgtcactggtagaggacattcctggaagatttcgccccagcacgtggcgggcaccttcagtgtcaaagggccttaggcagggccgtgggcacttgcgacaagaagacactgtcggcatgcacagagctgtgtcagaacaaagatatgaaaggcccaccctgcctttcatatgtttcttcccatgggggctgtctaggctaagcccctggagcccagctgtgcccagtctagcaccacagagagatagagtccagctatgtggtctcctggggtcatttgtgaaacacacgcagcataacagcggcacaatccggctcggaatgacagtgaaaatttcacacccgatctcccaacccagctgccggtgcctctggacacacgtgccgagctgtaaccatatgatatgtacatgcatcctgctttttctcttgacttttcacataaatcctccctgttgccttcaatctctgatcagcacgtccgtgactaggttatggtccacagaacgcgtgg

SEQ ID NO: 586738 - DNA, 4001 bp, Homo sapiens
aattcctgtctttctgcttttctccttgtccagtggtccagccgttttgctgcaaacatatcaataggaatcagctagagatgctgtgattctctttagtgtctggcgatgatgttgctaggatagagaggacaaacactcatagagagcaaggtgggatttgtttcttcacatattccaaatatccctgtaggtgctatattcaaaaaatggcaaatgagatttcagctgagattgattcttgccagagtctcagaataaccaccttattgctgattttattccctttgcaatggagggcctctcttcattctgcttgctatcatgttctaagaatatcaaagaggctacacaggcagcaatactgagtggagtcctgtgcttcctgggtgcacacagcctgccaagacagactctctgggtctgcaggctgatttcataaaggggattattcagtcgacattaagtggcaacaaactctaattttactttctaagctacatcgtggagctgtgcagctgggctgcgtatgtgcatatgcattaggaggtgattccaagggacagggtttcactgaagccagtggaggagtagtttgctcaggttctgctttgctgcaggatcattagggccctggaagtttaagtctgactcctgggacagcaccctgctgaaagttttattctgaatatttgcaaaagaagtgaacttccagtagggaggtggatgttacagtaatgctatctcattgtgtaaaaaccaaatcatttcaagaacatacagaggattaacaacaacaacaacaacaaaacccaacaaagcaacaactagaatctttttgaagtattttttcttcagtggaaaggaccagtttgagacctgtgaattattgcaatgactaaacatatcgttagacaggtgtgaaataacctgacaacccagcattctgaggcaagaagcaggaaactgttcttttcccaaatgtgcggttcatttctgtccacaagatcttgttgcggaataagaaacaatacagtattagcttaatgaagatccttcctcagtgtggcccttggatactttgaaggtgaaactcaccaaactctctgtccttcatttgttctaggaggtaatttgttgcaaatggtggcatcatcaactaccctcaaagaaatatattcctcactgatgtttaatgaaaaggatcatcaaagaaagtgtcgtccttcctgccttattcaatgttgtttctcatcatatcagtcactgtcctggggattgtgagctttccgcatctctggtgttcctagcaaaaaactcatagctctaacccctactagaaacagacatttcaagtactgctataggattaattaaaagtgctttcacctaaggaaagggggaaagtaaaaatcatccactcataaatgttactcacgattcacacatttccagcagcatcagaaagaaaaacgtcacctgtattcctaagaaactacaatctaggtctctgcacactacagcttgttgttttagcacttcagacttttaaaaatcctttttagtaaagaaaataacactcattcacaatactggctatgatacttcaattgacactcttaagttccagcagtctcattgttataagtcagtgttcagagtcgcaggcaagaaacttaccttaaaggagtagtagaaggaaccccattcctttccttccaccacttcagtaaaagtcactgtttcagtgcaagccactggggaagaatccagcgtctgcccggtcccactggaatcgaagctgccctctgtgaagttggctggcatggctcaggcggggttgagcctcactgtccttgctcctgcagctgagtgagggagtccagcttgcctcctgagagctgggcagcagctgcagctctgctgaacggaggcacagagccctccctgagcccacctcactgaagagctctgcctgatgacagggaggatctacgtgctgctctctccttggcaattaccaccaggtagccagcatagcacaaccctcatcaccccacagtcccacccagggccagggccccaccccaagagcaaggtggagctccccatagccatcgacatggctccctggatgagacccctgttctgttttgcttttccttacttccacggtggacccccacttctgctccagcttcaacaataaaggaatttggactaatcagtaggtgcatgaattcgggtcatgtttccacttctgaaatcaaattataattatgcatttgtttcagctgaggttgctttctgacttaaagcctcaccttgccatctactgtgtcatgtgctcttatttccgtaagtgtaggcaaatagtacgtttgtatttcacacccttagttctatctaggtgttcacagggcggttctcagagaaacatgaggtctgtgtttgtcaataagctacaacaccttgtgatatgactgggaggggcctggtgaagattcttactgctttcagtatattcacctcagcttctacctaggaccaatactcagggcgagggtagaaaggaggtaatgcagcatcctgggcaccacagacagggctaggcgagaatactaacagctattcctgtttcacaaaaaacctgcaaagcacatttacacgttctttcattcagtttcccaaacaaccttgtgagataggcagggaaggtatctttatgttctcctttatgctagcagagagtggctccaataggtgaaatgacttgcccaagatcccgcagctgctgatgtaaatgagctgataacccatctccagaacttcctagacagtggtgcttttactgtaacagactggtttgcatcaaatctcaaatgtctatggggcatgaaggtaacatgaatgagggtagcaggccaggtataaaacaatgggaactaagctgcttatatgacaaccaagcacaatacctgattcctcacattgagaacactctgtgaaccaaccaggtccagccactggtttatggcacctggaataagaggtagtagctttagtggccaccactaaagaacctggcccccatgagatctcctggggaagctttattataaaccatcgagccccaaggagggcacagtgctctagcaatgagaaggcattgagtctataatgaagggcagcaaacagaagtgagttgtgtagaaaactggataagctgtggactcttaaggaaaggttcaaaacaggacaacaactcaatagcaaaacaagtgcagcatattccaactaacaaatgagtatgaagataggctcaaccatattaaaaattaaggaaaataactaaaaccagtaagaatgtttacctattattatagtgaaagctagcgtgtggctatccccaagtgctgacaagattgaagggaaacgggtgtacatctttacttctggtgagagttagttgatgtggtaatttttgaaaagcaattcagcagtatttagtaaagctggaattacatatcctctaatgcattgttccatttctagatgctaataatttttcatctctatctgggttacttacatatgctcaattcacataaattctttgcactacatacttaaaacatatgcacttttctgtaggtatgttttacttcaagaaaatgtttataagacaaaatctgtgaggaactcctgggagaaggtagaagctggttaggtcacagtgtggtaggggcagagtgagagaaagtggcagatgccatggacagagaataggtggggagagagagctttctggttgtttccttttctctccattcatgatccagatagaccattgtttaacctgtggccacccaagagaaacatttatgtatctatacaagcagtcatgcaaaatgatgccttcgcaaagtattaaagaaacgtatcagaagcaacctaaatattcatgatgtcaaaatcaatgaatcatcccaaactggaaa

SEQ ID NO: 586739 - DNA, 4001 bp, Homo sapiens
tctctcaaataatgaatctgagcattctaagctcctggccaaacacaattcctgtctttctgcttttctccttgtccagtggtccagccgttttgctgcaaacatatcaataggaatcagctagagatgctgtgattctctttagtgtctggcgatgatgttgctaggatagagaggacaaacactcatagagagcaaggtgggatttgtttcttcacatattccaaatatccctgtaggtgctatattcaaaaaatggcaaatgagatttcagctgagattgattcttgccagagtctcagaataaccaccttattgctgattttattccctttgcaatggagggcctctcttcattctgcttgctatcatgttctaagaatatcaaagaggctacacaggcagcaatactgagtggagtcctgtgcttcctgggtgcacacagcctgccaagacagactctctgggtctgcaggctgatttcataaaggggattattcagtcgacattaagtggcaacaaactctaattttactttctaagctacatcgtggagctgtgcagctgggctgcgtatgtgcatatgcattaggaggtgattccaagggacagggtttcactgaagccagtggaggagtagtttgctcaggttctgctttgctgcaggatcattagggccctggaagtttaagtctgactcctgggacagcaccctgctgaaagttttattctgaatatttgcaaaagaagtgaacttccagtagggaggtggatgttacagtaatgctatctcattgtgtaaaaaccaaatcatttcaagaacatacagaggattaacaacaacaacaacaacaaaacccaacaaagcaacaactagaatctttttgaagtattttttcttcagtggaaaggaccagtttgagacctgtgaattattgcaatgactaaacatatcgttagacaggtgtgaaataacctgacaacccagcattctgaggcaagaagcaggaaactgttcttttcccaaatgtgcggttcatttctgtccacaagatcttgttgcggaataagaaacaatacagtattagcttaatgaagatccttcctcagtgtggcccttggatactttgaaggtgaaactcaccaaactctctgtccttcatttgttctaggaggtaatttgttgcaaatggtggcatcatcaactaccctcaaagaaatatattcctcactgatgtttaatgaaaaggatcatcaaagaaagtgtcgtccttcctgccttattcaatgttgtttctcatcatatcagtcactgtcctggggattgtgagctttccgcatctctggtgttcctagcaaaaaactcatagctctaacccctactagaaacagacatttcaagtactgctataggattaattaaaagtgctttcacctaaggaaagggggaaagtaaaaatcatccactcataaatgttactcacgattcacacatttccagcagcatcagaaagaaaaacgtcacctgtattcctaagaaactacaatctaggtctctgcacactacagcttgttgttttagcacttcagacttttaaaaatcctttttagtaaagaaaataacactcattcacaatactggctatgatacttcaattgacactcttaagttccagcagtctcattgttataagtcagtgttcagagtcgcaggcaagaaacttaccttaaaggagtagtagaaggaaccccattcctttccttccaccacttcagtaaaagtcactgtttcagtgcaagccactggggaagaatccagcgtctgcccggtcccactggaatcgaagctgccctctgtgaagttggctggcatggctcaggcggggttgagcctcactgtccttgctcctgcagctgagtgagggagtccagcttgcctcctgagagctgggcagcagctgcagctctgctgaacggaggcacagagccctccctgagcccacctcactgaagagctctgcctgatgacagggaggatctacgtgctgctctctccttggcaattaccaccaggtagccagcatagcacaaccctcatcaccccacagtcccacccagggccagggccccaccccaagagcaaggtggagctccccatagccatcgacatggctccctggatgagacccctgttctgttttgcttttccttacttccacggtggacccccacttctgctccagcttcaacaataaaggaatttggactaatcagtaggtgcatgaattcgggtcatgtttccacttctgaaatcaaattataattatgcatttgtttcagctgaggttgctttctgacttaaagcctcaccttgccatctactgtgtcatgtgctcttatttccgtaagtgtaggcaaatagtacgtttgtatttcacacccttagttctatctaggtgttcacagggcggttctcagagaaacatgaggtctgtgtttgtcaataagctacaacaccttgtgatatgactgggaggggcctggtgaagattcttactgctttcagtatattcacctcagcttctacctaggaccaatactcagggcgagggtagaaaggaggtaatgcagcatcctgggcaccacagacagggctaggcgagaatactaacagctattcctgtttcacaaaaaacctgcaaagcacatttacacgttctttcattcagtttcccaaacaaccttgtgagataggcagggaaggtatctttatgttctcctttatgctagcagagagtggctccaataggtgaaatgacttgcccaagatcccgcagctgctgatgtaaatgagctgataacccatctccagaacttcctagacagtggtgcttttactgtaacagactggtttgcatcaaatctcaaatgtctatggggcatgaaggtaacatgaatgagggtagcaggccaggtataaaacaatgggaactaagctgcttatatgacaaccaagcacaatacctgattcctcacattgagaacactctgtgaaccaaccaggtccagccactggtttatggcacctggaataagaggtagtagctttagtggccaccactaaagaacctggcccccatgagatctcctggggaagctttattataaaccatcgagccccaaggagggcacagtgctctagcaatgagaaggcattgagtctataatgaagggcagcaaacagaagtgagttgtgtagaaaactggataagctgtggactcttaaggaaaggttcaaaacaggacaacaactcaatagcaaaacaagtgcagcatattccaactaacaaatgagtatgaagataggctcaaccatattaaaaattaaggaaaataactaaaaccagtaagaatgtttacctattattatagtgaaagctagcgtgtggctatccccaagtgctgacaagattgaagggaaacgggtgtacatctttacttctggtgagagttagttgatgtggtaatttttgaaaagcaattcagcagtatttagtaaagctggaattacatatcctctaatgcattgttccatttctagatgctaataatttttcatctctatctgggttacttacatatgctcaattcacataaattctttgcactacatacttaaaacatatgcacttttctgtaggtatgttttacttcaagaaaatgtttataagacaaaatctgtgaggaactcctgggagaaggtagaagctggttaggtcacagtgtggtaggggcagagtgagagaaagtggcagatgccatggacagagaataggtggggagagagagctttctggttgtttccttttctctccattcatgatccagatagaccattgtttaacctgtggccacccaagagaaacatttatgtatctatacaagcagtcatgcaaaatgatgccttcgcaaagtattaaagaaacgtatcagaagcaacc

SEQ ID NO: 586740 - DNA, 4001 bp, Homo sapiens
gatggttacacaaagccaaggagctttcacctagaaatgaaaacagcccccaagttccggtctggcaccaaggtaaataactatgcatgcagagatgtttctggaaaatgacagatctaaaacgttgctattctgaactccagcaatctttgtttttaatgctgtttctaaatcctcacttcctatttctctttctcccctaccatcatgtggttctggaggctgtggcaggctgcctacccatgagttcatggcaagctatttacctttctccacaaagtgttccaaattgtgaaatgcacataatgggacctgcctcatgccattcattgttccaaggattaaaaaattaaatgatgtgcctgactcatatttagtgctccagaaatgttagctgttagcaatcacaatgaatcaggggatatacagatgctggaaatactgtattcagccctcacgccaaaagaaaccctagagtcatttttgcaataattaccacctgtaatttaaacctagttttgctgagaagtattttcacaaaggctattaacagcagtgtccacacttcttaaaaagggtggagcctaaagatgaaaaataattgaagatttttctctcaaagttccaaactgcacgcattttcagagatagagatgagacggaggcgggagcggggggcgggggggggggacggagggggagggggggagggggggagagagagagagagaagggaatgaggtcccttcccctgaagcaatccggaagagcaccttaaaatggtccaacttgcagacacgggagtctttgaagttaaccagaggttgcccctctaatgcgcgctctggggtcgccggtgaccccctgcgctcgcctccctgcgacctccgcccccagacttccgccccctctagctcagcctgacctgatttaaagaaagaaacaccacatgcccggggcagctgacctcccgcggcagcctcgcagcaacccgcacggcctgcgggagcgcatcccggctcgcggagatttggagatttgcaagaggatagaggctaccgcgtccccgggtatttggcgcccgcggcttggccgtctgggttcgctagcccggacctcgggaagtgctcggcggatcccgctggcagtcccgacgcgcgggggtggaatttaaacgtttccttccagcaagagcagcggtgtgggaagggataccacgcaggggagttcccgagcaggatctagatccccgcctttcaccctcaagtccagctcacccccacggacgatcacaccctccccagggccaggccccctttccccatcctcccgagtcttccgcccccgactcgggagcgtccccattccaggtcccccgcgctccccgcgggccgctacctcgaggctctccaggcggtccttgagggtctgcagcgagcggctgagctgctccacgacgtggccggggtcccgcggcaggtcgcccatagtgtccttgcccgtggcccccgcgccgcgcgccttgccgcccgccagcccctcgcagcgcgctagcttgcccgtgagctcgcggatggcctcgcgctgcgcgcccagcgtctccttctgctgcacgacggtctcgcgcagctgcagcaccgcggccctcagctcctcctcgggactctgcgcgccgccctgcatgggcatcgcgggcagcgggcagccggcgtgcaccgcctctgggggcagtgccgtgcacacgaagcggctaccgggcgccgggctgtcctgggccccagcggccacggcgagcgccacgctggcggccagcagcgccagcatcccgccgccgctgccgcgctcagctcggcatgggcgagcgggcgccgtcggggcgctccgcgggaggcgccttcgctgctggcagtagccgcgctgtcgtctcgagggtcgcgtgcaccgcggggcagaagtctcctgccgtctcacagccgcacccaccgcgctgctcggcactctggcctgccgggtccgcgcgccctttcttaagctgaggggcggagggggccggcgtgtggggcgcgcgccacgagctctgattggctcggccgggtgcgcgtcacgcagtgggcggagcggggcggggcgggggcgctttccgttgcgcgcctggcggccgggcgggagcgtgggccggagcctgaggcgagagcgcgaggtcccgggctctgcctcaggaaaggaggcctgaggtggaaaacgacactggggctctcgagagcctcggctggccgtgcccaggcgcccctcgaacccacccgaggacgcgggcgtcacaggctgaggagaaagtgggaacccctcggtgtcccggtgcccctttctcagggtggcttctggcgcggcacggggcctcgctgcgcgtttgccgccgccctcagggaggcgttttctccagcaggagcagccccccaggcgggactcgaaccccgactgccatcgcgagccacccccgcggcaggcgtgggccttctcgtcaaggcccggccacctcactctcgaggcgggaaggagccgcacgacggccgcctccggatgcaacggtccccgggacgcgctccatggccccgcctccaccccccgcgccaactcggaaaacgctcgggaagaatcccgggggcctcggggaccgggaccaggaccaggcgccggacgctgatgggaaggaggggacacccggagttagggacaaagtcacgaggccactcgcagagccctcgcgcgcgtgttcatcgactgccccctgggcggtgaccttattcagcaagacctgagctcaggggcggggtgacatctaactggagtcatcatgatggagccacgtggtccaacagtgcccggtccttgtaaccaggagggcccgcagtgtcaccacttcctcgaagtgaggccactgccctcagcttcttggagacagcagatatgagcagaaacccccaaaagtcaggagcaaatttgtttcagaatctctccaaatctgtggcttaaaacaagttcagagggattttggtgcacagctacagactgagctggtttactgcacatttataaatggaaatctttatttcttttcctctctatgtttttaagaaatcctgttgcaaggtcattaatcacgttatccattataccacaaacaaatggatttgtcacttgtgcgcagaagccgaggttgattctgaaagcaaattgtaccaaaataaatgaaattattatgataatataaactagactgcagtgattaatctctagaaaccaaattctgacctgctttgcacttcaaacaatagcttctattatgtaaatagttgtggggttttcaaggacattattgctaaattataagaaaagttctattcttgaaaatctcttcgtggataaaaatgagagacaggaacctggtctgcaaggtatccaaagcagaggacaatggaagtaatgatggttcaggtaagaatattcattagcagaaaaaggtatggatgggagatttggggtgagtaatgggctcatgtttctgttagcctgcatccccaggaggtgtcagtttcaccttgttaagtatgaccttgactggactcattcttcctacatcctttttcagctggatgaaaactcgaaaaagttcaaataaacctacatatgcacaaattacaataatgaaggcaacagggttgcaaagcactttatgccttgttacatttcagatgattcataaggcaccaaatccagacgttttcaaaattattcagataacgatgtgacttttccattttcactcatagctttgatgttcctctttacttgtagacctaggtggcccttaattggatgtgacaatagagtattatcgttcctgtattgttccatatatcctttcttgacacacagactgatacattcatatttgcaactacttgaagtagaagcttgttcctttaataattaaacaaaatcaa

SEQ ID NO: 586741 - DNA, 4001 bp, Homo sapiens
cttgtgtctttgcctctctctcctgctaggaaacttactgtcttagaaacttatgttgaaaagatgtagtcatttttaaagtttctagaccacctctatataactgcccatgcactttgactggtttccaggtatttaccttgactgtttttgatcgggattctggatttcttggtgctggcaggtcatggagtaaaataagtcattggcacatggtgaatgcatggatccttgacacaaatcactcagcatcctgcagacacttttggctgttgttgttctcccaaacctttggggcaggttaggaacacgtctcacgaggctcacctccatatttcttccagatctcagaggcaggttggctgttgctccagcacttctttcttcttgaacgttcctcccaaatctcaatggcaagttggcgaaggagtgtggcattttattgactgcaggtgtactcatcttaataacattttttggtccccaatcttttaattcctcaaaattgaggcttctttccccttttgggtatcctctaggctataattagaaatgaccattacaataacatactgttgttataagcaacagatttaaacccccaattaacttaaatctagactttaatctgcagaattgttaaagctataaacaaagtttgtgttcatatgtgcagaatttttaaatgatttgtattaagctttttaaagcaatatagtttctctgtccctagactattgtaagacaaccataaaatatttataaaatatatatagtgaatacagcaatgagttcaagcagcaggaacataatgaagtactgaaatgtggcaaaagtttattttactgcagttattctcttttggtttttttgattcatgttgcttatggaatattttatatatttttataatttgattttagagaaacctcccactcatttttcatgtttctctttaaaggccaaagtggcacatggaaacacggtacatcaaaacagagatgctggccaggttttggggtatagttgtagaaggcccagtggatttcttttttattctatcttactcagggtaccactctaaagctttctcaagaaaccaattgcatttttattagaatataaaatacatttttagcaaagaactcattggtttatgggttactgcatcacaagtatgccaactttgtaggaaccatctcaaatacagagaatatttaattagatttagtctttaccataggagcttgtccatatggaaatttttaaatgattgttttctgattatcccttgagtaaaatgagtatacacgctaatttcatcagatttggaaaacacataaaagaaaataaaaacaatttgcaattttaccatctacaggtaaacactttactaagatatagatttagtacacattggccagtttgtaattgctaagcccaaaagaaatgtgttttttgtttgtttgtttgtagtttaaaacaatttgaatgtccagctgaaatgtacccaaatcttatttctgccaaccatttattacaaatatgcacttgtgagttgattgaaaattattaatgcgctgtatgcttgctaagtaccatactcaccagtacaattgtcatgacagaggccagcctgattgctgtcgtgctaaataaacaagtgacatttatacattgtcagaggaaggctgaaatttcacaaaaaaacagagtacacaccaacttacttcttagtctttacaaaatcattagacttaggattaatattatgtaattaatgctactcacattagagagatttaaaaaacttacctcagaatatttgtcataattttctttgctgtgaagattggacatcactaattcatctgcacaaaaaatgtttgatgttaacaagcttgaagtggctaaagtcaataaaatgaatagttttgatgaaataatttccattttgtctaaatctaaaattaagtctctatgtgcagcccaatgtttatgagaggagaaaaaaattgtggtgtttttatatcgtctaaaaacaaaggaaagttttttttaaacagtgaaatcaatctcacacattttaagtactaatattaattagagtgtacaactaaaatatgcatgtaaggaatgtgaataattcattctgggaagacagcaatgtttgtgcttgcaaattcattaactttgaaaataattttcctcattataaaagagcttctaattaggtaagtttggggggatagtaattaagattccaaacagacagaatgcttcatttctctaagcttaaacaaaaagtattttgtttttggtgtttgtgtcaattcttgagggaaggaaaaggaagtattcaatccatgctagctatgtttttttttttttaatctgcacaaaagagttaggcgtagtattttcaaaatgtcaagcaaaattaagaatgtgaaaaaaattataatatcccaacaaaatgccatgaattagtttttttgtaaaatgctgtttggttattaaaaagcttcaggggtcaatgttagccgtaacatgaaggatgtgtatatgagcaaatacttgataggcattttgacaaactggcgtctcaggagaagctggaggcagtcaggccctctgtatttgctctatgggtcttatttggtaaagctgtgtcaatcaccaaaactttctatcaagatgctgcatcctaccttccctctcaaagtccttagggagactagcaggggcttggtaagtcatacacatgctaactctattggtcccaggacgcatattatttaggtaatcgcgtattgccaaaggtgtgctgtcatcatgacattaaaagagaatttacagaaataaatgcgcatttactgaaatgccaaagcgaatctcttttggagcagctgactgttcttaaatatctgccttatcactagactgcctgggttctagagacacctttacttgttcccaccagtcccttcagccctttcaggagaaaaagacttgcatggatttcctacagtccagctacttctagacacagacagttagaggtaattcacaaagagttgtaaaattgctctgttgtgtctagaactgtgccacctctcacctctctcaccaacctaccgtatgtaatttgagacgtgagatggcagaagtgaagatctttcttcatattgatctccagaacaagccagaaagttgaaaaaccacagtgggtgaactcttgtgatacaaacttgcctatggtctctcttaaggcatttgacatcattggcttcatttgttttggtttgtagtagccaagaaccccacagtaggaggcaattaattcaattcatagtctatcgttaattttgtaatgccattattggattatttgggtttaatttccctgaggatttaatacatttctcttccaaattgttcttttgcaaactgctgatggaatttctttgtgtgtgtgtgtgtgtgtgtgtgtgtgtgtgtgtgtatgtatgtgtgtgtagtcagtagatccaaacttttgagaaatgaatgaatcaaggggcaagttttgttgactgaattcacaccccagaaaaagcagaaggcatcagcctgagtctttttcaaaatgtatttttatctagttgtcattttcagataaaatgcaaattaagcagctcaccagttttcagtgctgctactaatgggtgttggcagatccattagaattttcctgatgacaatcagcatacacatatgacttaattgctccctgcctccaccaggttaggactccacgtttggaaggtaattagaattatcttattaatatggggcttgggccaggcacgtggctcatgtctgtaatcccagcactttgggaggctgaggctggcagatcacctgaggtcaggagttcaagaccagcctggccaacatgctgaaactccatctctactaaaaatacaaaaattagccaggaatggtggcacatgcctgta

SEQ ID NO: 586742 - DNA, 4001 bp, Homo sapiens
cagattccatgtaatccctgaattcatcctaaagttactggaccaacgtaagtttcttcttaatgaaataccaagtgggcactttcttttcagaattcaccagctataaaatagggagacctctgcattttagataaactgttttcaggctaaatctctaattattgggactagaattttcaaatatgggagtgagactgcaaaaaaaacacagtgaagaagaaaagaaaatagctctatttgtctttttctaaatactgtcattcaattagccctgggcaggccggaaagtctgacaatgtctgtggcaaccctgcagtttactccttggtttggttttctttggtggtcgttctgtttctcctagacaccttgctagcgtttccccctacagcatttctctggcgcattcttgcccctttcactgggtactttcgagatttctggaccgggccccactgccgtaagaaccacaacaaaccataagaggtgagtgagaggagattgccagcctaccagcctggggaacctgaatctggggatcacgactctgtgactgtagttgcacaaaatggaaggtacccattttgtgtagagtgtgccctgtacaaacatttacctagagctgactaagtgcctgatactgtcctgccctgggatagagcgaaggaaaagaaacaatccctttccctaacatccccaggatctcctggtgtgcaggcactggcgctcccggaatcggtcccgcggtcccacccacctctgcctggtgatgaggttgatgtagtgtcgcagcgccgagtagtatctggccatgtcctccgctggtgcgtcctcgcccgggttgtccggcttggaggggtacgcctcggccagcgcacccaggcacacgagcagggacagggcgagggtcagtccggacagccccagtcgcttgttacctagcatctgcaggcacagaaggctcaacggacgggcttggggattcagagcacccacgcgcagcacctccctcctctgccccccgcgctcctcctcctgctaccacacgcgacccccaatccgctctcgtcccagtcccgcagagagaacccaggagtggctagcaccaccttgcgggctccgggcgccgtccggtcgggacctgcccctctgctccacctgaaaacttcgcgcaacttcgttcgaagtctcagggaccaagaagcgcgcggcgagagtgcaaggtgggggccccgccagtttagcattcaaaaccgaattggaagttcttcctgctgggtcacttttctcccttcttgcccaaactcttgtctgggaagaaaagtttcttctctgttacttctggtctgcctagcttcaggggatcaacgctgacagcagagatcacctcggggtgacgactgcggtggggaaggggaaagagaattgctccctgggccagaattgctccaaagagatttggagcccaagaatccagggaggtggcagggcgcggggctctagagctccagggattcctcactcgatggcgctgccggggaaaccttcctaccgcgcaccgcttcctgggcctcaaggcggcgacccgcagggagaccgccagctgccttgggatagcggtcccgggttctccctccatatctgctaaaaggtaactcagaagaaccgcccagcgggaagggcccgggagaagggccgtggacaatcagaggggagcagaggaacaagtggaatttagccgccaagagggctggtccgcgtcggggcgcggagccggcatagtccgctggggagtggagcgcgatcatcccagggccccagggctccacagagcgggaggctgcgtctctagcaagttcgcgggcgccccgttcgctcccacccctagacagacgggtcgtagcactcacggtggctggcgcgcgggcgtggctgggcggcaagtactatgctgtcgggcgagcgtctccgaggggtgagagccagcggatggggtgcagagagcgggtcgcgacagggcttttatggagcttcctcgccgcggcaggaggggcctcgggcagtcacgcttgggtgactcccacccgccacttcccgcccctgagtggcggggggagggggctggaaccgcagccgcacgagtgtcgacttagggagccacccacaccccaaccctcccgccccaggcactgcctgaagaagcggggcctgggaccgcgtgagcgaggcagcgcactccgagcgcgctggacaacaccaaagcccaagtatctgccctcgggcagtgcccgatccctgctttccttctttccttctttccttcacgccccgtctagtcctgccagagataggagcagcccagacgattcttgtctcctgccaacaggactaccaacccactgggtgccggagtaggaagcacctgaatcctctttgtggtggggcatctccacgactagcgcggcatcctcgccgggcacaactgcgcgctgttggagtgaggcaactgggcgcacagatttttcctgtacttagaacaagtcggaggcagctgccggaagtctccggctagagggtcccaaagctgcgctccccaccccacccccgcccgtggtttcaggggcttctgccccttctctcagctggtttttctagatcagccttcctcaagtactcgctcagacgcagcgagccaggctcggtcgagacatgagtgtggcgactcaaaattccccagagggggaacacggtaaacctattcccccagtttgctgaaaaagagccacgcttccagcttctagagactcttttaagctcaattttaaaaatatatattttttcttttttggtccaaagtgacggtggttaaatgaacaacagtttctgtcttatttactaacccttgtatagtcctatgtacgttcaattaacgttgagaatgtgggttctgattaagatgaaacatgttaaaaacgatgaacattaatttgctcatcgcgttaaacctgttgaatgaatatgcaagatacagaaactattattacaggatcaagattttatgcagtggactgagatctgaaagttccgtgaatgaatgctcctgtatctttctaaataaaatggcattttatttctaaatgaaatataagtctgaatctttctaaataaaaaggcatgttgggaaattaaagcattaagttccatgttattttaatgctaaaaggacaagtgattctgttaaactgacacttagtttttgtgctgttccaacagcattgaattaaatatcaaaaaccgtgaagcaaacaatcctttgcatgtatgtgtttgtgtgtttgtgggatcaaactataattttggagaccaacatccctttcacttggcaactgcttctctttctgtattacacaaacatatgctgaggacacaaaaatcaaggctctcagagttgctcgggggtgcttacaagacacagccttcggtaaaagtgcaaaacatcttctaacttagagctcttcctagataaagggaaagttacagtccacttttcaataaaataatcttattttagagtgtatcacagattcatatcaattaaaatctgaacttaaaatgtatcactgaatttgggaaaaattacttctaggaaggcccacaccactattgagagaagaacactgtggaggcttgattaatttagcttaagataatgtcattgattctcaagaataagaacttattctgagggttaaggattcagagaataaaaaatagggggtgatatgccctacatgtgcttacatccttatctcctttctctccagtccaagccacatcccctggccaaaatacaaacaaaaccaactgttggcaactcaaccctgcatcttctcctagctgctgagccatttctctcctttgtttcaaagtcaagttgtttatttctaacagctttgttaagataacattgagatactgttgagcttgttgagattcaa

SEQ ID NO: 586743 - DNA, 4001 bp, Homo sapiens
gacatcactgtgcatatggtaataatacctaacaatgggacattgctacagtgataatgctccatgcaagccaagtccaacactaattttagatttttatatttctatggttaatctccaaagtcattaattgaactttttagactgttagcagatttctgcttcataatttctcaatcactcaggggttgctggtgcccacaccaaggacttgttcatgtagtagagaaacgatgtaagaaataggggcagggaagaaattacattagcatgcaattcaaatcattccacagtgctgtctgtcgttactacttgcaaaggttaatataggagcacctgggtttttctgtgactttcttttcatcatggttatgcctcttctccgttagcagtgataattgagttagccataggtgactgtttccctctgcttgacagattgaacagtcagattaagggggaatatatttaatataagagagaacaaaagcatttctctcaaatgttttctttccctcctgtgtatctgtcagggcaaatgcttacttaggcattcccactccaatgggcttaagcaattgtatatttttttgaaaattgaaattaaggtcactggatgaattttttttaaataagaaaagcactgcattttattgaactttatagaagcacagcaaaaagtcaacaaagtgtgggacaaaccacatctcttcttaatgtcttcccactggcagttgcaacctctatggtaataataaataataataataataataaataaataaaaatgacatcccaacaattgaatagccccaggaaagtgctatcttccttgcaccttggaaagcttgccaaacagatattctattcaggaagctaatggcttcaaagaggtcatgcagatgagggataaaggagaaatcgattctgaagtacagtaattgtccagatttgaaattttgctttccatttgcaggaaaagtgactgggtggaacctagcattatctttatttttcacaaacaggccacccagagcagggagagcacagtatatatttactactaggaaaatggagggctaatacagtagctgttgtttgctccattttagtgctttgcatattacttgtatttttagcagttgcattttggcatttgaccacactgtttaaaccaaataagactatttgttaggctctagataagatacttttcctagttctagacttatatttaggattcaaaattggaaagtgagatgcgccttgtctgaatcaagagaaatgaattctggggtggtttagggattccgaggggcatggagttggcagaaggagcctcccctcatctttgcagaccaccctcagcatatgacgggaaagagtaaagtggtgaagggatgagtggggaggtctccatgatcattttaaagtggctcatatagttttcttgcaggactgcttctctaaagagccgcctgttgggaagatcaggcagcttgcacaactcaatccttctcaggccatccccagcagggcagacaaaaggcacctgagggggaagaaggagaatgacagggagggaattgtgagtctgaccatttcaatggccacttctacagtgtgaatctttataaacaccaggtgctgaaggtaaaagccaaattaattttgattagcttttcagtatcacacagacaccttctccattcacgcagttcagagtgatgataaatgctgggaggctttgactcctgggcctaacagctttaaaacgttaatacttacgatcaagaggtacttccagtgcactaatcatctggcacaggaagagaatcaggggcactctgcccgcagataagcgcttctttttcggcattattttaagctgcattagcttaactcctgctgagactcacacactgaatttccttttcttctttcacaaaagattttgtgaaacgttgtgtgcaacgtttaagtaattttcatgcgggaaactgaaaaaggatagagtaggaataataattataatgtattaaaaagaaggaaatgaagagcggaagtctgcagcacagagaactagccgtgtattatacatgaactctaaaagaaagttaacttttaaatatttaactctcaaaactggagtaatcatttattcataaatcagctaaaatcagttcagagatattagtagtgatatgaagcataatctgtctaccatccttatgatttttccattttaaatggtatttgtattatgagtgttcagaggctatcgtgtctttcccaacagatcaggaaaacttggcttttaagctggtcagcaagcaatcactttgtgactttagaggggtagcctaatggcttctccattctacagattatctctgggaaagttcaggggattgttgtaaatttgcttcaaagccaaaacactaatttaccagatgagcactgactattcaggtcttccccatctcccacctagattatagcaacaaacctagctgggctctgagttcgggccttcctccctgtagtcaccctccttcacagtgctgattaattttttctacaaggccttttctggttaaatattgggagtagccatatgtgatccctcaaagaaagtccaatgtatctttaaacaagtacttaaaaatctcagtgatctgggcttaatttctcctacaaacctgatttccttttatttccatataaccattttttggtttgatgatgcatttctgtttttctttcttgtgtcagtccttcgatatgcctcaaattttcctgccttcttgtctttgtttattctatttcatttgcctttatccaccatattttcttatcaaagtccaatttatttcttatggatcagttaaacggtcacctccaggaaacatcagctgatcacccgaactagaagttatttcaccaccacccctgaattcctgaaattccttgttgtaaacatcacatacataggtagatatatattaataaatagactgtgtgtatacacatattgcatacatgctctctactcctccaggaaaggactgtctctctcatctttgtagccctctcccaacacctaatacagcctgccttgcatattggaagtgtccattgcaaaatggagagcatgagcacaaacatattaatagaagattgatatccatcccacagtaaactcctacctgaaatgataggtttaatcatgtcctctcattcatgaagagaagtggggcaaccaatgactctctcaagaaggtgggagggatgttattattataaactgctgtacctcccacaagttgaagtactgaattatttatgtaatttttatttgtatgattgtatattttacgatgtccatcttttccaataaactgcaagtctcctcagggcagggatggcatctgtcctatcccccactgcatcctcatagcccatcacagtgcctggcacatggtaggtagtaaataaatatttggaggaaaaaaaaaggaaaggagaaaaggggaaagaaaagactttacaatctttgaagctgaggttgcatttggatagtttgactatgatctacccaaggctgtatttatatttatactgcttggtttaaaaaccaacctcttgttaatatgatcaaattagttgtacgatcatgtctctgtgtggaatagtgcttaaatgttaaaaggaaaatgaaataatcctaataacatattttgctagcaatcaagttctgatttgaacatgattaaaactgtagtaggacacttcttgcaaaacaaattttaaaagaatatgccaggccaggtgcggtcatgcttgtaatccaagcattttgggaggccgaagcgggtggatcacctaaggtcaggagtttgagaccagcctggctaacatggtgaaatcccgtccctactaaaaaatgcaaaaattagccaggcatggtggtgggtgcctgtaaccccagctacttggga

SEQ ID NO: 586744 - DNA, 4001 bp, Homo sapiens
ctagctgtgtggccttgggaaagttacttggtttctctaagccttcatttcctaatttttaaaatggggttgctgtgagaattaaatgagatgatacatgtaacatgcgcagcgcccagcacatctaaagctctcaaaaccggttggctatcgttaccattaaagcagcaagtatcagttgcctaactccatttcagtacttcagcaagtactgccattattacaatattttaacagcagggcatggttagcacaatgcagtcccataaagcagcccagcctccgaggtttgtattcagaggttactgtgttcctttccaggaccaccccagggggagctcctggtgcacaaccaatgcttcctgcctcattacacttggctccatctcctcctgcaaaagcctggggcgaggaagagcccagtctcttagacccgcacttctgagcgttaaccatctgggactcggaaaggaaaagaaagctttcttctcaggacagttctgcgccggtggtagccaagggctggagcccctgatgcgaagaaaagggaaggagagaggcggggtgcgaaagaaacgccaccgctcggcgccctccctcggtgcccgcggcgcaggggccacccgccagcgtacgggggacgaagatgtggccgcgggcgcgggcgggaggggaggcgatccggggaaggaagcggcctgttcgccagccccggggcccggggagccctccagcagcgcttgcggccctgaggacaccgctttgggagaaatgacgactcccttgctcaccctactgcgacaccccgtccccctccgcactctagcagatgcgggccgggagtagctgagctggccaaccgcctgggaccaggatgcggcagcgcccacccgcgcggcgtggagggggccgggggcggcgctcggcgcagatggcgctcgctgcgagatggatgctccagggcgggtaatcactcctggctcaacacagcatcccgggcggagcggatgccagatcccaccgctaagagcctgggctgggaaagcaatctttccaggcagcccccagcccggtgcgccggccccgacaagtcccagccctcggaggcagggcggggcgcagggactcccgggacccgcacctgtaaggccgacaaagcccccgcaagcgccccacccctctgtcctccgtgtctctctcgttccgcctcgattccccgagccctctccaggcagcgactggagaagcgaagtcggcctcgcccccgaactccgtggtcagcacaggtgtacgcacttccgaacaaagcccacgcccagacgtgtccgcaggggcccgaacaggcacacgcccgtgcgctcccggcccggcccccgcgctcctcgccccgccggcactgtggcgtgacgccccgcgcctccgtgtccaagcccgggaagccgccgtgccgggcccgcaggctctccatgcccaactgcccacgagcaagagctctgggcagggcttcccggaaagcgtggggtgcgggcgcggagcagaagttggccacaggctggagggggtggtgggtgccggcgctgctggatttcagctgtgccttcacccaagcgcaggtccccctgctccctctcggcgcccgcgggagtgtcgggggcctgcaggggagaagggagttggagatctgctttgcccctcctgcagcgctgccagcccggtgagcgctcggctgaaccccgcggcggtgtccaagtgacaacgcagcagcctcgcgcgtcctcctccgctccagccgtcacccccgagcaggacccagtgtcaccgccagacgcgcaaggagctacttacgttctcgcgccgcgccctccgctcagctctggcgcgactgcccaggaccctggaccgccggtgtcctccgttctcgacgaagctatcccctctggctgctccagccaggcggcccctgcgccgtcccccgcgcccgcgcgtctgaggctcggactgcggcgcgcgtccgccagcgaccctggcgaagcgaggctggccccgcgccggcgcgcgcccccgccgctcccgccctctccgctccccctccccgcgccgtgcttttgcccctcccggctctccttagcgtcctcccgtccccctcccccgcactccctgcgggcgtcctccgcctcctcccctcctggccaaccccctcttgccctgctgctgcgacggcagcgaatgggctccagccgccggcgcctcgagggactgggtggcccctcacctgagcggccgccccaccgccaacctccgtcagcctgcgagcgcgtgtggcggcgggggtgggggtgcggggacggagggcgggagtgttccggggctaggatggctgggatttagctacaaaagatgttccagaaaatgggtagtttttgaatgccactctcatgggtttagctttctgtgggaggtctgtggtcttctagttttttcttttttaaaaagcactttcttcgaaattcatcagttggggtggttgagattgggtgagtggttttgggggttttgttttgtttttgcaaccgttctttccaaacactccccgccgccccccaccaccgcagaaaaaagagcttttagcataaggcggatgctatctatccgcggtagaaactgggtcttctggtcccaaggaatagggttagttcggatttgcttatttacaaatgggggagtattatggagattttttttttttttttttggcaatgtaaatcgagaattaagattttccaactgtatagtatttgagtaaacacactgcttgctgcatagttcaggctccgaagcgcacgtctccactctatcgtggatggtgttcaggatccttagcctgacccttgggtcctccgtaatctactccggtctgcacacaaattacttgtctgctgggtatcacccgacttgaccacttacagcaggctccagcgcttagtgagctcagcggagccttgattccttcagttctctaattcaggaaaacattttctgagctcctcaccaccccaccccacctcaccacctcctccacccccagcctccaaggtgctggggcaagattcaggaatgaaaaagaaacaggttcatccttcaaggtcttgactaccccagtggtctgttctaacttcaatttgaacttgccccgtcagctcacagcatctgcatgcaagtgagcagccttcttttccttctccttctactgccatcctctcctccttctccagccaaatgtgctctggcctcacagagcctccctcggttcctgaaccagcatgatatctggctgctgggtcattgcacaagttgtttccacagtcccatcagtggttcttctgactctagtccttacccaactgccattcaggtggtaccttgcacctctcaactaattgtccaaattttcctctaaaataccttcccccccgcaaaaaaaaagattccatgatccccctacttgaaagtctgggctggtgggctggttctctattgcctacaaagtaaattccacatctcctggtgtgcctctttacaatctgctcctaacttatctctccattttccataactctaagcctctgcatgtgaggttcctcctagctagaatattggtccatctctttttcatttggcaaactcttgttcatccttcagagccttacttggttgttacctcctctgtaaggactattataatagtgctggtcaccttttaatgatctgtttgcatgtctgactccataaaatttcacttctttgaggacaatttgtcttatttatttttgtgtaaccacatttctcatcaatacaaatgaagccacagataaccataatcaactctcactgccccatcattttgccctgtgtaaaggacttgaggcccctccgttccttccccactgcagtaattgctgagaatcctggggttgtcttgcctgtccttcccatgtccttct

SEQ ID NO: 586745 - DNA, 4001 bp, Homo sapiens
ggtctcgaactactggcctcaagcagtcctcctgacttagcctcccaagtagctgggattacagacacaagccactaagcctggcatataatgagaaaattttttgagaaatttaaagcagttctgaaggtcagcagtcatgcatatttataagcaaacagcaatctgaaatccgtgttccaaaaaatacctgtagcaaacattccaatctatgccttacacaaagaacacaaatttaaatctgtccagtaaacttaaatatatacattattttgaatatgcctttttttacacacttataactctaaaagaagattttttactttggtcagttttaaacagtcttttaagaatgtcataaaaatagaattaatttctgactggtatttcccaggttggtgatttcaaatcagatggtttcagtttatcatcttataatatgctatgataaaaccaggctgaggaagtccaaggaaacactgaataggcttctccctgaaaatcaagttcctggccagcctccatggctcacacctataatcccaacactttaggaggccaaggtgggagaactgattgagctaggaatttaagaccagcctgggcaatatagcgagacctcgtttctagaaaaaatttaaaaccagccttggcaacatagggagaccccatctctacaaaaaaattaaaaagaaggaaggcatggtggcgcacgcttgtgatcccagctattcaggaggctcaggtggaaggactgcttgagtcagggagatcaaggctacagtgagcagtgatcacatcagggtaacaaatcaagaccctgtctcaaaaaaaaaaaaaaattaaatcaaattccttagaaagattcagaaatattcaaggatgttaagatgtccctgggtctcttgctatagtctcgctcaactctatgaaaagtaagtaagcaaactgatataagaaagctcatgaaaatgtcccacataaaggcagaaactttggctcaagtattttaagtatcaacttcaaagttataatattttcataatataaaaaattttgctcaaaacaacatatgagtgtttcatttactggtcctcagcatttgatactgatttaaaatcaatttaggacaaaaaggaggtcaaacttcgaaatgcctacaaaataatttttttaggttaacataaaactggtttaaatattccaggtatttgaactgatcaatctttttattaatctactttctttaaaagaataaataaaaatactctttcaaagcaatgccctcacccaattttacactttaacttctgtgaggacaaaataatctgacaatttacccagtgtagtcagactctttcttattcaggaaactgcctcttccaatccaaagaatatcaggatttatagaaaacaaaggtttcctcggactatgcctcacaacgacaaaacaagaaagaagcccaacatattacttagaaagcagaagaggaacaacaaaatgtatttcttaactcactatggaaaatcaaaatgatttgttttaacattcaccttctataatcccttttgaaaagacattactagatcaagcacaagcagagaactattgaaatttaaattgaatgtttgcttttcagatcagatccatcctagttgaggaccctctctctaagagaccattacaaatttaaagacacagaaagtagaagactcattaataggacccaggcaaggctcagactgttagctctgtaagtactatcaccttatattttgttcttttatttcatcatttgcatttaccaagtgtatatcatccacattccatttgttcactctattctcacaaacgtctatggaaaagctgcctgaatggatgggagactgcctacattaattttactcaccaagttttgtcctgtttaaatgtcagcataccacattcattaaacaaatatcctttgagcaccttttctgtgtaaagttctggaccaggaactgaaaggggatattaggatgattagttcgaccctcaaatagcttaacagcagttctcaaagtaaaccatgggaccctgggggtccttgagattcttcaagtcatcaatgaggtcaaaattattttcataataaataagatgctatttgccttttctcaatgcatttatatttacacttatgatgcaaaagcaatggtggggtaaaactactgacacttagcacaatttaaggtaacagcacaaaactatactagtagccattatatctttcaccttcatgtgctcacgataaaaaggagaaaaaagtccattttatttaagaatgtgcttgatgagagtaaatattattaattttattaactcttctccccagagttatgtctttctactattctgcgtaacaaatggaaagtatgcataaagcgcttctgttgcattcagaagtgttgcattcagctttctgctgcattcagaaatggctgtctcaaaaagcgtgtgtgcgggccgggtgcagtggctcacacctgtaatcccagcactttgggaggctgaggctgacagatcacctgaggtcaggagtttgagaacagcctggccaacatggcaaaaccccgtctcactaaaagtacaaaattcagccaggcgtgtggtggcagctgtaaccccagctactcaggaggctgaggcagagaatcgcttgaacccgggaggcggaggttgcagtgagctgagactgcgccactgtactccagcctgggtgacaagagcaagactccatctcaggaaaaaaaaaaaaaaagcgtgtgtgctatgttttatgttgtaagctgaattagctgctttttttcacaaggaatacaatttttactccaaagagtggctgacagacaaactatattgttcttcagacctcggtatttgacagacattttctcaaaaattaaaagtgggtctgtcacttcaaggaaaacaactgacaatattttttgccaatgatggaaatttgatatttgaagtgataattagaatttcggaaaacttgtatctgctacagtgagtctaatagttttccattacttaaaagccttttctgatgagactggtggtgatgttaaagaatgtgatttttgtgtcaatatttgaaagatctccataaacttgatgaattaatattttccaaattaccaatagatgatgttacaaaatcatgcatcagttaaaatatccattcatagagcatgataaaccaataggttttaatgtaagagtagttaccatttcagatttcacattgcaactcatctttaagaaactaccactgctgagttttaatatatcaaagaatatccacaattatctgaaaaggctcttaaaatactcttccaaccacatatttggtatgagaccagatcttctttttatactttaaccaaagcaacatactacagcagactgagtgcaaaagcagatgagacttcagctgtcttctcttaagccagacattaaagagatttgcaaaaactgtaaaatataatgtttctcactaaagtgttctgttttgaaaaagttgtttttcataaaatagtaacataattaaaatattaactttttaacatgtacagggttattttttaaattaagcacttttaaattttctcagttttaatttctaatatagtatcaaaagttataacatacataaataaaagctattatatttggagtcctcaataatttttatgagagtaaaagggtcaggagagcaaagattaagaaccaccgagacgggcagatcacgaggtcaggagattgagaccatcctggctaacacggtgaaaccccatctctactaaaaaaacaaaaaaattagccgggcgtggtggcgggcacctgtagtcccagctacttgggaggctgaggtaggagaatggagtgaacccaggaggcagagcttgcagtgagccaagatcatgccactgcactcctgcctgggcgacag

SEQ ID NO: 586746 - DNA, 4001 bp, Homo sapiens
ggtctcgaactcctgacctcaggtgatccaccccgcctcggcctcccaaagtgctgggattacaggtgtgagccaccgcacccggccgtaaagagttttcttaatctgattattgttttttttggtcatgggccctgttgaaagccactaagtcctatcaaaagaaaaaaaaaccccttgacacaaaaaaattctgcccacaatttaggatccaagttaagaataaatattctacattgcatgtgataattatgtctgctttcggactcataaaataaggaaattacactcagatgcacggagagaactagtcatattttcactgtcttacggggtaacctgtcaagaactgtcaaatacaattttagggagtcgggatactaatgaatcaaacacacacacacacacaaacagcatctccaagactccagcacccccctttcccaattacttactggtcaagcccaaaggaaaaataattttttaaaaggctaggctgagatggaatgggaaaaaggatcactgtgagcacagatgatgtcccgggacaaaagctctgcccaacactgcccaagctgacaggctcactcacactacctttctccttatgcgtctctcaatacgcagtctctgaacacttaaaaaaatgtgaattttgctctgaccacataaagaaatcagcacgattgacaccagctctaaaataagcaattaatatattctaatctaatgcttaagaagaatggagagcaggcaacagctcctccaactggttggagcagatatcactggaagccccccaagtattaagatttttaaacaacttcaagttctggtgggcacagccaaatacactgcagaaactttgggaccagcagccacgacacaacaggtgagagaggcagcagacatcattgcacgatggagtgcacaacattcaatgacaaacccgaaaaggtctggggatatgggaaaataccatgcacacggccatctcagagcccctgtctttccagtggcaaaaggttctgttccttcggaggggcgtgccactccccctctccctcacccaggggaccaccaccccaggcacaggaagaaccgcggcccctccgcgggcacatctcagctggggaagaaaacacaatgtcgctccttatttctgcgtacaaaaggactttgcgccctcctcctcgaactgccgccccggccacctcctaacttgcaagaaggtgggcaacgcgccatattccagcgtcccccagtctacctgggtaacaagcccacgccaccccggcaggagggaagcttcggaggtcgcccaaagagccagcctcctctcccgcaggagacagcggctcccgcgccccagcccggccccaccgcgccgcccgcccgcccgcccgcgtacgagagccgggaagggccgagggggcgagccgagagccgcggctccggtcccgcgcagcccgcccacctcccgctcccgggcccggcgcactctcccgcgcctcccgctcccgagctgcgggaaggccgggccccgggttccacggcggggagaaggccgcggccccgagagccccaggcggcggaggaggccggaaccctggggctctcgggagggcagcgcctccctcccgagcccgccaggacgcctggggcctagtgcggcctgcgcatcctcggggtggcggtttggctgggccgggccggggccccccgcccgaggcgggccgaatccggcgggggcccaggcccagagccgggggcggcagggtgccggctgcggggcgggccggccggccggcgggcgggcggcgtgttgcggctgcgccggggctgaaatagctggagattgcgcggtagggcactcacctcagagcggctgcgctaccgtgggcctgcgccgtggagactgcgaccgcgccggctcctcgcagcctcctgccaccagcggcaatggcgagcgctgccgcttctgccgccgccgccgccgccgaggagggggaggggagggagagggcacgcacgcgacgcacggcccggcttccccgcccggccgccgccatgatgaggaggtcggcgcggctgtgctgcgggcaggcagcggagagggctcgcggcgagggctccagcttaccccgccgccgcgtcgcgtgcacggagcgcttcagaggtttggagggggccggaacctcaaaagcaactggatgagcacaacgcggacgccccggagaagcggcgcaagcgggcccaaaatggttgctgatcagacgagtggcatctctcgcccccctaccgcgggaattgggacctccagactgtgcctgggggatcggcaagtggttcccctctggttttttcggcgctgccttcccggtggtatcctcactctctctctttgaaatgacctctgctttcctatctctaactcttcccagatatttgaaagcaagtttttgtacaaagcaacatatgaatgtattcagccattcgatcgttcggcgaacatttctaggtgtctcgtgctgtgccagatattgttctgagtgcgctgaagatgcacctgttagcaagacaaagtcctggctcccacggagcttattcgaagcaataggggcccccaagcaggtgcctgagaagtagggaggggtggacagtgggaaaacaacctaacggtggagacacacgaggggtctttttttacttttagaaacgggggtgggtggtcaccctatgttgcctaggctggtctcgaactcctgggcccaagcgatcctcccgactcagcctcccaaagtgctggtattacaggacaccatgcccggcagaggggtcgtttttgttgtttttttagtgtcgtcaggagactccctccatcagaattactcaggctgattgttttgagtcctgggacccagttggtatccagaatcttggcttgtttgcctaggaacctgcattttcacatccccatctccacacccctggtgattcttatgcatataataatgtgaaaagcattgcattgaagaattgctaaagggtgtcagaaaacggattaacaaaatcaggaagctttaattttcaagattctattaacctcaaaattcaacatatccaaaaattgaatgtctttttctccagtgttttctaggagagtgccaacactagccacccaagtgctcaagccagaaacctggaaatgatccattactctttcctctgtctctggagtccccatgttaaattagatgtgtttgtttgtgagacagattctcactctattacctaggctggagggcagtggtgcaatcattgttcactgcagcctcgacctctctgggctcaaggatcctcccacctcagcctccccagtagctgggactacaggtccccaccaccacgcccggctaatttttgtatttttagtagagatgaggtttcatcttgttggcccgggctggtctcgaactcctaggctcaagtgatctgcctgccttaacctcccaaagtgctgggattacagccgtgagccactgcacccagccccaattagatttttaaaactgttgttccctgtcagttcttactctggttcaggctactgtcatctctcctagagacactgcggtagactcctcttggtctccctgccaccgaaattgccctctccaaatccactacagcttgaatggtctttcaagaaagaaaatcatgttttttccctgtttaagactcttaaaaagatctgattaacacgtaggataaagtctaaaattctttgaggtggctacagggccattggtgatctcatccctgttgccatctctgacctcatctgccacagatatttctcaggctacactcaaaactgggaagctctcaggtcatttaagcctggaaattgtgccacctcacaactgttgcaagggctgttccctttgcccataacttcatttctctctacaccatctatgcacttacttgaatcctca

SEQ ID NO: 586747 - DNA, 4001 bp, Homo sapiens
tctaaaaaaaaaagagagaaaggagtggagctgagaaagatgctcaaggtaggggagtaaatgattggagggaggagaaggaagcacctaggatgactcagtttctggcttgaccaaatgggtggaagatggtgacatctgttagatttaactggggatgtactaggtgtaaagtctgagaggaaagatgacaaatgcagcgactgttagcatctgtggtgcgttcatatgaacctgaggaggtaagaatgcaagagggaagtctacactgggtggtgagaatcaccaggtgggaggcaggagttaaagctagagaaaaaacggagagatcaagaagaatgtaggatgaggctcctaggagttcgatgtttaagggatggcaggaagacaaaccttggagatggataaactgctggaaaggtaggaagaaagcccagagagcaaagtcacaactatccagccacttctcttcccaataccccagacacctccctagatgaggacagccagggctctaagctctcacctggaagcccgaccctgataggagaaaccttgtctcttgaaataatcaactacatcatcggagcaggtcttgagagtgttcacacgcacaaatcgaggcagctgggaggctacgtaggacgcaatgagcagtgagtaggcaggagcaaagttccccgcctcccccaccccccaactccttccagcttacctggaccaggcctggatcccacttccaacaggtcctcattccggctcacaccccgatgaaccttgagccgagccaactcagccttgagcctcgcctggtgccggcccaacagagccttccatcggcccccaccccctcgaaagccctttcccaacaacaactcatacactagcacctgggaatgagggaacaaagacaaaaacaaaaatgccctaagcatgaagcatgaatgccttagaactaactctaatggagccccggcaatggaatggctaaacagatcacctgacaagatacaggtgggataccttatccaagatcacaccagaaattaactacagaacaggatcggaacctggcgtctcgcttcccagccttagaccctttctccaccgatgttcaccagtagacacctctgcacccaacttcttgccaacattaccctttcgtgggtttgggttttctttttagaatggggtctagctctgtcgcccaggctgaagtgcagtggccagatcatagctcactgcagcttcgacctcctgggctcaagtgatcctcctccctcagcctcccgagtagctgggaccacaggtgcgcgccgccacgcccgacttccttacagtctccgccactaccactttgtacttcggttatttaatccttcaaaacactcaaagttaaagcattttcatcccatcttaattcgtaacccagggaaggtcggctcatactcatttcagatgagcgacttgctccagtcccgccgtgcacggcagcagagctgagaccagatgacaaagcgctgaccgtcggggttcacttccccgtccctcccctcccctcaccttggccaggtgcggccgcagcttcttctccgcacggaggaggccggcgctggcgatcacagcatccagcacggcggagtagcgctgcgtttcgcacaccagcgcgtacagctgcttcacgttctgtgtggccgaggaagacaagctgggtgggggctcccccggccctcctcgccgggccccacctcccgaccccacccgggcccgtccgaccccaccccgggttcctcactccccacccctactactcgcgcccaggtccgctacctggaagttgctggagtacaccaaccccttgatagagccctggcggctctccacgccggccaacacgcctgcagctgcagcatacagccccatgttcccgcgcgcctttacggctctgtggcaaaacgcacccggctcggcgcccgcccggacttccggggtcaaaaagcacgaccttccgggaccggaagtgccggtcgaagtcgccctgcaaggcgtgtgtgtgatcgcgcacctgccggggtagggagtgcgacgctgcagcccgtttcgccacttcttctctagttcttaagtttttgccaatctgatgggcaaataatgggattttactgctgtttaactgaagttactgaggttaaatatcttcacatgtgtattagtcattatatatatatatatatatatataatttttttttgacacagagtctcactctgtcgcgcagtgtcgcaatcgcggcacactgcaacctccgcctcccgggttcaagcaattctcctgcctcagcctcccgagtagctgggactacaggcccacgccaccacacctggctaatttttgtatttttagtagagatggggtttcactatgtttgccaggttggccttgaactcctgaccttaggtgatctgcccaccctggcctcccaaagttctgggattacaggcatgagcccccgcgctggccataattttgtgtctccgtttattgtcttatcttcctctgccatgtgtcatccaatggctgtgttctcagggaggcttctgtgtaatggcaaaaaaggtcctagcaactctaggtccacaatgtggtttacaatacctgccattcaccctgcaccagtaaccacattagtcccagagccaagcaagaaagcacgtggggtatttgggtacctgaaatgggccggtttggccaaattaagtgatgtaggtatgatccaggcctcaaagccacaataacggttttgtttttgtttttgatgaggtcccactccgtcacccaggctggagtgcagtggcaccgtcatagctcactgcagcctcaaactccagggctcaagcgatcctcccacttcactctccaagtagctgggactacaggcatgcaccaccactcctagctaattttatcttttgtagagatgtggtctcaccatgttgcccatggatggtctcgaactcctggcctaaagtgatcttcccacctcggcttcccaaagcagtgattacaggcatgaaccactgtgcccagcgaggattttattcttttatcttgaaagaaatggtagtcctcttaaggtttttaagtcatggagtgctgtgctaacatatacttctttaaaagatcagtctggccaggtgtggtggctcacacctgtaatcctagcactttgggaggccaatgcaggcagatcacttgaggtcaggagttcaagaccagcctggccaacatgacaaaaccccgtctctactaaaaatacaaagattagccaggcatggtggtagacacctgtaatctcagctacttgggaggctgaagcaggagaaccatttgaacctgggaggctggggttgcagtaagctgagattgtgccactgcactccagccagggggatagagcaagattctttccccaaaaaataaataatcagtctggttacagtgtggggatataggatggagggggcagagttgaggcagggagagaccaatgggggtcatgggagtcacctaaacaagaactggtggcctggactgagttggtggcagtggagttaggttgaaattggcagtgtgaccgctaagttaaatccacagaacttgctcaggaaaaaggacaggtcgagaataactcgtaggttttcagtttgggcagttcacacaatgctgctgtgtcttttggtaggatggggaaacgtggggtgatggagtgaacaacggccacccagagagagcaggtcctaattcctagagcctggaaatgtcaccttctatggaagagatctgtaggaatgatcaggggaaggatttggagagaaggttatcctcgattatctgggcaggtcctgcatggcatcaccagtatccctataagagagaggcagaggaaggacaagcgcagtgactcacacctgtaatcccagcactttgggaggccgaggctg

SEQ ID NO: 586748 - DNA, 4001 bp, Homo sapiens
gtcttctgacccccagtcaaatacttcttccacttgaagaagcaacctattaaaattaaaaaagttaacatgaagctcttttcactttttccattgaaaagctactagcaggctacacatatattacaatctgaattaatatactatgcatacatgtaaatattgactgatttctttagtaccaataagttggtattctagataggtcttcattatttgtcacaaagatagcaaactgttcctatgatggtatcattgaaggattttgtgaacacactgatttttaaccttacttggcttagataagtggtatacagaccaatccatagtttaagcacaggcagggagatatggcaactcggttttttcccctacataggcattattaaccttgggcaaaagaaagccaagttttctaagcaggaaagcaacaaaagcaaaatgaaacttctgagttaaaaccatttgctgctgtgggcatacagatgtgggacaaatgaattttaataagcctttagaattattaagaccctttaagaataaattaattcaaaattagggaatattattggaatatgagacaagtgggaattaacttttttttttaagagacagggtctcgctatgtttcccaggctggagtgcagtagctatccacaggtgtgattataaccttgaactcccagactccagtgatcttcctctcagcctcccaaatagctgggacactggctaattttaattatgcaaatacatctgtattcaacctggggtcagtacaaccaataggacaaatcgtgtctttcgtcagttggaacatattgcaggtgctcagaaattccaagtattacaccctaaaatgatattatttagtgtagattttaaatttttttctatcataaatcatctgaccctagatgttcacatgtatagcacacggtcaggcgtatacccaggattatgcatttcaggaaatacataagcgtgcaagtttgtgcaagaattgtcttcctgagtgggttctaattaaaatacaaaacgaaactaaatatcctcatttttgaaacaattacttataatgtatctcaaagggaattcttgagacaccctcttcaataaaaaattaaattcgaaaatgtatacaagagctttgggagttaagatgaaaacaaagatatttcgtgggagttttgagacaagaaggaatacattcaaatacaaaataaactatcctgaatttctcctggattgccattcttgtaaaattttagatattgcacattttcataatctaactcacggcagccccaacataaaactagtcctctgcgggaattgcaactagattagcggcaacggtttgacgcggatccggggggagggcgggagcaaggcagggagagaaggagccacctgcccaggacatgcagcttatctctagagaaacgggttttgcagcacaaagtagcctgtgtccgattcatctattttctgccttgttccttcaaacggaaacctaacaaagaccacgggcagccaagggccgcagccggggacccaaccctggtcaccaagcccgcggagtggccgcacgcggggcggccgggtcccccaagctgcgcgtcccgagctagcgagatcccagcctgacaggcgacgccggcagctccccgtcgcgaccgaacagcggcccagcacaggctgccgaggccagcggacggcccagccggcccctcgcgtgctctgggcgcgccgagcctccacactcaccatctcgatgatcttggtcttccgccccgtcttcctcttcaaggtgaatatgtactgagccagcaccacccccgccaccagggcgcacacgctggcgctcgctaccgcgcccaccctcgccacggccgcgcggtccatggacggggccctcatgcgcgtccaagcaggaaaaaaacaggcagctcgcgtagactgcgagtctcggaagcgcgggatcccagagcatcacggacgagcccgcgacgccccgccccgcgcagcgacgccccgccccgcgcagctccgcccccacgaagccccacccacacgccatcgatgggagaggccaggacgcggcgggaggggtgtggcctgtgcccggagcccaggctggaggcggccttcagcagactcagggtctcacgagctgctgtcagggcagggcagagtattgcggtaattatccttctctgctaatgaggattaggccgtggttcgctcgagccccgccccagtagaaatctaattccaactgcggcccgctaagaagtcggtctccgccttcgcgcctcagcccctctggactccgacccccagaaggctgcgcggcacggtgtgacctgcgcagtggcgtccgttctaagtgctataacaacagggggaagatggctcagagttaggctggagaggggcggtgtcccttccgccgcagccgcggggtttctgctacatcccattcgccacctccgccatccttttttctgtgtgagcagaagggcttgcagttgttctctcctgcctagtgtcttccaagggatagatgccatttcttctgctggtctctgggggtgaggaggggcgcaggggagcttcttgggggaatcgctccaactctgtggagctggtggtgctgcctggtggggctctctctgcccaggacgtggaacaactttcagccggaggactagaggaaatagttgtaggggaggaaaaattgtttccttctagccttttaggtcatttggctggtctacaaattaaattgatgtaagacagaggaacatgagaaaaacgatttgtcgaccgaaaggtgaaataacaggtactaaaacttaaagaaatcatggttagttttattactcggccaagtttgaggacttaagcctgggaacacagactcagtatagaccgagaacgtgtcccaaagtaagttagctgggagtataacctgaagaagactgagttttaatacccagaatatttgagtatcaatatctagactactgtgtcattttgtcgccaaagtaattttttatgaatccagttttgcaccaaataccaatatgacttaaatgttgtctgattgtgaggcctaagatggtcacagtctcatttatctttcttcctcaacaaaaacattttccatatattacatattattttgaatgggtagagactaaagccacgtttctataatttcaggattttaaacattttgtagacgataacattcgtcttgaagctgtggacaatctaaaacagaaatggagttccaaattttgtttttgtaatatggcccgtcaactgcacatgggaagaatgtgggtactctgaaatatgatttctattttaactagttatactatatcataggtctgattatcatctatatgagatgttaaagctgtaggagtatagtcaattagactacaaaccctggtagtaaatttccaggaggaaaggggtccatatgttttttataagtgtaaaccttgtgtttctgaatctaagagggttggccatgtttggagactatttcagcttctatgtgaattaacatattaattattcttgttgaaagacatggaagatcttgatatggtttgaccctgtatcctcacccacatcttattttgaattatactcccataattcccatgtgttgtgggagggacctggtgggagataattgaatcattggggtgttttcttccatactgttttcgtggtagtgacttaagtatcaggagatctgatggttttatcagggttttcgcttttgcgtcttcctcattctctctttgtctgctcccatccatgtaagatgggacttgctccctgccttccactatgattgtgaggcttccccagccacgtggaactggaagtccaattaaacctctttcttttgtaaattgcgcagtctggggtatgtctttatcagcagcctgaaaacagactagtacagatct

SEQ ID NO: 586749 - DNA, 4001 bp, Homo sapiens
ttctgatgatagtttacaagtcaattaatgaaaattgattggtatgtctacatgaaaaaaaattacctgatttaaagcaagtcttaaagtacctgaatgcaaactgattacttttaaaggtctacttgactctgtcttacaggaaagtgaaaaagattaaattcatgaatatagctttaaaaactgtgactgctttaattgtgatactcgcagaaacatgtaaactacattgataaggtaataaaattgtgaatgctaaactgtgtattactcacataagaaaaggcatatattaccataatatggacacagtatccgcaacagtaccaaacatcaatttttcctatactttttcagtaacctgtactatttgactttcttaagcttgggttttttgtttttttttttttttaatgttactgtcttcgggtgattagcacatgcaaaatcaaactgtaacttcatcttttctgtatggctgtaataatttggtggggcatttaaataattcttcctaattagattttcaactcagcggtggggaaaaagaaacacacacgctgcaaagtgaaactttctcaatacaggcataaaacaaaaatgaaactaaatagcaaagagtgggaggggtagaagagatataggaggaaagaggaaaaaacagatttcaaaagctagttatttaaaaatgggcaattttaaccaattttcccaaatggtaaagcagctactgagtcagaattttgtggatatttatgcaaataaacaatttcaatgtttagaatttattcctctatccttcccacattcactacctctaatatctaatagcattttttcaagataagtaaaccacatacagcacatggaaactaagtaatttatactgacaacccttaagacaccctgagttcttctgtccttgaatttgtcctaggacaacagcataggtgacaagcactacccagagatgccgggcttggatgcaggctgccaataaaaactaagcaaactgctttaagaaatgatctgcagcatgatctaacttctctgatttaaaggaaaaaaaaacctataaaatatagataattcaattatttaaatataacttagccataatattctaggcttttactgtaatataaatttttgaatcttaattttcaatatataatttgttataaatcagtaatctagcttttatcaattcataaaacataccagtgataatcccattctataaaatcctgggtaaagctcacatgcacaaaataaaaattgataatctttattactacccataataactgttcctaatcctagtaacacaaagcttgtggctgtcagtaaaactgagtcacatagccaactgaatgaacaaccaaattgaatcttagagtgtttcccctcaacctggaaagagacttctgaaggtactttgctttttctcaacatctacaggtgaaacaagaagctcttaaaattagaacatataaaatgtaatttctgagacctaagactcttcaaagttttgcacattcatttcttcacaaattataaagaagttttgcattatactggaacattattttatttcctaagtttgtatttcaaaatgcccaaaatttcagtaagttatagaatcaaataagaatcacataaagttagacaagagaaactcatttacatgaaccgtacacacttaccctgaaggtaaccggacgagctacaccagcaaaagaaaattcttcctgtctgagaagtactaatatagcacaaggtgcaactgagggcggttccaaaagccttgactaagccctatgcaaaaaccttgtgacgcactgctgcacagtactttatatatgctcttggttacagcctcgctagctctgagctagtcacaagtcaatctacataacattatcaattgaagttatgtgacgattaaagagaaggtaaatctgtactattagaactggcaactggctctggaaagaaaagaggaacctctacactaacacttaaaaacattcctttccacctggtttgtcagtggtttgtcagtgtacttctgatatgtgaacttttctgtatattctattttaatacaaagttaaaaagattaggttgctgttgccagggctggaggaggaggatggggaattattgctcaatggatagagtttcagttttagaagatgaaaagagttctggagtggacagtggttatggttgcacggtagtgtagatgtacttaatgccaccaaatgaaatgcttaaaaatggtttaaatggtacgatttatattatgtatattttaccactattaaaaaaaagattagctcacttaaagtccataaacaaaaagacatgatatatgcaaatgtggtcaaaaaactgttaatagtctttatcaaagggcagtgggatttaaagtaatttttatattttcttatacttttaataagaccagccataaaatctgaaaataaaaattaatttctgtttttaaaaatggggggaaaaagttcctgcctgttaaaaataagagcagtccaactgtcatgaagaaaaaaaaatttttttttttaaaagagaactagtcttgcttttaacctgagtagtagggtggcaatatgctaataccatgtgtcaggacctgatagataagttatgccatgggctgtgggaacctttatcattagggaacatggctacactacacttatgtaaataaatttttattatcggctttctctctactgtcctcagagaaatctagtctagtaatatttcagtaatcaaattttgtgaagtatcgttctctattaaaaacaacatgaaaaaaattttaaattgctgttaaaaatggtgttaaaaaactatccaggctgggtgtggtggctcatgcctgtaatccctgcactttgggaagcctaggcgggtggatcacctgaggtcaggagttcgagaccaacctggctaacatgatgaaaccccatctctaccaaaaatacaaaaaattagccgggcctggtggcaggcacctgtaatcccagctactcagggtaggagaatcacttgaacccaggaggcggaggttgcagtgagctgagattgcgccactgcactccagcccaggcaacaagagcaaaactgtctcaaaaaaaacaaaaaacaaaaaaaccccaaaaaaacaaaaaacaaaactatccaaatttgtatctaccaaacgtgaaacctttgacactgctatcttatttaaataaaataataaaattcataatgaaacactcctctaagaggacagcctattatctctaatcagtaatgaagactcaagggccacaaagggctccatttctaaaatatttctgtattatgtatgaaaatgatgacttaaatgtactttaatattattagagttgacaatggtaagaatttaaaatacatcactttgaaagatgattcacagatcactttcaacaaccaagaatattgaaatgatagttctacaatctttttggagtgcaatttagaaatactattaaaagcattagaaatatacattccctttgacacatcaattttgtgtctagaaatttttcctaaagaaattaggcagtacacaaaactttagctgccaggacgtatactgcaaatttgttttataattctgggaaacttgaaacaacctaaatggccaatattcaaatgttcactaatacagaagaggtgaataagctgtgatacatacagaaaatataaaattatactgctcttaaaaatgattattatgaatagctaaaatgtattgtgtttactatgtgccagatgcctctaagcacttgacattccttgtctcatataatacttataaacaaccctagaaggtatgtgctagtattattttcaatttactggtgggcaaattaagccttatacttgataagcggcagaaatggattctaactcagttctctctaacttcagaatccatg

SEQ ID NO: 586750 - DNA, 4001 bp, Homo sapiens
tctgaacttccgtcatggagtcccttgctgcttgcctgttccaggtatgtaacttctctctcccagagaagtatgtaccgcgatggagctgtctactcatcccatactagcacagcaattcaaaggtgagtgaggcggctgagatgtaaggcagctggcaggtgtagcacagcgctttaaggtttcccaaatcagacaagcaataagtaaagaaaaatgttattagcccctgaatgatgaagacaagttctagagagtggaaaaaatatgagttaatattaccaagataaatttctttcttctattgagggccagtattccacatccccccaaacccaattcacacaactttgaaatctttgaaaactttggtagcttgtgtatttcataaacaaatattttttaaaagaaagttcaaatctattttatgtcagtgcggggacaagaattaggctaatcaggacagggaggagaaaagagaggaaggaataacacagccaatgaggctgctgtgtgcaacctgggtggcccatgggagaatcctccatttttcaagcactgacaaacggcttatcacagcaaagcatattagtacttagagcgttagcttttcaaacacaaataactttaaaaactactttacatactactcatgaatcttcagaaattctgaataaaatatcacagcaaccctactgtctccccactgggggacagtaatttcacaggctggttactggagccaagcaatttgaaaggctgatgcggtactcagagatgccatccaaggccgggcgcggtggctcacacctgtaatcccagcacttgggaggccgaggccagtggatcacctgaggtcaggagttcaagaccagcctggtcaacatggtgaaaccccgtctctactaaaaaaataaacaaataaaaaatttttaaaaagatgccatccaagccaccacttgacagaaggacgaaggagtgttacaaacccagtgcgtgtcagacactccagggagcaaacaagagctccagggttacaccgaataagatttaatgttaaaaaaaaattaaaccactgtcttgaaacttaaggaacttcagttatagacaacagagtaagtggcgacatattttaagtcaagtttaataagtcagtttttaattttaactgaaatgagaactgaaaaagtttcatgcatgccatacaatgtttcacattgtaactaagaaaagacgaaactcattaatatcactccgtggtccaagcagaaagtgaaacgttataacgatcctttaaaaatttcactttcacttttgtaatgaatcgatcattgctacatttagccacaccttttcaagtatacattatatatagttgaaacacaactatatctagtcaagacacattcattttttcttaggaaaatgaaagattcttgattaaaaataaaagggaaggaggtgagaatgatagaatcaggtcgtcaaggttcgagaaaatcaagtgtcttgtcattaaatagcaaagaaaatctggctttgattgcaaataaatcccaaatggtatactcggagtgttacgattcaagtatagcatttggctaattttttatagacatatttattcctttctctccccaaaccgatacactcaatattttcttttaaataccccacacctctgcctaactcagggcaaaccaaagggccccgaacggccagcgcgtcccgaagcccggcccaccgctcccggccccggccccggccccggcccagctccacgcatggctgctcacccccgccccgcggccgctccacccctggccaggagaggtgcccagtcggaccgggaaccggggcgccaagcagtgctgctgaggctggggtcgaggacactcggccgccgtgtcctcacctgcgccacgccactcccgccgcgaccagcagagtgcccggatgcggcagcggccgccgtttgttttcattccgggtgaggccagccccgcccccgccgccgctgtcgccttcgcgccgccgccgccgccgccgcttggaaagagggttgtgggcggggccaaggcgaagccagctgtgggcggggatacggttgtgtgggcgtggttaccgcggggcggagccgcgacggggcggagctaagcggaggcggggctgggcgaggatgtggccgtgtggggcgaggacctgggagttggtgtccaacgccaccccaggctcagtcttccaggacttcccgcccgggctcagtttgccagccatcaagaggaaatggatcctggctttgtttctccagaatccttgaaagaggctgggggaagggtcgggaccgtcccaacccgcatctcattcctcagcctaggctggaccccttccctaaaccagcggcttttcaccccgccctccacaagcccaccaggggcttccctggggtgaaattaggctgcttcccgggaatttcctcccccatgctgtccacggccactagggaccacaaggcctagggagctctgcctacttccaaggtcctattcccaaggctgtgctcaacagtgacgcttctattttattatcagttattgctgttaatctcttactgtgcctaataaattaaactttatcgtaggtatgtacgtatgtataggaaaaatgaagtgtgtgtatatatatagtatatatatatgtgtgtgtatgtaaaatggggtgcagtactatccgaggtttcaggcatccactgtgggtcttgggacacaccacctgtgtgtggacgagaggggactcctgtaaccttgcagtgaccaatccgtttttcgttccctgttgctgctttctttagcccttttctacctataaagcccacctcctctgcccagctcgttggagcaccgtttctaaattttcagagaagatgccatcctgattcatgaatcaataaaaaccaatagatctttaatctaaatttgtggtaattttgacttctgacaaagggatattaataactgtataaccgcaccagaccaatctgattcgccttttatatacccaagttgtgagttgtttttcagttgcatggactcccagatggaaggtttcgcacgtaacctgaggatgcccaggtgaaccaagcatgcaaccaggggcggaacctgagtgctcagatcaaagcagggactgaattaagaaatgggcactgcatggtgagatccagaatgcaatcagatcaagccctggtgtcaccccatggcagggtccagtcagatgagcatcccagcatcacctcatcgcaaaatctaatccgatcatgcgtcattaccctatgcttataaaacccaacccagccccaagctcaaggagacagagctgagggtttcctcatgtctccttgacagtcaactcacaataaagcctttcttttctcaaaagcccgtgccatggtgttggcttctagcacatcaggaaaaagcccgttgattgctcagtagcaattgcagcaaggtagaaggacaacagaaactgttctgacatttttttctgagggctttctctgagatgagtaacaaagatagtttcacttttacatttacgtagtagaccatcaggaaattgaatgtccacgctcaggtgtgatggagcagcttgcagtagaccaaggctcccactaacaacaactagaaaagccagaaagcgaagtcagaaaacatctgtttgaaggcagtgaaagctgctgaggcaagaatggggggacttgatattccagagaatgaggaaccttcaaggggtgagctaatgtctgcagtggcttgtattggtgtgtgagggcttttgccagttctggatacaagcatgaggctgagaatttagactttgagaccacagagggccactgctggggacacaaaaccaacacagcgatgtagggggaaattccaaggacaattgctgaattcaaggcttgtatggggcaagaaactgaaatgtaaatggaa

SEQ ID NO: 586751 - DNA, 4001 bp, Homo sapiens
gtcaccaaatcctaacctatggaagtgtcttgtaagaggtgttaccaggtaaatgagttaccaggttaatgagtgctctgtcagttcatctgtgaaacaaagaccaacctctcaggttatattaagggttaaataagataacgaccccagaatataaaacatctgatactatacatattactcagtatatactcctttctcctccacatctttctgcaaactacaatcaatctagacaaaagtgttctcatcctactatggaatggttaaacaacagaacaggaagatttggaatccacaaaatgaaatttttagtttcagctctacggtgaactggctgtgtgttcttggtcaaatcacttaaccttgctgaattggtacgtaaacttgaaacttatctgtttcacagagacactgaagatcaaatggcaagacttcattaacctgccataagatcctgctaaaggccacctccaacagctctctcatcactaagatggcacttatgccactgacaaggacgaggaatagccttaagttctgaaattgaatcctaatggaaccccattcctcgtttggccctattaccctggtagctaccaagacattcaaagctttggcttctgctgaggaaagtaacatcttaccaacctgcagcatgcattaagacttcaggaggaaacatctgaagcattttataaactgtaacatctagagaactgagggaggtatcatcagcatttctatcttcttgggtttctacaaataggcttaatacttggctgaatagtttcttttaatctcatcagaagtcccacctctcttataaaaacttcacttctcaaccatcatttctatttcctttctttacaatgggctccatcaaataattgcccttaaaaagttttctattactttctgggttttctctctttaactgtgtcacaaggagagagaaaccattacttaaacacccgtatcaccctcacctgcggcaactaagagtgtaaactacattcagcaaaaggttgcttaccactacattcaaaagtgcccagtcaacttcactgaatgagtattgacagcgtttccaacatacaataaacttaacctggagggtacggaattaagctcaaatagaaattttaataagcactacattgacagtctttgacctgggaagtcacatttcaaacaagcgaccacacccattgatcaacacaatgcctccgtcatccccgccagctcaagtctttggtagttctggggcatgcacgtttctgttgctgtaaatgtccttccttctgtctggcctgcatggatttcgctccctgactagcggcccccagcaccgtgaggggtacgcgctggcgggtgctgagtagggctcttaacagtcggcttactacttctgaaacctcaggacgtccggagcgaacacctcagcggaataagctgacatccaatccgcgcttcaaattactgaagccattctcacaagctcaaccccaggacaccaggaaaaggaggaaacaggctgggagagcttggaggagcgggcgccaggagtcagggcaggccgggggcggcggctccccagaccgcaggcccgcccgcctcacctgcagcaccaaggcctgcgcggccccgggcgggaagcccatgcggtccgatgggtggcgcagcaagcgatagaagtctgtcttgcggtagaggaagccaaagagaacgcgcaggaaatcctggacgttgcccacgtgctgcaggatgcccaaaagggcctggtcatacagctcggccgcccctgtctccatgtcgcctcccgccctaggtacgcttcacacacacagcgccgcctcagacctgccgactggccacttccggcgtccgcagccaacggctccgccggacggcgcggctgcggaacttccggtccgtgctcgttcggcccccgcggccccgggctgttttccccagacccagctgccccacgggctttgccttgaggtggtcttagacaaaagagcccgacaagggcagcaaggaggttcctacgcggaaggaagcccgtggcttctgctgcgctgcgagggcttgaccgccatgtttgaagcgggcggaaaaaaattatggggcgtgcagtgtcacgtgactgctcggatttttgtcacgttgtctgtggatcctttcttatttctgtgttgaattccagcctgggtatttggaacctatggttaaagatggggctagggtaagctttttgttagtgagccagagacgggaaaatgcgtatatgtgggatgtatgggtttcttattaacagatctgtgagttaaactcagggcgttgcatcagaagaaagtcaagatgacgaagaaaataaagagtgcattcaacgtatattaagtggaaagagctagattcagaatagagaatccgtatgccatcgttgtgaaatatgtacgtgtatgtgtgtgtatagtatgtatatacatatatacgtcatatatacatatgttgttagtgtctgtcaaagtataatcttaaaaaagtaaaaagcatgacactcatacaaatatatcatgaacacatatccaagatttcttcagcaaattaacaatgatatggtaaagctggttcaaaagcattttgaggaagtggagattaaacattttgacaaagcattagagtaagattaggttggatacaaagctggctggtgttctacaagatgataaaaccatagattatcatttctagtgtatagaaatgatttgcacctcttctagattaaaacatgcaagttaacatgtcttcatagtgtataagctttaatgaattgtaaataaaatccaactcaggtaaattgccctagaacagtggttctgaaactcttgatttagggaccattaatcctcttaaaatttgttgaacattccaaagaacatttgttgatatgggttatgcttatcaatatttaccacattagaaattaaaacataaaatgtttaaatatttatttaatcatttttaaatgaccataaaacacattacatgttaacatacttttatgcaaaaaataatgttcttcaaagcaataaaagttcagtgagaggagtaacatagttttacatttttgcaaatctctttaatgagcctactagaagacagcaagatttggccggcacagtagctcatgcttgtaatcccagcactttgggaggccgaggcgggaggatcaggagttcgagaccagcctggccaacacagtgaaaccctgtctctactaaaaatacgaaaattagctaggcgtgatggcaggtgcctgtaatcccagctcctctggaggctgaggcaggagaatcgcttgaacccgggaggcagaggttgcagtgagccgagatcacaccactgcattccagcctgggcgacagagctagactccgtctccacaaaaaaaaagaagaccacaagattctcacatctgcattcactgcaacataatttgcattatgttgttttcattgaagtatatgaaaacatgcaacctcacacagacagttgcaaatgagaggaatattttgtcttttcaaataaatgtggctatttgtctttaaaatgacatcaaaattcttctacaagcgatagtttctattttttttatttttaagaggcagggtctccctctgtcacccaggctggaatgtaacgatgtgatcataactaactgtagccttgaactcttgaactcaagcaatcctcctgcctcagccttctgagtagctggaactacaagcacatgccactgtgcctggctaatttttaaattatttttatagagacgaggttgggcctacattgttcaggctggtctgaaactcatgggctcaagcgatcctcccctctcagcctcccaaagtgctggaattataggtgtgagccactgcacccagccctgtaactggtagtttcttaaaggttacttgccatatggaatctaa

SEQ ID NO: 586752 - DNA, 4001 bp, Homo sapiens
ccccctgcttataggcacacagtgaggaacaacagtccccgtgcctgattggcaccaaaataaccacgcagtttatcctgtggtcctcaggtcaggcctttggattaacaggaacttctttcagtctagtgggacctggcctctctgtagcaggcttccagattcccaggaaatgtgtggctgtagacacaggtccacccagccaggcccggctagtcctccctcctgtgataggagtttataccccacccactctgctcctgctgtggctactgtgggacctggcacccaggggggccactggaagtcacaagggtccttcctgctcccataggtgtgcaggtccaggtccagaggactctgagggcgatgcctccgccaggtccctgctgaaaaaaggaccctggagaaatgctggagggccaggaccaactttcctttatttattttgagacaagatcctgctctgttgcccaggctggaggagagtggcgtgatcgcggttcactgtaacctccgcctccctggctgaagccatcctcctgcctcagcatcccacatagctgggaccacaggcatgagccgccacacccagctaatttctgtatttttagtagagatggggttttgtcacgttgcccaggctggtcacgaactcctgagctcaagcgatccacccacctcagcctcccaaagtgctgagattacaggcgtgagccactgcgcccagccaggaccaacttttctggggtccacacctggacaagacacagggttcaggaccagtgatccttcttggaagttgtggtgtctgagaaaagggaccagatgataaggaagggggcagggaagtgctgggtagaggagggcgtggtctctggccagggctccacacccaggcctgtgcccagggacctgggtgaggacaggcatttctgtttttttgcccaaatgttgcatttcccgagcccgccacgtccccgtcctgtgcctataaaaaaaccccagtggttttttatagtgggcagagacacaagccgctggacgtcaagaggacgtggaaagcacaccaacaggcaccagcaggccatcaactgatggaaccatgagtttggcaggggcggtcagaggagagcccaggctgctcagcagcccgactccaggggaaaatcaccttcccactccaactgccttctggctcccccatctgctgagggctaattccactcataaaaccttgcactcactctccaagccgccgtgtgatctgattgctccagtacatcaaggcaagaaacctagggatacagaaagccctctgtccttgcgataaggcagggagtctaacagctgactaacacaagccacctacaaggctaaactgaaagagcaccctctaacacatgcctgctggggcttcaggagctgcaaacattcacccctagacactgccgtggggtgggagcccctcagcctgcctgtctgtatgttcccctagaggcttgagaagcggggcactgaagaagtgagccacatcctcatcgcacgcccttcgaggaggacaagggaacctttcccatttcactgagactgggtcctggtggcggaggcaggtcagacagggtaaatgggtttgtggcttagtttcacaccaggcccgtgtactttgtcccgacactgatctgtttctgccagaagccacggtttccaaagtaaatttttgtgatttactcctggtctcccccaagcctccgccccgctctccttgtctctctcccaaacccccggccccgctctcctcgtctccctcgagcccccgaccctgctcttctggtctccttcgagctcccggccccgctctcccccaagcccatggctcagctcccctagtctcctgccgcccgctggcccggctcccctccctggtcaccacgactcctggaatccccgcgcgcgcttttcgtacctgcaccgccgcttccgggggcgtggcctctgaccggaagtgaggccaggcacttccggcggcgcgctgcaggcgcggggaacaccaatggcggggtgagctgggcgctgctgctgcgcgtgcagacagcgggagtggttgggggtccgcccggtcgccttcctcggtcctggcctcggggctgggtgccgagcgctgggcaccgtccccgcactcagcgagcgcgacaggggcgaggccaggattccgggtcgcagttccccgggaggagggcgccctcaggtctccaggggcagggccggcggggccgtggggaggccggggccggcggcggagtccaggtggggggcgcagcgccggggcccagatccaaggcgccgggggcgagcccggggcgggatttcgcttctgggccgggtagctccattgcccgcgcttcctgggctgtcgagtgggccctggcccccgggaccggcttgtgccattttcccgggagaccccttaagcgaggggaagacagcgactcacggtcagcagtcagtgcctcctggcttgtcagcacgctttggtgttgcagaagctagaagctttggccttggagccatgagggtggtaacttttatttatttatttaaatcagaaagatggacatagagaccgggcttggtggcccacacctgtcatcccagcactttggaagtctgaggcaggaggatcgtttgagcctaggagttcgagaccagcctaggcaatgtagtgagatgccatctctaaaaaaggtttttaagaattaaaaaaaaaaaaaaaattagcccaggcatggtggtgcacacctgtagtcccagctactcaggaggctgaggtgggaggttcacttgagacccagaggttatggcagcaatcagctgtgattgtgccactgcaactccagcctggatgatagcaaaacaaaaatggccgggtgaggtggttcacgcctgtaatcccagcactttgggaggccaaggtgggctgatcgccagaggtcaggagttcgagaccagctcggccaacatggtgaaatcccatctctactgaaaatagaaaaattagccggaagtggtggcacacacctgtagtctcagctactcaggaggctgaggtgggaggttcacttgagccccagaggctgtggctgcagtcagctgtgatcatgccactgcactccagcctgggtaatagtaaaaccctgtctctaaaaaaacaaaaagaagaaagaaatgcctgggtgcagtggcttacacctgtaatcccagcactttgggaggccaaggcgggcagatcagcggaggtcaggagtttgagaccagcctggccaacatggtggaacccatctatactgaaaatacaaacattagccggacatggtagcaggtgtgcctgtaatcccagctacttgggaggctggggcaggagaattgcttgaacccgggagtcggaggctgcagtgagctgtcactgcactccagcctgggcgccagagtgagactccgtcttaaaaaaagaaaaagaggacatagaacttccttggtgaggttgttgtcagagttaaacaaggggaggtgtgtatagcttccacctgcttagctattgtgggctgtgaataaattgttacatttattgtaacaattgtctagagaatcttggaaattgtccttcaacgattgacacaggtttagttcaattttatttaagacatgtaggtgagaggattgtttgagcccaggagttcgaatctgcgttgaaccgtgacctcaccactgcactccagcctgggctatagagcgagaccctgtctcgaaaaaaagaagaaaaaaagaaatgtgacaggccagaccctctgtactagctgtcaaagccctggaactaggtcactaaggcaaggatctgtccttatgaggttttcttgcagcctgtcagagcccaatgaacatttttgccagatgagaaaataatattactttaattaattaattgatgtatttagttattgttt

SEQ ID NO: 586753 - DNA, 4001 bp, Homo sapiens
tccagagcgtgctcttgctcctgcgtctacccccaggaaccccctgcttataggcacacagtgaggaacaacagtccccgtgcctgattggcaccaaaataaccacgcagtttatcctgtggtcctcaggtcaggcctttggattaacaggaacttctttcagtctagtgggacctggcctctctgtagcaggcttccagattcccaggaaatgtgtggctgtagacacaggtccacccagccaggcccggctagtcctccctcctgtgataggagtttataccccacccactctgctcctgctgtggctactgtgggacctggcacccaggggggccactggaagtcacaagggtccttcctgctcccataggtgtgcaggtccaggtccagaggactctgagggcgatgcctccgccaggtccctgctgaaaaaaggaccctggagaaatgctggagggccaggaccaactttcctttatttattttgagacaagatcctgctctgttgcccaggctggaggagagtggcgtgatcgcggttcactgtaacctccgcctccctggctgaagccatcctcctgcctcagcatcccacatagctgggaccacaggcatgagccgccacacccagctaatttctgtatttttagtagagatggggttttgtcacgttgcccaggctggtcacgaactcctgagctcaagcgatccacccacctcagcctcccaaagtgctgagattacaggcgtgagccactgcgcccagccaggaccaacttttctggggtccacacctggacaagacacagggttcaggaccagtgatccttcttggaagttgtggtgtctgagaaaagggaccagatgataaggaagggggcagggaagtgctgggtagaggagggcgtggtctctggccagggctccacacccaggcctgtgcccagggacctgggtgaggacaggcatttctgtttttttgcccaaatgttgcatttcccgagcccgccacgtccccgtcctgtgcctataaaaaaaccccagtggttttttatagtgggcagagacacaagccgctggacgtcaagaggacgtggaaagcacaccaacaggcaccagcaggccatcaactgatggaaccatgagtttggcaggggcggtcagaggagagcccaggctgctcagcagcccgactccaggggaaaatcaccttcccactccaactgccttctggctcccccatctgctgagggctaattccactcataaaaccttgcactcactctccaagccgccgtgtgatctgattgctccagtacatcaaggcaagaaacctagggatacagaaagccctctgtccttgcgataaggcagggagtctaacagctgactaacacaagccacctacaaggctaaactgaaagagcaccctctaacacatgcctgctggggcttcaggagctgcaaacattcacccctagacactgccgtggggtgggagcccctcagcctgcctgtctgtatgttcccctagaggcttgagaagcggggcactgaagaagtgagccacatcctcatcgcacgcccttcgaggaggacaagggaacctttcccatttcactgagactgggtcctggtggcggaggcaggtcagacagggtaaatgggtttgtggcttagtttcacaccaggcccgtgtactttgtcccgacactgatctgtttctgccagaagccacggtttccaaagtaaatttttgtgatttactcctggtctcccccaagcctccgccccgctctccttgtctctctcccaaacccccggccccgctctcctcgtctccctcgagcccccgaccctgctcttctggtctccttcgagctcccggccccgctctcccccaagcccatggctcagctcccctagtctcctgccgcccgctggcccggctcccctccctggtcaccacgactcctggaatccccgcgcgcgcttttcgtacctgcaccgccgcttccgggggcgtggcctctgaccggaagtgaggccaggcacttccggcggcgcgctgcaggcgcggggaacaccaatggcggggtgagctgggcgctgctgctgcgcgtgcagacagcgggagtggttgggggtccgcccggtcgccttcctcggtcctggcctcggggctgggtgccgagcgctgggcaccgtccccgcactcagcgagcgcgacaggggcgaggccaggattccgggtcgcagttccccgggaggagggcgccctcaggtctccaggggcagggccggcggggccgtggggaggccggggccggcggcggagtccaggtggggggcgcagcgccggggcccagatccaaggcgccgggggcgagcccggggcgggatttcgcttctgggccgggtagctccattgcccgcgcttcctgggctgtcgagtgggccctggcccccgggaccggcttgtgccattttcccgggagaccccttaagcgaggggaagacagcgactcacggtcagcagtcagtgcctcctggcttgtcagcacgctttggtgttgcagaagctagaagctttggccttggagccatgagggtggtaacttttatttatttatttaaatcagaaagatggacatagagaccgggcttggtggcccacacctgtcatcccagcactttggaagtctgaggcaggaggatcgtttgagcctaggagttcgagaccagcctaggcaatgtagtgagatgccatctctaaaaaaggtttttaagaattaaaaaaaaaaaaaaaattagcccaggcatggtggtgcacacctgtagtcccagctactcaggaggctgaggtgggaggttcacttgagacccagaggttatggcagcaatcagctgtgattgtgccactgcaactccagcctggatgatagcaaaacaaaaatggccgggtgaggtggttcacgcctgtaatcccagcactttgggaggccaaggtgggctgatcgccagaggtcaggagttcgagaccagctcggccaacatggtgaaatcccatctctactgaaaatagaaaaattagccggaagtggtggcacacacctgtagtctcagctactcaggaggctgaggtgggaggttcacttgagccccagaggctgtggctgcagtcagctgtgatcatgccactgcactccagcctgggtaatagtaaaaccctgtctctaaaaaaacaaaaagaagaaagaaatgcctgggtgcagtggcttacacctgtaatcccagcactttgggaggccaaggcgggcagatcagcggaggtcaggagtttgagaccagcctggccaacatggtggaacccatctatactgaaaatacaaacattagccggacatggtagcaggtgtgcctgtaatcccagctacttgggaggctggggcaggagaattgcttgaacccgggagtcggaggctgcagtgagctgtcactgcactccagcctgggcgccagagtgagactccgtcttaaaaaaagaaaaagaggacatagaacttccttggtgaggttgttgtcagagttaaacaaggggaggtgtgtatagcttccacctgcttagctattgtgggctgtgaataaattgttacatttattgtaacaattgtctagagaatcttggaaattgtccttcaacgattgacacaggtttagttcaattttatttaagacatgtaggtgagaggattgtttgagcccaggagttcgaatctgcgttgaaccgtgacctcaccactgcactccagcctgggctatagagcgagaccctgtctcgaaaaaaagaagaaaaaaagaaatgtgacaggccagaccctctgtactagctgtcaaagccctggaactaggtcactaaggcaaggatctgtccttatgaggttttcttgcagcctgtcagagcccaatgaacatttttgccagatgagaaaataata

SEQ ID NO: 586754 - DNA, 4001 bp, Homo sapiens
aagagtccgaagggctgcggactgttcttcattctgagatgaagacactgaggctcacgcttaaccccctgctccaggtcacttagctcttagtggtgaaaccaagggtgtggccctacagcccgaatccctgtgccctgggaaagccggttctatggccagacctgccccatccttacctcctagccccatcctcgatggtctctccttcttgcactttgcccccaaagccattccaccggccggccccgaagcctcgctttttcatgcccaggagaactcgctgaggctgcaggaccagcaccagggtatagagcctggaggcgcccatggtccctgggttctgaaaggaaggtgagagggcagagtcagccatgacgtgcgtggaggaagcacgtgccaggggccaggaggaaggggacgtgctctgggaggcagtggggggcgggggggtatgctgtaactccccagccctgccacgtgtggcttcccttgtggcaggtggaaaactgccattgaaccagtgattttctggggtagaaacagaacccagtggtcagcagggctgatcaagcagagcagaggccggcgctaccttccttctccacaagtcagtactcaggtgcagaggacaacatcacctttccagagcgtgctcttgctcctgcgtctacccccaggaaccccctgcttataggcacacagtgaggaacaacagtccccgtgcctgattggcaccaaaataaccacgcagtttatcctgtggtcctcaggtcaggcctttggattaacaggaacttctttcagtctagtgggacctggcctctctgtagcaggcttccagattcccaggaaatgtgtggctgtagacacaggtccacccagccaggcccggctagtcctccctcctgtgataggagtttataccccacccactctgctcctgctgtggctactgtgggacctggcacccaggggggccactggaagtcacaagggtccttcctgctcccataggtgtgcaggtccaggtccagaggactctgagggcgatgcctccgccaggtccctgctgaaaaaaggaccctggagaaatgctggagggccaggaccaactttcctttatttattttgagacaagatcctgctctgttgcccaggctggaggagagtggcgtgatcgcggttcactgtaacctccgcctccctggctgaagccatcctcctgcctcagcatcccacatagctgggaccacaggcatgagccgccacacccagctaatttctgtatttttagtagagatggggttttgtcacgttgcccaggctggtcacgaactcctgagctcaagcgatccacccacctcagcctcccaaagtgctgagattacaggcgtgagccactgcgcccagccaggaccaacttttctggggtccacacctggacaagacacagggttcaggaccagtgatccttcttggaagttgtggtgtctgagaaaagggaccagatgataaggaagggggcagggaagtgctgggtagaggagggcgtggtctctggccagggctccacacccaggcctgtgcccagggacctgggtgaggacaggcatttctgtttttttgcccaaatgttgcatttcccgagcccgccacgtccccgtcctgtgcctataaaaaaaccccagtggttttttatagtgggcagagacacaagccgctggacgtcaagaggacgtggaaagcacaccaacaggcaccagcaggccatcaactgatggaaccatgagtttggcaggggcggtcagaggagagcccaggctgctcagcagcccgactccaggggaaaatcaccttcccactccaactgccttctggctcccccatctgctgagggctaattccactcataaaaccttgcactcactctccaagccgccgtgtgatctgattgctccagtacatcaaggcaagaaacctagggatacagaaagccctctgtccttgcgataaggcagggagtctaacagctgactaacacaagccacctacaaggctaaactgaaagagcaccctctaacacatgcctgctggggcttcaggagctgcaaacattcacccctagacactgccgtggggtgggagcccctcagcctgcctgtctgtatgttcccctagaggcttgagaagcggggcactgaagaagtgagccacatcctcatcgcacgcccttcgaggaggacaagggaacctttcccatttcactgagactgggtcctggtggcggaggcaggtcagacagggtaaatgggtttgtggcttagtttcacaccaggcccgtgtactttgtcccgacactgatctgtttctgccagaagccacggtttccaaagtaaatttttgtgatttactcctggtctcccccaagcctccgccccgctctccttgtctctctcccaaacccccggccccgctctcctcgtctccctcgagcccccgaccctgctcttctggtctccttcgagctcccggccccgctctcccccaagcccatggctcagctcccctagtctcctgccgcccgctggcccggctcccctccctggtcaccacgactcctggaatccccgcgcgcgcttttcgtacctgcaccgccgcttccgggggcgtggcctctgaccggaagtgaggccaggcacttccggcggcgcgctgcaggcgcggggaacaccaatggcggggtgagctgggcgctgctgctgcgcgtgcagacagcgggagtggttgggggtccgcccggtcgccttcctcggtcctggcctcggggctgggtgccgagcgctgggcaccgtccccgcactcagcgagcgcgacaggggcgaggccaggattccgggtcgcagttccccgggaggagggcgccctcaggtctccaggggcagggccggcggggccgtggggaggccggggccggcggcggagtccaggtggggggcgcagcgccggggcccagatccaaggcgccgggggcgagcccggggcgggatttcgcttctgggccgggtagctccattgcccgcgcttcctgggctgtcgagtgggccctggcccccgggaccggcttgtgccattttcccgggagaccccttaagcgaggggaagacagcgactcacggtcagcagtcagtgcctcctggcttgtcagcacgctttggtgttgcagaagctagaagctttggccttggagccatgagggtggtaacttttatttatttatttaaatcagaaagatggacatagagaccgggcttggtggcccacacctgtcatcccagcactttggaagtctgaggcaggaggatcgtttgagcctaggagttcgagaccagcctaggcaatgtagtgagatgccatctctaaaaaaggtttttaagaattaaaaaaaaaaaaaaaattagcccaggcatggtggtgcacacctgtagtcccagctactcaggaggctgaggtgggaggttcacttgagacccagaggttatggcagcaatcagctgtgattgtgccactgcaactccagcctggatgatagcaaaacaaaaatggccgggtgaggtggttcacgcctgtaatcccagcactttgggaggccaaggtgggctgatcgccagaggtcaggagttcgagaccagctcggccaacatggtgaaatcccatctctactgaaaatagaaaaattagccggaagtggtggcacacacctgtagtctcagctactcaggaggctgaggtgggaggttcacttgagccccagaggctgtggctgcagtcagctgtgatcatgccactgcactccagcctgggtaatagtaaaaccctgtctctaaaaaaacaaaaagaagaaagaaatgcctgggtgcagtggcttacacctgtaatcccagcactttgggaggccaaggcgggcagatcagcggaggtcaggagtttgagaccagcct

SEQ ID NO: 586755 - DNA, 4001 bp, Homo sapiens
tgcactccagcccgggcaacagagtgagactccatctcaaaaaaaaattagccaggctagccaagcatggtggcgggcgcctgtaatcccagttacttcagaggctgaggcaggagagttgctccaacccaggaggtggaggctgcagtgagccgagatcacgccactgcactccagcctgggtggacaggatgagactccatctcaaaaaaagaaaaaaaaaaaaaaggaaaataaatgtgtataccttgcgtactggctcacacctgtaaacctaccactttgggaggccgaggcagaaagatcgcttgaggacagcagttcgagatcagcctagccaacatggagaaaccccacctctactaaaaatacaaaaattagcccagcgtggtggcacatgcctgtaatcccagctactcaggaggctgaggcaggagaattgcttcaacctgggaggcagaggttgcagcgagccaggatcgcggatcgcatcactgcactcccgcctgggagacagagcaagactccatctcaaaaagaaaaattaaaaaataaaataaaatagagaaatgtattatatacaaccacacgttaagcatatctaattgggaaggaaggaccgcaatattaagcatgtaacttcattactaaccttctaatatatacgtctaatatcataaaatgaattaggttgtgcttaagcagtagcactaagtagtttaagcacctaagactgacttagatcattagatgtttaactctggggacattacgtaactatttgaagcctctatttccaaatctgtaaaacggagtatgtaacagtaactactccaaaggtgtataaacgggaactgaatgagataagcacgataataagtgcaatgctgggatatagtatgtgttcagtaaacatagccttcattataatttatcatagcttttctgaaatgatttgatttacaaaacagatttagacaacttttcaagaatatcagtcctgtggaaaatagaaccaatactttaaaaaagagtccttttaagtgagattctcacaagcatttaccacacagatatactcttaatcttgcccgcgaacttcagagcatctcaatcgaggcattaacattctaggcaccaaattatttttccggactgctctgaccatgaaggactttctgcatccttgccccgcctactatgcgacagcagtgtaccccaggaaatatgacaatcaaaatgcactcactcattcaaacaccactggagggcggtacggcccgaattgagaatcaccgaaagaggatccaccccaaatcttccagagttcctttactaccttctagattcaattccaccccgaaaatctacagctccaaaggtacaagaacatccagggcctaaccacatccgcagggttagaagacgtctgctgaagccccgccaccctcttcctgaccacctttcagatggccgacttcataatagggagtattcgctgcctgcaagatctcccaccctataaggaactccgacgcctactttcagcctctgctcatggctggaaaatatctcgggtcctctggcttcactgtggaagacctgatgcgtattccagcgaaatcgggaccacagacgcacagtgaaacttgggggtgagggggaccagactcagccctgggctgtgagagattacacacctgggtccagcggcccaagcctcactgcctggaatctcaaaccccaactcgagggctggagccgcagcaccgacgcgcgccattcaaactggggaggggtgggactctaggcccagaattagggaaaagcaggcaccgcacataagtggggtcctagactccgagaaacctcacggtctcgtctctccatgaagacctggttatcgctcagctcaatcgtctttctgtctggccacacttacccgaatttaccgccaaaggcgtcgccatcttagaggcgcactaacagagcccttctgccgcatggaggccccgggaaagggtgaggctgacctgagcgaagcctgaacaaaaaggcaccacactgtcccctccacgctgggccgtcccaggcgtacaaaaggctccagaatctgctctgggtcacaaacatcaattttcattgggattattcccattcaaataaggcgagggcaaccacttcagagacacgaggtcctcgatccgacgttcatcgtgtagtgcatcctgggacttgtagtttctaatgatgagttggttaagtggagaggaaaaagtaaagtggaatagaaaaagatattctgagagtagttattaaaatgacgcccatttatgacattataaaagccgtaaattcaaatcattatctccgcttcaagttaaatcttccttacagtggggagtgaagtaaggtatgaagtgtctacacctcaaaaagccactgaccggttacaaactaagtttccgtgacatttcagtttaccaaatatattctgtcaacatagttgcgtagagcgaaacaaatcataatttttaattataaaattttcaaacggatacaaaattagaatagcaaacactcagcatcaataacgtggccaatttcccaccacggcagccccaacccacccttaccaccccaacaccctcccctccccaccccccgcccccgattagtttgaaacagattccagacatatcgtttcataatcaccaagtatttttctacctgagcacccaaagtagctgaactctttcttcagctgttaaattttagtttgctgattttcaaactaaaatgtaaataatcattgctatttacagctatgtattaagaaaaattttatagccattatctcatttaatccctgcaaaccattctattgggaaaatgatatgattataactatttatgtcagagacgctccatgtgccttacaatctcattgtattaactctccatcattcccatttcactgttggaaatcagaatcaaataatttagacaaaagcatagagtatgttaagaatatccagaactggcagggcgcagtggcttatgcctgtaatcccagcactttgggaggccaaggcaggcgatcacttaaggtcaagtgtttgagaccagcctggccaggaaggtgaaaccccgtctctactaaaaatacaaaaattagccaggcatggcggcacgcacctgtaaccccagctgttcggaaggctgaggcaggagaatcccttgaacccgggaggtggaggttgcagtgagctgagatcataccactgcactccagcctaggcaacagagtgagtgagactccatttaaaaaaaaaaagaatatccagaacagaacatttattcttttgaacaaataatatcaagtgacacaatgtacattaggtttgaaacacaaaaatcactggtgattttttctaaaagtcattgatatatagagacaaatgccaaactacgattaaagtggttttaaggagtgaagtggggaagagagaaagtaaacgcaaaggaatttttcaagaagtttatcatgaaactgagaagaatactgagcaggaacttgacaggaagcggcattcaaagatttctctctcagcacagctattacaagcctttccctctccacatgcactttttaagcccacacgcttccctctcagtagataactttgctttctataaagtaactctttaaattccagcaactcctcttcacctgtcattacactttacaagcattctctcacaggcttcttcaattcgtagcaattgggatattgccatcataagcccctctaaaactgcgcttggtatgtttaccagttatcagtcatcaaattccatgggcacttttctgaattatgatagttataggccgggtgcagtggcgcacgccggtaatcctagcactatgggacgctgaggtgggagaatcacctgaggtcaagagttcgagaccagcctggccaacatggtgaaacctt

SEQ ID NO: 586756 - DNA, 4001 bp, Homo sapiens
gttccaaattcactgggggatgatacaactgaagaaactcacttcctccttttttttttttttttttttttttacattgcttttggtcttcatacttataattccagaaacattcatttgtttctgggagctaaatacaatttgtctgccaaattttgtttacactcacattcatcagacatgagtcctaattttcggtctgaaatatttcactagattaattgtggaggaaataaaaggactgtcttccctgaagtgggatcagacgtgaaaccatcacgcaatacaaggtttaaaggttagatgaggcccgccgcggtcgctcacgcctgtaatcccagcactttgaaagacggaagcgggagtatcaccttaggtcacgagttcgagaccggtatggccaaaatggcaaaaccctgtctctactaaaaatacaaaaattatcaagggcatggtggcgggcacccgtaatcccagctactcgggagactgaggcataagaatcgcttgagcctgggaggcggaggtcgcagtgagccgcctgactgagagagcaagactccgtctcaaaataaaataaaaaaataaaggtcagatgaatagccctaaaggaggggaaggaagggagacagcaccgaattattaacccgatctttaaaaatcttgtgttgttctaaggtttcatgtctaatctctcctttccttgaagataaaaagctttgacaatgatctaggcccagggactagatcaacgtggcccccgcatctcctttcctcacctcccggatagcccttaactgggcgtcccacattcccaatttcaccccaaatttatgagcaggtgcatttttgcggtatggctctataggttttattagattttctttttttcttttctttctttctttttttttttttgatagtctcgctctgtcgcccaggctggagtgcagtggcacgatctcggcccactgcaacctccacctcccgggttcaagcgattctcctgtctcagcctcatgagtagctgggattacaggcgcgcgccaccacgcccggctatttttttttttttttttttttttggtatttttagtaaagacggtgtttcactatgttggtcaggctggtctcaaactcctgacctcgtgatccgcccgcctcggcctcccaaagtgctgggattacaggcgtgagccaccgcccggccggttttattagattttttcaaagaagtccacgacttctccaaaatgaagtcctgattctgacccaagctgctagcctcaccctcgaaaaaacaacttagtaaaaattatattcaattccggcatttacctacaaggtagtttcgataggtacttccgatttaaaaactcagtttcgcacaagcatccaggcccaaacccaggtcctcagaagctcaataaaaacggaccacatgaataatatgtagataaaaccctcggtttaaaaacgttgtgcagggcccagtagggccggcaaggccgcgacgcgggcacgttggggtcaccagcagcgggaaacacgcgggacgcccggtccccgccggcggacccttcccggctcggttaccgcggaggattcagaggagagtcacctgaaggctgctgctgcggttgctgccgtcctcctcctgcacccctagcaccgggatgttcgttccagcaccgatctccaaagcggcaccggccttgaaggaagaattgacaaatggccattgcgacggcgtcgctgacggagggcgtcttcagtctgcaccgttcgatgcctgttactgggcagagagccctaaggcaacctcggcgcccggccgggctactgtgacgtcatcttctcgcgcctgggaaggcctttttccgcctctcacccggcagtgccatgagacgcatggacttgagccaataggacttgagaagagcggaccgctctgacgctttgagtgtgtcctgggaaggagggatgcttgaacggttacgtgaagaccggaggcgcgtttgaccccggtgcagggcctcggactacaggaaggctggaggtccaaaatgagaggaaagcggagcaagcaaacgcagaacttcagcaaggccctcagaggagaattagctatgatttgagagactgagtcgttcttgctgagacggtaaaacttagcttgggctgagaaagtaacaaactgcctagcctttcatctggatggataacagagtcaaataaagccagacgacgttaagaggaaacaatgtttcttttaggacatgctgcaacggaaaagtattaccacttaagtacattcttactacacactgagaaaccttgttatttcttcttttttttttttttttttgagacggagtctcgctctgtcgcccaggctggagtacagtggcagagcttggaggcaagctctgcctccaaggttcatgccgttctcgtgcctcagcctcccgagtagctgggactacaggtgcccgccaccacgcccggctaatttttttgtatttttagtagacacggtttcaccgtgttagccaggatggtctctattttctgacctcgtgatccgcccgcgtccgcctcccaaagtgctgcgattacaggtgtgagccaccgcgtctggccgaaaccttgttctttcaagtccacataaacgttgctatttgaaattatatcagaacgagtgaaaagtcccatccttgcctggaggatctaagtctctttgacgcagagaagcagcctcaatttctatccaggtgtagagcttcagataaacggttctgaaaacattctgtattttcttaactttgcagtttccaaggaaacatgccctacattcaattctcgtccagacctgatgttaatgcctttacacacagctatgctttgagatttcatttaaatttcacctaaacttcactctccccgccaaaacatacaataactaccttttattttgtacggtgagacacaccacagctcctctggtgtgcagtcttcttgattgcaataagtcaatagatctgactttgttggattacaggtttgtgctggtggttttaggattattgagctgggagtgagccatcattcttgctcatgtaatttgtttggattttgaagacagcagaatctacaggacgggaactacttgtccaaactagttttttattttctttaatcaatgcaattcatttattttgaaacaaatttatggaaaagttacaaataacagtacaaagaacttttttcctgaaccatttgagactatgttgcagacctaatgccccatgatccaaatacttattgtatattttctacaaacaaaccagggcattctacataaccacaacacagccaacaaaattaggacattgatactgatgcactactactctctaatccttagactccatttatgttttgccaaatgtcccaatattgtcctttagaggaaaagggttcagttcggaatcattgttgcttagtcatatttcttgtgtctccttcaatttggaagattttttgtttttccttttcatgaccttgacactattaaagactacaggctgcttatactgtagaggttccttagtgcaggtctgtttgatgttttctcttgattagattcagattatgcatctttgtcaggattatcacagaagtgatgctgcggttttcacattgcaggttgtgcacaatttcaatttgtcctgttacctgtaatgctcaatggattacttgcttaaggtggtgtctgccaagctgctctaccataaagttattcttttcctttttgttattaataagaattttgtggggaggtactttgaaagtatataaaaatctgattgttcatccaacttttagctcattcacttatttatttatatcagtatggactcatgatttccaatgttattcaatgggttataatccattactatcattatttattttgatgctcagatcatctccaattt

SEQ ID NO: 586757 - DNA, 4001 bp, Homo sapiens
atttttgtatttttagtagagatggggttttgccatgtttgccaagttggtctcaaactcctgacctcaggtgatctgcccacctcggcctcccaaagtgctgggattacaggagtgagctacagtgcccggccgacatttaggtagaaatcttacacatattcctatctttggtctctctccgcttatctttgtgaccttttctttacagataagaacaaatcatttgtggacttgaaaagagttaccatagtaactgaaaaaaaacccgggagagttaaaatgccattcttgctgctctcttttaattaataaactctaaaaaggctaatccacttgggcactacttaattaacaatcaattagtaaggaaaagatatcgaagcagtaaacttaagtgacagcgaaaagttctgttgaccaaacatggattctctcctcctcagaaccaagttacagttggagttacagtaaatacttcgaacaggtccttcggtatcctgtaggaaatacagacaaaaacgcaggtcatttacttttttgtttttctttttttgacacagggtctcactctgtcgcctaggctggagtgaagtggggcgatcatggctcactgcagcctagacctcctggattcaagcgatcctgccgccttagccacgcaagtagcggggactacaagcacgcgccaccacgcccagcttattttttgtatttttatagcgacgtggtttcaccacgttgaccaggctagtctggaactcctgagctaaagtgatacgtctgcctgggcctcccaaagtgctggaattacagatctgagccaccgggcccagcccaattactttcttcagtctgagtatgagcgccggaagaaaagctcctacctgcatctattttttttagacacagggtctccctctgtcacccaggctggagagcagtggcgcaatctccgctcggctcactgtaacctcagcctcccgggctcgatcgcatatatatatatatatatatatatatatatatatttgtgtgtgtgtgtgtgtgtgtgtgtgtgtgtgtgtgtgtgtgtgtgtgacggagtctcgctctgtcgccaggctggagtgcagtggcacgatctcggctaactgcaacctccccctccagggttcaagccattcccctgcttcagcctcccaagtagctgggactacaggcgcgcaccacagtgcctggctaattttatatatatatatatatatatattttagtagagacggggtttcaccatattggccaggatggtttcgatctcctgaccttgtgatccgcccgcctcggcctcccaaagtgctgggattacaggtgtgagccactgcacccaggcatcgatcgcttatatttttaaaaagatgttttcttcgtttcctagccccttctacccacctatgaagttccgcaggctttaatgctattgctatggccataagaggccaagctggcgggtgcggttccctaatacggttccctcagaggcagccgactctgcccagggcgagcagcgccgcgccgtggggggacgctcctagggtccccggggcactggttgggggaggtgttgggcgcacgtacccaggctcaggtgaggcgagtgcgcatcttgggatgcagctggcgctggcggcgcttgcgctggccattgaggagcttctgcgcgaccttgcgctcgtgcccgccaggtgcaggccagttggtgcgcagcgcctgctcgcgccgagtccggcccttgctgcgccctgccccgcaggccgggaagtcgcgcaggtagtagtagtccaggcagtcgtaaagctcctcctcgtagcttatgggtggcggcggccgagccagagcctgcagacgtggaagcgcccgctctgcgggcgcttccatcctgcccaggcctgtggccaccggcggccacctgcccgcgtctgggcgctcctggaagacccagcagccccgcctcgagttccgatgggctccgcgtgaaggtgggggtgccttcggcgacgccacagaggcggaccttcgacgacgtcacagtggcggtacagtgcctggagcagggctgtcttctccttggagtgcagcctggtaaccgggacctccccgccaggtcctgttgttgctggagaagggtagctgacaaactccaactcagcacagtgtttatgttggtcaaaaataggaaactatgttcaggcgcggcggaggtgggaggatcccttcaggccaggcagtcaagagcagcctgggcaacatggcgcgaccccatctctgaagtcccacctcagcttcccagctacttgaactccaaggttcatggctccaatgagctatgttcccactacatcaccccagcctgcgagactgaggtaaactctgtctaaaaaaataaaaaagaaaactatccaagtgtgcaatagggagggactgcttaaagaaaacatgaggctgactgggccctgtaatcccagcattttgggaggccgaggcgtgaggatggatggcttgggcaacatgacgaaaccccgtccctacaaaagatacaaaaattagccgggcgcggtgcacccctggcctaatttttgtattttttgtagagatgggggtctcgctatgttgcccaggccagtttcgtcctgggttcaagtgatcttctcaccttggcctttagagttgttgggattacagctgtaacccttcctgggttaggctatttaataacataagaaagtgtggtgactccgcctcaccttgggaggccaaggcgggtggatcatctgaggtcaggagtttgagaccatcctggcccatgtggtgaaacctggtctctacaaaaaacgcaaaaattagctgtgtgtggtggcacatgcctgtaatcccagctactcagaaagctgagatgggagaattgcttgaacctgggaggtggaggttgcagtgagccgaggtcgcaccactgcatcccagcctgggcgacagatcgagactccagagtttgagaccagcctgggcgacagatcgagactccagagtttgagaccagcctgggcaatgtagtgaaaccttgtttctacaaaacacacaaaaaaagccaggtgtacctgtgtccacctgtggccccagctacttaggaggctgaggcagggagatcacttggggccagcaactcaagtctgcagtgagctatgatcatcccactgctctccatcctgagcaatagaatgagaccatgtctctagatagctagctagataattgatacatagctttctgtcggaaatttttttcctagatttgaacctgtttttctaaagtagcattcaacacatcagcattttacagtattattagttgttaatatgattgtttttctgaaatactgtatcctttacaaaagcagttttgtctttcaaagcacatagataggtcctcaagtgaatttgtctgatgttggtgaccttggtaccattttctccagttgattggaaaagtcagtcaataatttcaggtcactgttggccttaaagaagagcccaaaggtagtaagcaagggtgctggtgttcagtcgccttctagaagcattttcaccttcccttaatgtttctctttatgaatatagaagtactgtatgtagaattgacccagtgctgccctggcaactttgtagattaggccagatttacattttttacctttatgagaggcaccctggtaggctagtggagttacacatgaagtctgatctcagctgcactgtccagagatgcaacacagtccaatcaaataacatcctctgagcctgtttctttagttgttaaataaggataataattatacccatctaaaaagacagcttattgtatttgagtggtcttttattttctatgaaactgtctttaacacagcaattattttcattgccataccacatttgtgttttgtttttgtttgagatggagtctgtttt

SEQ ID NO: 586758 - DNA, 4001 bp, Homo sapiens
aaaatggggtgggaaccccggaaaatccgcaggaatccagagaccagcttgccaaagttgctccaacacagctgctaggaagctgctctcactgaactggcggcgtaacccttctcccgcgtgtccccagtttccttgcctcccggccggggtaaaaatgcgaaagccccgaaccttccaagacttaccaagtagacggtgggctgcaggaggaaaagcacgtaccagcacgcagcctgcattctcccgcgtctcaaacttccttggcggtgccttctttgagtctttgttccttcagaaacatagatccacctgacatccactttacagagcaaggagcgctctcagcagcctagatgcaaataaaattagacatcccatgactacgcgggcaaggttaggcttgacaatcaagcggggaaagggggtcgtagcggggagtgggggaccaaaaaaaaaagggagggagggtacgaaaaattgaaaagcgagtaaatccagcgcctgagaccagcaagcgcgcggtccgcagctggggaggcgggcgggcggacgagagggagggtgaggggctccttgccccctgcgctcctcgggtgcgagttcccaggcggcggagcacactgagccgcgtgcaggctggttcggagcccaggcttctccggcagcgagacctgcccttgtgttgggtggcccggcggctcggactaaaggcggcggctggttcttcgccagccctggcagtgctcacacacgtacacaccagcagagagagatagaggggaaagataaagggagagagagagattgagcgaggggggcgcggtgagaggaagaggtaggtagaactgaccgcgattaggtgctaggtacctcaacacgttcggtgaagtgggggtggggaaagagaatgcaatttgcatacaggaaagcagggatcagtttacccattcgaacccctggcgcacacagagatacccacgaatgctcacagtcacatctctagcactacttttttcgagccaaagggtacagccggtcgctaacttctagagaagaagcctcctccgagctgtgagggtcacctgccaggcttgttctctttcctaaccagcgcccctccctgccgtcccttcctcgtgcccaccaccccgctcccaggtgtaccctccgggaacagcggaggcaaagggtacgtaccgcacaggacttggggcgaatcctgcgagaagggaccgctctgggcaggctccatggagaagctactcgggcctggcgtctccagcgccccggacgtgccctcccaggcgctccgtctccatgctcgagcgcagacgggtccggctgcctcgtccagctttggcggagtcgccgtcccagtgcccgggtcgcgctcaggattggttcgcgggagccaaggcttggcacagttggattcacggtgcaggaaacttaagaggcaagagagggagggagcagtagaggaggaaagagaggaagacagaaagggagggagagcaagagggagggagagaggggaatgcgccgggctgctgcaccggacggactgggactgccagcgctggcacccggacgaacagtccaggactctcggcttcccacagctgcctgaggatggtggaaatgacttaaggggaggagactgagcaagtcctctggacttgaagtggagagataagacactggcctttcggaagaaaagagaaccacacggcagacgagagcagtccgagtttctgagggaggggtggggtggcgagaatctggagcctgcggcacacggagcagctgtacctctacccgcgacgctgggaagcccaggagccggtccccagtggagtcccgggcgctgtccctggtgctgcccggccacccggggacgctctggagcgctttgggtttccggcggccgcggtggtcgtggtttctccgcagagccgcggcttggcacgcctaccttcctgacacggacaattactttggcacgtgggtgaatgattcctcaaagactaattagtaccctgtgtaaacagatccggctctcaggctctcgcgggctgggcccacagggacaagtggctcccgcggtgtcttcggtggccgcagcgcccccttcccggggggcgtagggaagatcgcaaagcccaggggagtggcgggaagagcagccgggagtcgcgtagggcggggaagggcgcgggagggtgcagggcgcccctgccggcctcgagcgccgacgccgggcgcctccgacctgtggctgccgggccggaggcgggggagccgcagactgccagccattcagctcgagacagccgagaggactgggcgaccttggcctctggactcctcgccgccggctgggctgagcgtgaagggggaggaggaggacgggggatgcttcgagccgtcaccacctccctcgctactgacacctcccactcaaccagcgtctcccagactcggcctctgtgctccgactctggctgtctctgtctttctcagtctctcccttactgtccctatttctcagtatctttctcactccctctctctctctgtctccttcttctgtcattcttgtggtctgcgtctctgtccctcagcatctttctgcctttttctgcctttctgtgtgtctcactcaggatttctgactctaggtctctgtatctctgtgcctctaccgtgtccctgccattccccctcaaaccctgttttgttttttgttttttttcctccacccttccagtgcaccaccaccagagcagtttcaccagtctcgggagacagccaggaccagcttcttctggtgctggtggggttgccagtgctccttgagcttgcccaaattcagggcacaaatcggaacccggaagagggtatctcttccccaaccttgcccattgcatctccaagcctgcccttcaccagagcctctcctggggtgatgcacatatccatatcaatctgtaggaattgtatggaaatttatctcaggaacctgagttagtgacatcaaaatcgaattgtgatatttaatgagtctggaatgtcctttcctcaagtgtggctgtggacactctggcaggtctgggcctagatacaatgtacactctagacaataggtcccaggctgaattcccctggatgatggagaccacccctcaaacaaggcagtgacaatcagcagagccacccagtcctgcagcagaggcaagaggagccccactgagaccttcccctggaatcagatctccaaagacctccaaattagatccccactgtagaacatacctaccagcactttgaggtctacactctcccttccagctaaaaataactctttaaagagcaagctcttctaatcttaaaagttgtactctgctgctgtgacctcctggaattcattggggcatatgcagaataaagcagtgaagcacaccttctaactgtgtctctgaaaatccacttcagaaaaaacgcacatgtacatatagcataattacaatgttttcttgactattttcacttaccagctatttcattttcttaaaaactttaaactttaaagaagaaaaattaaagtattggggcacccgtatctgaggccaaatggtcaaagcaggggcaaaaaaagctttgtctaattccatcctctaggattcataaggctatcctaaaattgattcctatttgtacaggagctcccaggcctcccagactggagtgtagagctggagcaaatgttgcctgcctctatctggattcccagctacaatgctgtcagagctgaacttctgtctgacctttgggaaaatgagaaagaatccggctagctttggaatataccaagttcttttctaaaccttactttaaaaacattctgcttctagtgccatttagccttaaaaaaatactgcttgtgaaatagaaagatgatcagagaccttaaaatgtctgtctgaatgggactgatt

SEQ ID NO: 586759 - DNA, 4001 bp, Homo sapiens
ggggaggcagacagggattgcaggggtctggaggtcgtcccctgccctggctctttggcaaggcccagcctgcatgtctgcccaccacacacacaaccccatcacttgaccactcacctcccccagcagggaaaactgggaggaggccaagtggatgttctctgatgcccctgaaatgaccccttccctagaccctgggagagaggcggggcctgccccttccaaggtcaggtgacaggagagcccgcagccagccccaaatttgcagaaaggagaagggctacaggccagaggtgagtcaggaaggagtgactcgggcctctggggatggggaacaaccaaaggggtgctcctaggctgtaaacccccccacaggagagcaggagttgggccaggacagtgtgtgcaatcctggccattccgtactgactctgagatcagagagctcactcatgacaaggctgccggcccccgagaagggctgtggcccagtgagggggcaggcagaggtgcggaagggaagggagcagtctggggtgcagccttacctcctcttggcctcctcttccttgtgctgcctccactccagcttggtttttcggtagaggaggttcatctcgtggggcaggaggtgggggctggggggccctgctcagtgccaccaggcccggggggcggccctccctgggtcccggatccactggcgggcggggtgggtgagaacggaaaaaaaagaaaggtgggatgggtgggggccagggatgaatgaaagagagaaaacggagaagagacatgactcgggtcctcagagaggaaaacacagacagaaaacccaacacagcttcgaggacccacagacagacagacacagaccccgacaaaggtgttcagagccccaaatacacactctggagagaccaggtcaacacagattcccttcttgtgtaaagacatcccgatccaccacccatacaggccccacaaacggactgcaacccctcagctacacaagtacacattcagacacacaaaccacggagccaccgacccacatctacagacagaggaccagacgcagagattggcataggtaaacagaaacctagggatagacaggcacacagacataaacacccacagacacacccacagacctccagacacacacaaatctgctacacagaactggacacacctacaggcagagttatgcccagggcctacttgcgtacattgcaccccactgggaaaaggggagatggtcagactctcccccctatcttgggctgtagggggatctcatgagggcagggtggggacgctgaaggaaggatgggagacaccctgagttgggtatctaaaataccacccatccatctatctccactgcctgccttcccccacttccagtccttccccgggcctgggccttggtccaccccgattctggctccctggccctttagcaatggtttagtctctgcctccctccctcgctgatggccccaatcaccttcttcttcctccaggatttgggaggccccctggttttcctcttccagtccccgcccctcaatcccacccggggggctccagtctggccccactgctaccttctgggctgcggcctccatacctgctccggttttccttcccccaaacccacactcttcttttcgccttcagcctcacttctcctcccaggcgcccctccttacagccgtcctcccccttcccctgttccaaacctggcctgcttcatcccccttctccatccaagggccccaggttcctggcacccctccccttccccttgtcctgctaccctgggcttctccgcctttcgctccgccaatcctccctgtcccttgtccccccaccccaaccttcctgcaccaagcctccccaggttctccatcaccgtacctggcctgccgggcgccggcccccccatgccgggctccgcccggagcaggaggagggaggaggagagacagagacagaccggggggagcgaagctgggccctgccgcagagacagccccgcctccgggtccgcccccagacccgcccccggccccaaacccacccttccacaccctccaaggacggaacgggagcggccgtgcggcgcggggccgtggggctggggcgcggggcgggggagccgcggagcctgcgggggcagattcggaggaaggtcgtggggcgctgggggcccggcgccagcccgtcgcggtctttgggcgtccgctcctcgccgcccctcgccccctgcccggccggtcggtgctgagttcggtctccccggccccggcggagcggcgtgcggcggcgccccccagcggcagcctggggcccacgcccccgcaccgtgtaccccgtgcaccccgtgcaacccgtacgcccggcgcgccccgggtccgcacccagcgtcggtccggggccgaggctgcggctgcggggcccggggtgcagtgaggcgctggggccgccagggggtgccgctttccgggccgaggggctccgagggtggggaacgggacgggcggcggctcagcccagcagggggcgtgctccggcggccgcgccccctttccccaccgcccccaggtgccaggagagcacctgagttggctcgcgggggaatcggctgcctccccctgcagcctcccgggggtgcccggatctcgttccaccgtctgggctcaaagctatccgcccccgtggcccgagtcctcctctcgtgacctttgactcccccggcgccgctcgcaacgaccagggtcgacctgagtgtggccaccgcggctaccaccctggcactgtcggggggccgctacgggacgtgacctcgacctccccttttctcatttatcttttcttttctcattatctcccctagaaataactccctctgaaatcccttgggctcacagctctgcagcgggggtaaatcagctcgagaagacctcggttgtaccttccacgggctggaaaatgggcacggcaaagataggcacggcctgatccctggagcctgcgaatgctactttccatggcagcgtctttgcagtcttgctgtgtggctttaggcagatcgtgcaacctctctgagagacgctttagtccggggatgtccactcttttaacttccctgggccacattggaagaagaatttgtcttgggccacacataaaatactcttaacactggcggggcgcggtggctcacgcctgtaaatcccagcactttgtgaggccgaggctggtggatcacctgacatcagaagtttgagaccagcctggccaacgtggcaaaaccccgtgtctactaaagatagaaaaaataagctgggcatggtggcctgcgcctgtaatcccagctactcgggaggccaaggcaggagaatcgcttgacctggaaggcagaggttgacgtgagcccagatcgggccactgcactccagcctgggtgagagagagagactttgtctcagagaaaaaaaaaaaaaaaacgaaaacaaaaacaaaaaccaaaacttaggcgttttaagaaaatttaccaatttgtcttgggccacaagctgcccgtgcggttggacaagctggctttagtccattctttggaaggggaggggtagtaaaataataccaaagtgccttgtaaattgtaaaaggtcccacatattataggctattaagaatgctcccaggggagggaaatattaaaacacttaaaacccatttcacatttatacctttagtatgattagtttatatgtataggccgggagcagtggctcacgtctgtaatcccagcactttgggagtctgaggcatgcagatcacttgaggtcaggagttcgagaccagcctggccaacatgatgagacgcccatctctactaaaactacaaaaattagccaggcgtcgtggcgggtgcctacaatcctggctactcgggaggctgaggcaggagaatcacaacctgggaggcg

SEQ ID NO: 586760 - DNA, 4001 bp, Homo sapiens
ttgcatgggtagatgtgcggtcaactgactcatgtcctttgctttaatgatgcttggccgaatgaccaacaccaaggctggccattgaagaaatactgagcaacctggcccccactgcaccccaggcccactcagcagtgccgggtaccagacagactcaggacaaagcttacttaagctcttcttcatccaggtacccgctctggtcgttgtctatgaaccggaaaacatccttcacctgattggctgacatcttggagaggcctgatgtctggaagaatttttggggttcaaaagtgtctgggtctgaagaacagagaattggttattctgacgcttgttggatcacattctatgttggggccaaggtactaaaaacacagataattaaaaacacttcaacaatatccctgagctacggggatgctcaactggtccaagattttgggacagccaagacttgatggctctgtgatggcatcccatgtcccctccgccccagtcttccctcctccacttggttttgtccattttccttttccctcctcatctcttctgtgcctccccctccccctggcccactttacaggctgtgtggctgagcccccagcatccctggtctaattggtagggggaaatgcaatcactggatttcaacaggctaaatggcctttggcgcttttttttttttttttttttttttttttttttttgagacagagtctcactctgtcaccaggctggagtgcagtggcgtgatctcggctcactgcaacctctgcctcccgggttcaactgattctcctgcttcagcctcccaagtagctgagattacaggtgtgcacccccatgcccagctcatttttgtatttttaatagagacagggttttgccatgctggccaggttggtcttgaactcctgacctcaagtgatgcaccggcctcggcctcccaaagtgttgggattacaggtgtgagcacgacacctggcctttcagtgatgtcttgctttcatgtttagtaggtttcttttgtcttacagatgtgtaatcgtgtgctcagatcccagatctctataattttagttatctaataaatagcagttttcttctctgattccatgaattttccagccaacctcttatttatttatttatttatttatttagagccagagtctcactctgtcgtccaagctggagtgcagtgtagcgatcatagctcaccacagcctcaacctcctgggcttcagtgatcctcctaccttagtttccagagtagctgggaccacaggcacatgccaccatgccccgctagtttttatttttattgttatgttgtagagatggagtcttcctatgttgcccaggctggtctcaaactcctgggctcaaacagtcctctcaccttggcctccaaaaagtgttgggattacagatgtgagccaccatgcctggtctactttttttttttttttttgtagacagagtcttgctctgttgcccaggctggagtgcagtggcatgatctcagctcactgcaacttctgcctcccgggttcaagcaattctctgcctcagcctcccgagtagctgggattacaggcacccaccaccacgcccggttaatttttttgtatttttagtagagatggggtttcaccatcttggccaggctggtctcgaactcctgacctcgtgatccacccgcctcggcctcccaaagtgctgggattacaggtgtgagccactgcgtctggccgcctggcctacattttgattttgtgttgactcgctggaggtgcaaagctgtgaggaaatcccacccccgcctcacgtcccctctacctcggcattcctggagcgctgctgcaatgtcgtcagcactgagcacgtccgtgatgctcattttctacctactcacacagaataaatgagaggcgataagccacaaacaggaatgtgcacatccaggggaaacacatcttcccaggcccactgaaactgtatgtgtgtctagattatttttttttttaaattaagacggagtctcactctgtcacccaggctggagtgcaagagcgtgatctcggctcaccgcaacctccgcctcctgggctcaagtgattctcctgcctaagccttcccagtagctgggattacaggtgcgcactaccatgcctggctaatttttgtgtttttagtagagacggggttttgccatgttggccaggctggtcttgagctcctgacctcaggtgatctgcctgccttggcctcacaaagtgctgggatgacagatgcaagccaccgagccaggcctgtctagaatttttaaaatgtgataagcatggttttgtattaagtgacgggacagaatatccaaattaaaaccagatacggaaaacaccccagccttttttgtctcagagccttcttttgaatacatgccaaaaatggaaaaaaaaaatgacccaaagaaggattcaattgttttcttataaaaattatactgacataatcagtcatttgcataggcagccgtaaaccatgttacacatgcactggcattttcctacagcagcccgagagatgcaatgttgcaaattccacgtgggaaaggatacagtttgggctgcttgcagacattctgtggaagaaggcatgcacctgtcctgaaaggtgggaagcagatggatgaaaagcccatctcccagagattaaaatccttccaggtgtcagagccaccggaaaacaggagtctaagcacctgagcctaatatgaatgcatgcagtgaagaaaagagtctggggtctgatgtgtccaccagttactcaccgttttcggtttccccccaggaagaatcaggaaaaagagttgaaggagcaaaacaacagatgtgtttttgctaccttactgacctaccttatataggctagaaaaagtgatagttacaacctcttagatttccttttcaaggatcaagtggatgcagctcaaatgtcttgtcttactcatgaaacctctttttttttttttttctatttatgtctcaagggaatgtgggtgggaacagccaattgtaaaaaaaaaaaaaaaacaacaacaaacttcaacaaaccttaactaagatttcaattctgcaaacgaaccctgttggcaaagtgtggagaaggttctagatgcctggtaaggtggagatggtggcctgaactaagacaaacacatacagggtgctctgtaagctgaaaaggctcccctgatattagcaggtaccgttggaggcaggcctgttttcagctttgggaactatgggtgtgtaaggctgacctcagtctggagttgacagactcaaagccattgtcaccaagtgcacacacaggtctcacccggcacaggagacagggctaagtgacgtgactttcctacaaaactcttgactttgacgtttcccagctataccataaattgcacacactcaaaaggcaaaaaggaggaaatcaaaccagcatccccaacccccaaaactaacatgttcagaaacaaatattctgaggctgaggccaggactagacacctcaagattttgtttctgttgtgacagggtcttgctctgttgccccggctggagtgcagtggcacgatctcagctcattgcagccttgacctcccaggctcaagcgatcctcccacttcagtctcccgagtagctggtactacaggcacacaccaccatgcctggctaattttttaaatatgcatattttttggagagacagggttttgacagggttttgccatgttgcctaggctggtctcgaactcctgggctcaagtaattctcccacctcatcctcctaaagtgctgggattacaggaatgaaccactgcgcctggcttttttttttttttttttttttttaactttcagcaaacatttattgagcctttatatggccagcactgtgctagactgttctttttaattattgtggtaaaa

SEQ ID NO: 586761 - DNA, 4001 bp, Homo sapiens
cacttgagtttggaaggcggaggctgcagggagctgagatcaccccactgcactccagcctgggtgacagtgaggccctgtctcaaaaaaaaaaaagaatctttgcacctgtagtcttcactgcccatgttgagggctttgcatgggtagatgtgcggtcaactgactcatgtcctttgctttaatgatgcttggccgaatgaccaacaccaaggctggccattgaagaaatactgagcaacctggcccccactgcaccccaggcccacccagcagtgccaggtaccagacagcctcaggacaaagcttacttaagctcttcttcatccagatacccgctctggtcgttgtctatgaaccggaaaacatccttcacctgactggctgacatcttggagaggcctgacgtctggaagaatttttggggttcaaaagtgtctgggtctgaagaacagagaatgggttattctgacactcattggatcacattctatgttggggccaaggtactgaaaacacagatgattaaaaacacttcaacaatatccctgagctacggggatgctcaactggtctaagattttgggacagccaagacttgatggctctgtgatggcatcccatgtcccctccgccccggtcttccctcctccacttggttttgtccattttccttttccctcctcctctcctctgtgcctccccctccccctggcccactttacaggctgtgtggccgagcccccaacatccctggtctaattggtagggggaaatgcaatcactggatttcaacaggctaaatggcctttggcgatttctttctttcttttttttttttttttgagacagagtctcactctgtcgccaggctggagtgcagtggcgtgatctcggctcactgcaacctctgcctcccaggttcaactgattctcctgcctcagcctcccgagtagctgggattacaggcatgcacccccatgcccagctcatttttgtatttttaatagagacagggttttgtcaggctggccaggttggtcttgaactcctgacctcaagtgatgcaccggccttggcctcccaaagtgctgggattacaggtgtgagcaccacacctggcccttcagtgatttcttgctttcatgtttagtaggtttcttttgtcttacagaagtgtaatcgtgtgctcagatcccagatctctataattttagttatctaataaatagtagttttcttctctgattccatgaattttccagccaagctcttatttacttatttatttatttatttatttatttatttagagacagagtctcactctgtcgtccaggctggagtgcagtgtagcgatcatagctcaccacagcctcaacctcctgggcttgagtgatcctcctaccttagtttccagagtagctgggaccacaggcacatgccaccatgccccgctagtttttatttttattgttatgttgtagagatggagtcttgttatgttgcccaggctggtctcaaactcctgggctcaaacagtcctctcaccttggcctccgaaaagtgttgggattacggatgtgagccaccatgcctggtctacattttttttttttttgtagacagagtctacaaaaaaggccgggttcaagcaattctcagcctcagcctcccgagtagctgggattacaggtgcccaccaccacgcctggctaatttttttgtatttttattagagatggggtttcaccatcttggccaggctggtctcaaactcctgacctcgtgatccacccacctcagcctcccaaagtgctaggattacaggcgtgagccactgcgtctggccgcctggcctacattttgattttgtgttgcctcgctggaggggcaaagctgtgaggaaatcccacccccgccccacgtcccctctaccttggcattcctggagcgctgctgcaatgtcatcagcactgagcacgtccgtgatgctcattttctacctactcacacagaataaacgagaggcgataagccacaaacaggaacgtgcacatccaggggaaacacatcttcccaggcccactgaaactgtatgtgtgtctagattttttttttttttttttttgagatggagtctcactctgtcacccaggctggagtgcagtggcacaatcttggctcactgcaacctccacctcctgggctcaagtgattctcctgcctcagccttccgagtagctgggattacaggtgcgcactaccaggcctggctgatttttgtgtttttagtagagatggggttttgccatgtttgccagcctggtctcgagctcctgacctcatgtgatctgcctgccttggcctcacaaactgctgggattacaggcataagccaccaagccaggcctgtctagaatttttaaaatgtgataagcatggttttgtattaagtgacgggacagaatatccaaattaaaaccagataccaaaaagaccccagccctttttgtctcagagccttcttttgaatatatgccaaaaatgaaaaaaaaaaacatgacccaaagaaggattcaattgttttcttataaaaattatactgacataatcagtcatttgcataggcagccgtaaaccatgttacaaatgcactggcattttcctacagcagtccgagagatgcactgttgcaaattccacgtgggaaaggatacagtttgggctgcttgcagacattctgtggaagaagacatgctacctgtcctgaaaggtgggaagcagatggatgaaaagcccatctcccagagattaaaatccttccagatgtcagagccatgggaaaacaggagtctaagcacctgagcctaatatgaatgcatgcagtgaagaagagtctggggtctgatgggtccaccagttactcaccgttttaggttttcccccaggaagaatcaggaaaaagagttgaaggagcaaaacaacagatgtgcttttgctaccttactgacctaccttatataggctagaaaaagtgatagttacaacctcttagatttccttttcaaggatcaagtggatgcagctcaaatgtcttgtcctactcaggaaacctcttttttttttctatttatgtctcaagggaatgtgggtgggaatagccaattgtaaaaacaacaacaacaacaacaacctcaacaaaccttaactaaggtttcaattctgcaaacgaaccctgttggcaaagtgtggagaaggttctagagcctggtaagctggagatggtggcctgaactaagacaaacacatacagggtgctctgtaagctgaaaagctccccagatgttagcaggtaccgttggaggcaggcctgttttcagctttgggaactatggatgtgtaaggctgacctcaatctggagttgaagactcaaagccattgtcaccaagtgcacacacaggactcgtccggcacaggagacagggctaagtgacgtgattttcctacaaaactcttgacttttacgtttcccagctataccataaattgcacacactcaaaaggcaaaaaggaggaaatcaaaccagcatccccaacccccaaaactaacaagttcagaaacaaatactctgaggctgaggccaggactagacacctcaagattttgtttctgttgtgacagggtcttgctctgttgccccgactggagtgcagtggtacaatctcagctcattgcagccttgacctccaggctcaagcgatcctcccacctcagtctcccgagtagctggtactacaggcacacaccaccatgcctggctaatttttttaatatacatattttttggagagacagggttttgccatgttgcctaggctggtcttgaactcctgggctcgagtaattctcccacctcagcctcccaaagtgctgggattacatgtgtgaaccaccactcctggccttttttttttttttaattttcagcaaacatt

SEQ ID NO: 586762 - DNA, 4001 bp, Homo sapiens
ttcaccatgttggccaggctggtctcaaactcccaacctcaggggatccacccacctcggcctcccaaagtgctaggattacaggcgtgagccactgcgcccggcctttttttttgagacaggatctcactgtgtcacccaggctagagtgcagtggggcaataatggctcactgcagcttggacctccctggctcatgccatcctcccgcctcagcctcctgagtagttgcgactacaagtatatgtggtatatgccaccatatccggataattttattttttgtagacgccgggtatcactttggttgctcaggctggtctccttgaactgagctcaagggatcttcctttcacactcccaaagtgtggggattacaaacgtgagccaccacgactggccgaaattgtgcacgtcaaatgggtgaatcgtatggtatgtgaattttatctcaataaagatgttatttaaagggaaaaagtaactgaaatgtgaaaagtgcgcttaaaaaaaataatgaggggccgggcgcagtggctcacgcctgtaatcccagcactttgggggccgaggcgggcggatcacctgaggtcaggagttcgagaatagcctggccaaggtggtgaaaacccgtctctactaaaaatacaaaaattagccgggcgtgatggcgcgtgcctgtaatatcagctacttgggaggctgaggcaggagaatcacttgaacccaggaaggcagaggttgcagtgagccgagatcgcgccacagcactccagcctgggcgacagagactccatctcaaacaagacaacaacaacaaaaaatgagcatacagtgatctttattcaacttcccaagatccagtcctcagctaatttacaaaactacaatagtgttacatactctcctaggtctacacggcaaagtacagtttgactgttgcaactagtgctgccttacaaaaaaaggctttatcccatgccacccatcctaaacccagctgttcagagcagtgtacctggaaatcagcctcaaagtacggactgcaagacaaggcacaaggaaaccctaacacgaagtcctatgttctgggcaaagggatggggatggcaggtgggacgcacccaggtcagggcgagggcgcggcaagttttctattaaatctcagtagattacaactcatatccaatgtctgatatattttcgagggaaaatggtgcttgaaagatgtttctacgagaaataagcttcatctcggtcaatctgttcgacccaacttctggcagcaggtgtgggggcggcgccaaggtctgcgcggtaatccaaacaggcagtcccacccagggccaccccaaagccagatgctccgacgcaactcgagcaggccacactgtctttcggacaaagcgacgcggtcctcacaggcgggaaggagagtgcgtcccggtcgggaaggacgccgtcggagagcggcctaaccacgtgacgcccgcggcgaccttgggggtcacccctgcggacgcaccgccctctccctcacatccgccgccgcgcccgccccccgctcgcccaccgccaatggcgcgtcgctccgcgccccgcgcgacctcggagcccgcccgtacccgccaatctccgcccgccgggcaggccccgcggctccattggctgccacggccatccatcaggtcccgtccctcctaccaccctccgtgagccccactccatccagctccactcccctgtcaccgcggcgcccgcagcaccaagggcgcggcggcctccccctttaccgcgatctccaaccccgggccgccaagcgccgcgacacccggcactgggacgggcgcggcgacagcgcacggttacctgtctccggctcagctccacccgaatgaggcgccgacaccccactccggggctccaaactctcggccccgccccggcgtatggcgtcaacacgtagccctcccctggagaagaatgccctcccctcttacagaggaccgattcgtgacgtcacagagccgcgccgggcgtcacagcgccgactgcgcagttgcagaagccagggccagctggagcccagctgtttgctccgctagagagatgaggttgtctatggacttccagcggcttctgctatcataaataatttctgaaagtaagatatctctagcgcctggtaggaacctatcaagagatagttgggttgatgtgaaacttagcgcacaaaaataaacaatttgaataacagaatctccgtttttgagattgtcctgggtcaggctttgtgacaagcgcttcaccggcgctattgtgtaacaatctgtgagacaggtgttcctatccccggtctacaaatgacagttggcagtgctgggatcttgcccgggatcttgcctgggttttcttgactttagagctacctatcaaagataaaacgtggctaattaacctgtcacaacctgttgattgtaagatgttccctattttaaagtattaaaatttggggaaaggccgggcgcggtggctcacgcctgtaatcccagtactttgggaggccgaagcgggcggatcacttgaggtcaggagttcgagaccagcttgaccaacatggggaaaccccgtctctactaaaaatacaaaaattagctgggcgtggtggcgatcccagctactcgggaggctgaggcaggagagtcgctagaacccgggagacggaggttgcggtgtgccgagatcgtgccattgcactccagcctgggcaacaagagcgaaaatccgtctcaaaaaacaaacaaaaaaagggggcgtataagtgcttattatagaacaaagttagggtaatgtatgtgacaaggatctagagactggaagaggtgaagagaccaaggaacaaacttctgtattcttttttccttttttttttttaaataaattacggtaaaaatgtatgtactaaacatttgcagctgggtgcagtggctcacgcttgtaatcccagcacttcgggaggtggaggcgggaggatcgcttgagctcaggagttccagatcagcctggggaacagagcaagatctcatttctactaaaaaatcaagaaaattagccaggtgtagtggcactcacctgtagtctcagctaattgggaggctgaggcaggaggatctcttgagcctgagagattgaggctgcagtgagctatgattgtaccactgcactccagcctgggccagagagcaagatactgtctttttttttttaatgccattttaaccatttttaggtgtataactcagtggcattaattacattcacaatattatgcaaccgtcaccactcaatttccaaaactttttcatcacctgaaacagcaactctgtaaccattaagcaataacttcctatttccccttctcctcctgtccttctctcctttggtaacctctattatacggtctctatacatttgattactcaattactttatgtgggtgaaatcataatgtatatgtccttttgtgtccaccttatttcattgagcatgaggttgtcaaggtttatctgtgttgtagcatgggtcagaacttcatttcttttttttttttttgagacaggatctccctcggtttcaggctggagggcagtggtgccatctcagctcactgcaatctctgccacccaggttcaagtgattctgatgcctcagcctcccaagtagctgggactactggcacgctccaccatgcctggctaatatttttttctttttctttctttctttttttatttttgagatggtgtttcgttcttgttgcccaggctggagtgcagtggtgtcatctcggctcactgcaacctctgccttgtagattcaagcaattctcctgcctcagcctctcaagtagctgggattataagcgcccgccactacgcccagcttattttgtatttttagtagcgatggggtttcaccatgttggccaggctggtcttgaa

SEQ ID NO: 586763 - DNA, 4001 bp, Homo sapiens
tagcagacacagaaggatcctaccatcacaaccaccatgcggctcacctcccgttcagccttctgggtcgtagctgactcctgctgctgagctgcaacctggggtggagcacggaaagcatcacatctctctttttcctggccctctggatgctttttttttttttttttaatttttaatttttaattttctttttgagaccgagtctcgctctgttgcccaggctggagttgcagtggtgcagtctcggctcactgaacctccacctcccgggttcaagtgattcttttgtctcagcctcctgagtagctggggttacaagcacacaccaccatgcccagctaattttcgcattttagcattttgccatgtaggccaggctggtctggaactattgacctcaggtgatccgtctgcttcggcctcccaaagtgctgggattataggcgtgagccactgcgcccggtctctggatgcttttctgtgggatgggggagggggcatccactctgattgcctcttttctgtcccatctcctggcctagttcctttggatctccatcattctccctcctcctacttcctttgctgcttttagataccctctctggctatggacatttccaggcatcttatgtttcagagcactcttccttctcatgtggagccccgaaccccttcttccctgactatcaaatgccactcacagctttcagggccctcagcagctgagtgtaggagaagcagatgagggagagaggcacaatgaagcagaagatgaagaggaaccacgtataggactcgctgcggtatttggtgcccacggtgtaccagtcagggccacaggaacactgcaggccctcagggatgaacctgcaaaggaccaaacacttgctcactggactctccacaagagtgcagtgggagctgagatgcctggattgtgttctccacttagaacccacggaatgccctaaggcttcaagcaggggggttttctgtcctgactgggagaagctacagcaattccaactgcagagtaaacgttagcacttgtctcccactgccctttcgcctcatattgcaactctttaaaagtagaggtcaaagactaaatagttatacccaagctctctttccacccacatcaacctgagctcctagttaactcagcaccactgccctgcactctcaccggctccagccaaagaagggtgggatggagacgccaataccaatggtccaggtagccaggaccaccgtcagtgcatgcttggagctgaagcggaagttgccgaagggcttacagatgacaatgtagcgctcaaaggccaggaaggccagtgaccatcctgtaaccagacctgtggtgaaatgtgaggataatgggctagacagagccccacccagcctggctggcagagtggcaaacagatcgggtggagcaagcacagagagacagggctggactgacatttggagtgaagactcaaacatcctattttagccaaacttctagtctgggttgctttgtaccccagtattttaaaaagcaccagactcatttcccccagactcctctttaggaaccccctccagtggagtagcaacctttgccttcccctaacccctttttcccctgcagtacctgctacagtgcccaggaagccctccaaagcacaaacatggcgaccgaagacgaagtatccgttacagctggcgacgaagacagggaagacagagaagatgcagaggaggaagcctccgaaggacacgttgaccagaatgtagttgaggggctgccgcaactttttgtagcgcagtgtggccaccagcaccatggcattgagtgggaaccctataaggaagacagtgcccatgaaagctgcctggaggtagaaggcccagacaggggcaatgtggtactgaggcccatcccacggccccactgaagagatatttttgaacagataaaactcttcctccgacatttttctcatggatgccccacacccccctctgagtcctcttataggtgatcctcccaccccacaaaacccctcctctaaaaacacttgggctctgtgaatgatcaatactaatcctaaacctcccaaggacaaagtttgggattagaaatccctaaaccactacctaaaccttttgtggccccaaagccgattgtgttcttcagaggataagagattgggctcaaataatctggatatgcaatgctgggtgctgggatgaacagaagtggactccctgaggtctgggaggtgctgacccatattcactgaagatgcttccacttttttgttcttttaatggggctatagaaagggcacgcctcttattttggcttctggcacaactgtatcagttaagttttcctcaactcatctgcccctttgtggaaggtgcccatcttaagtctgctgagaggctaggaaccagccctgggctgcaggaaagggctgggagtggggagtgccctggaagcacatcagtaaacagccttgatggaacaggacttaggcaacttgacaatgcctagaggtctagggcatccctgagccaggctgcctccatttctttgtgttgaatctactcaaagagtgtgcctttcctactcagacctccagccagggaggtgggtctgttcactgtccttacgccatgttcatgcctacccctacccttagctcaacaagtcgccacagtcttcctcctgtctgttcattgaagtcttatctagccctcacagcctacctcacaaacacctcttctgtgcagcccaccccagtgacaccaactctgctttaagttccacctgcacttgtactcagtactacactttaggctttatgaatgaatcttttccacctcagcagatcataaatatatagatgagttggccgggcgtggtggctcaagcctgtaatcccagcactttgggaggctgagatgggtggatcacaaggtcaggagatcgagaccatcctggctaacggtgaaaccccgtctctactaaaaatacaaaaaattagctgggtgtggtggtgggcgcctgtagtcccagctacttgggaggctgaggcaggagaatggcgtgaacccgggaggcggagcctgcagtgagccgagatcacgccactgcactccagcctgtgggacagagcgagactatatatatagatgagttaaaagtgacacactttaggtataagtaagtttaaaagtgaaaggatggtccagtaatggcagaatagtttattagatgaatgcccccttaggcaaaaaaattgtaaactggacacaatatgaaaaacaactttttgaaaacacctaaagtatccaaagcaggcagaaactgaaaggaactcaactcttcaatgaaaagaaccatctacattgttgtttttttttttccctgagtgtactcccgagtataaatggcacaggatagctagaacttgagcagaaagccccagccttttttggcttgaagagtcagaggacagaggacaggagacagaggacagtttgggactccagaacagctgaaggtggatttcctggaatgaaagaagccacagaaggcaaagtctttaaatctgcatataaactcccctcaaatcataggctgactgctgaactgtggatggaggaatttccaagagcccagtaaaagacaaccactggaggtctgaaagagctaagcagattttgactgttacccactgtagcagagaaagagtttgaatttgaatcccaagtcagagggtctgggtaaacacttagggctttctacttgaaactcccaaaaggccacaccatagagctaaaatctatatcccaggactaaatatttgttctgagagtaaggtcaaagccaaagctgactcatactagcaaaagataaaaccaagcctcagcgggttcaaggtgatcaactagtaagttaattgcttattagaacaaaaatcaacacccctcaa

SEQ ID NO: 586764 - DNA, 4001 bp, Homo sapiens
cgttaggattggttagacttattcttaatttgaaatgttgctaataaagtcccacattgtcctggttaagtaaagaaggcttgggagccagattgtttgggtatgagtctaacatttaccatctgcttgaagttcacatctataaaatgggataataatgggaaatgaattggctataatgataaactgaggttatctctataaagtacctatcaatgtgcagtggatggtgcagagtaatttataataatgctaactattaacattattattaaaacgcttttttccattgaattgtctctgtgtggggctttccattcgtccccagcagtgaaaagttgtgtggtggtactaacttcctctaagtgaagagcatgtgcttatttagagacaatcatagacagtcccctggaggaggtgagaagagtagaaacaagtgaccatcacagtctcagggcaggttggaaagtggattttgttgtgtaattgcttcagattgccagctgaatgtttatggattcactctctctgacaacagaaattgtcagtttgtaggattttataaaaatcaatttccctccaagctgaagtaggcacttaggtacatttactgcttataagaaaggaagtacaattgaggggaaacatccaaatgaggatgaaaatggacagaggtatcaatgggttctggagtctctgcctgtggctgtatttttaaaaactttttatagatatgactttatctggtaataactgctattcctctactactgagcatacctgactaagtcacaggtggagtgtctgttttaaacttctggactcatagcagtgtacaaaataaatctttccccaacattctcaactcaataagtgcttaaattaaaaaatgttaagtataacaaatgcatcaaaaactaaatacttcccaggcaggaaaaaggaatgctttgcagagtctcttggttcattcagtctcagatataaagagagtagtgaacttaggtggtatttggtaccaagattccaggagatgactgaggagggagagtcaaatgtcacaccagttaggaatgactttccttgcccagtgctctcctcagggcacccttgacctctccgttcctcaggctgtaaatcagggggttaagtgttgggttgaaaaaactgtaaaatagaaaaaagaccttttgctgctcctcaggatggcgggacttgggggccatgtacatgatgatggcactgccaaagaagagtcccaccacgcagaggtgggaggagcaggtggagaaggcctttctgcggccctccccagactggatcctcaggatggccgccaggatgtgcgagtaggagacaagcaccaggctgggtggccccaccaggaagaacacgcaggctgcaaagatgaccacctggttgagccaggtgtcagcacaggccagcctgaggacagacaggatttcacagaagaagtggttgatttcatgaggcccagagaagggcagtcttaggatgagaaccacatgggccagagccaggagggagccacacgtccaggaagtgacggccagggtgatgcagactctccaggtcatgatgacggagtatcggagagggtggcagatggccacgtaacgatcgtaggacatcagcaccagcaggagacattcgctgtgtccaaaactcaaacagagaaaggtctgcgtcatgcaaccagcaaaggagatgggcttggctggatgcaggaggttcgccagcatctggggcaccgtgttgcgggtgtaggcgatgtcgacgacagccaggtgtgagaggaagaagtacatgggggtgtggagtctggagtccagtgagatgagccccaggatggccccgttccccagcagggtgaagatatagaacagggagaagagcccaaagaggagcatctgaatccttgggcccaggagaaatcccagtaggaggaactctgtgaccattgtctgattttcccccatttccctgtgaaaaagaaaaagatcacttaggaccagattgtcaaaaaacacctagacattattttatgaatttagtcatttttaaaagataaacttttaacattagtgattgagctacacattaagttaattactgattgtaagtatccagtgttatagaagggattgtgtcaccaatgataggatacatagagccattgacacatcatgggaagaaagaatgtcgtaccaaaagtggaagtaaaatgaccatctaataaggattgtcttgaagctgcacatataaaaattactaagagaattcctgaagtgtagaaataatcagtaatggaagaactccaaatatgggaattagagtagtcctagaaaaaaagatgatgtaatcccagtttctcagtagaaatatcaactattttgctttcaacatctgaaatcaacctttgcactctggagcagtttatataataacagaagaagtagaaagacaaaaaacaattttaatgacattgtgattgtttgggttcctgagaaggaactaatggatgtgctacaaatgggttctaattgcaatctttattttacaatgggtcataaataggaaccgataattggtgatttggcagttaatctactgattgatgcacagttactgatttaccaaaaactggttttgaataacaactcacacaatttgtagaaattagatttttctgggcgagtttgtacatacgtatcatttaaaacattcacaatgcctgaatgttatgtttgccactgcattatatatcatttcttttctagtctctcctttcacttttgccaaccctttggtaaatttaatccatttgtgtttaagtaagatgttctttttacatgtagaatgaaagaaactatggagaaaaaatttaaatgaagtatctttcaaaaacaccagaaatgaccattcataaaaaattaattgtgcttcagcaacataagaattgctaaacactttacaggtggctaattaaaactttttttgcaaagagctaatttagtgacttcattattttgcagattattatagcaataaattgtcaggtaattggtatttgtgaattggtgatgtgccaaataatatttgggtttttgtccttaagtcctagataacattttcctcaatataccatgtagaaatccagtattttgccagtgcacatgtttttgttagtgcctttgctaggcaaaaataacctgcggctgagccgttgaacctgcttatctctgaagaaaaagcttctctggattaaggagaacttctccagattaaggaaatatgctgcttttgataagaccctggtccagctgtcattggagcaaagacatggaaccaccctaaatgtccaccaacgatagactggataaagaaaatgtggtacatatacaccatggaatactatgcagccataaaaaaagaatgagatcttatcctttgatggacatggatggagctggagaccattatccttagcaaactaatgcaggaacagaaaaccaaataccgaatgttctcacatataagcaggagctaaatgatgagaacacatggacacatagaggggaacaacacagtactggggcctatcacagggtaaagggtgggaggaggaagaggatcacaaaaaataactaatgggtactaggcttaatatctgggtgatgagataatttgtacaaaaaaccctcaagacacaagtttgtttacctatgtaacaaacctgcatttgtacccctgaacttaaaagttagaaaagaaaaagttaaaaaactaatctaattggagccctaaagaacgttcccactggatccttttccagtggtaacaaatgattgtatacttataagcattatcaataaattgttgattattatcagcaagacacaaataaattctagtgaatattgtaacttcataacacatggccaagggttatattttttttttcaggattctattaaaaa

SEQ ID NO: 586765 - DNA, 4001 bp, Homo sapiens
acgttaggattggttagacttattcttaatttgaaatgttgctaataaagtcccacattgtcctggttaagtaaagaaggcttgggagccagattgtttgggtatgagtctaacatttaccatctgcttgaagttcacatctataaaatgggataataatgggaaatgaattggctataatgataaactgaggttatctctataaagtacctatcaatgtgcagtggatggtgcagagtaatttataataatgctaactattaacattattattaaaacgcttttttccattgaattgtctctgtgtggggctttccattcgtccccagcagtgaaaagttgtgtggtggtactaacttcctctaagtgaagagcatgtgcttatttagagacaatcatagacagtcccctggaggaggtgagaagagtagaaacaagtgaccatcacagtctcagggcaggttggaaagtggattttgttgtgtaattgcttcagattgccagctgaatgtttatggattcactctctctgacaacagaaattgtcagtttgtaggattttataaaaatcaatttccctccaagctgaagtaggcacttaggtacatttactgcttataagaaaggaagtacaattgaggggaaacatccaaatgaggatgaaaatggacagaggtatcaatgggttctggagtctctgcctgtggctgtatttttaaaaactttttatagatatgactttatctggtaataactgctattcctctactactgagcatacctgactaagtcacaggtggagtgtctgttttaaacttctggactcatagcagtgtacaaaataaatctttccccgacattctcaactcaataagtgcttaaattaaaaaatgttaagtataacaaatgcatcaaaaactaaatacttcccaggcaggaaaaaggaatgctttgcagagtctcttggttcattcagtctcagatataaagagagtagtgaacttaggtggtatttggtaccaagattccaggagatgactgaggagggagagtcaaatgtcacaccagttaggaatgactttccttgcccagtgctctcctcagggcacccttgacctctccgttcctcaggctgtaaatcagggggttaagtgttgggttgaaaaaactgtaaaatagaaaaaagaccttttgctgctcctcaggatggcgggacttgggggccatgtacatgatgatggcactgccaaagaagagtcccaccacgcagaggtgggaggagcaggtggagaaggcctttctgcggccctccccagactggatcctcaggatggccgccaggatgtgcgagtaggagacaagcaccaggctgggtggccccaccaggaagaacacgcaggctgcaaagatgaccacctggttgagccaggtgtcagcacaggccagcctgaggacagacaggatttcacagaagaagtggttgatttcatgaggcccagagaagggcagtcttaggatgagaaccacatgggccagagccaggagggagccacacgtccaggaagtgacggccagggtgatgcagactctccaggtcatgatgacggagtatcggagagggtggcagatggccacgtaacgatcgtaggacatcagcaccagcaggagacattcgctgtgtccaaaactcaaacagagaaaggtctgcgtcatgcagccagcaaaggagatgggcttggctggatgcaggaggttcgccagcatctggggcaccgtgttgcgggtgtaggcgatgtcgacgacagccaggtgtgagaggaagaagtacatgggggtgtggagtctggagtccagtgagatgagccccaggatggccccgttccccagcagggtgaagatatagaacagggagaagagcccaaagaggagcatctgaatccttgggcccaggagaaatcccagtaggaggaactctgtgaccattgtctgattttcccccatttccctgtgaaaaagaaaaagatcacttaggaccagattgtcaaaaaacacctagacattattttatgaatttagtcatttttaaaagataaacttttaacattagtgattgagctacacattaagttaattactgattgtaagtatccagtgttatagaagggattgtgtcaccagtgataggatacatagagccattgacacatcatgggaagaaagaatgtcgtaccaaaagtggaagtaaaatgaccatctaataaggattgtcttgaagctgcacatataaaaattactaagagaattcctgaagtgtagaaataatcagtaatggaagaactccaaatatgggaattagagtagtcctagaaaaaaagatgatgtaatcccagtttctcagtagaaatatcaactattttgctttcaacatctgaaatcaacctttgcactctggagcagtttatataataacagaagaagtagaaagacaaaaaacaattttaatgacattgtgattgtttgggttcctgagaaggaactaatggatgtgctacaaatgggttctaattgcaatctttattttacaatgggtcataaataggaaccgataattggtgatttggcagttaatctactgattgatgcacagttactgatttaccaaaaactggttttgaataacaactcacacaatttgtagaaattagatttttctgggcgagtttgtacatacgtatcatttaaaacattcacaatgcctgaatgttatgtttgccactgcgttatatatcatttcttttctagtctctcctttcacttttgccaaccctttggtaaatttaatccatttgtgtttaagtaagatgttctttttacatgtagaatgaaagaaactatggagaaaaaatttaaatgaagtatctttcaaaaacaccagaaatgaccattcataaaaaattaattgtgcttcagcaacataagaattgctaaacactttacaggtggctaattaaaactttttttgcaaagagctaatttagtgacttcattattttgcagattattatagcaataaattgtcaggtaattggtatttgtgaattggtgatgtgccaaataatatttgggtttttgtccttaagtcctagataacattttcctcaatataccatgtagaaatccagtattttgccagtgcacatgtttttgttagtgcctttgctaggcaaaaataacctgcggctgagccgttgaacctgcttatctctgaagaaaaagcttctctggattaaggagaacttctccagattaaggaaatatgctgcttttgataagaccctggtccagctgtcattggagcaaagacatggaaccaccctaaatgtccaccaacgatagactggataaagaaaatgtggtacatatacaccatggaatactatgcagccataaaaaaagaatgagatcttgtcctttgatggacatggatggagctggagaccattatccttagcaaactaatgcaggaacagaaaaccaaataccgaatgttctcacatataagcaggagctaaatgatgagaacacatggacacatagaggggaacaacacagtactggggcctatcacagggtaaagggtgggaggaggaagaggatcacaaaaaataactaatgggtactaggcttaatatctgggtgatgagataatttgtacaaaaaaccctcaagacacaagtttgtttacctatgtaacaaacctgcatttgtacccctgaacttaaaagttagaaaagaaaaagttaaaaaactaatctaattggagccctaaagaacgttcccactggatccttttccagtggtaacaaatgattgtatacttataagcattatcaataaattgttgattattatcagcaagacacaaataaattctagtgaatattgtaacttcataacacatggccaagggttatatttttttttcaggattctattaaaaa

SEQ ID NO: 586766 - DNA, 4001 bp, Homo sapiens
tgtaattacagtttgtttcttctttctcaaatgtgtgtgcacgtgtgagtgtgtgtgtgtgtgcgtgtgtgcgtgtgtgcgcatgcatgggtgtatttgttctttttgtctaactgtattggttaggatctctagtaaaaagtgaaatcaagaaaaacaagtgattttttttgtgtctgattctttacccgaaaaggacagatgctaacatttcaccattaaccatgacgtctgctttgtttttatttttgttttgtttttggtagattctgtttagaaagtcttactgcgatattagcttataaagaattgatcttaaatcttgtcaaacactttcttggatctactgagatgttcatatgaaatgtattctttaatttgttaatgtggggaagttatttttgttgtttgttttaatgttaaattattgctgcattttaagggtatacatagtttcattataatacatccttacttcattctgatggacttgtttcattaatattttctttaagaggtttgcatctatgttcatgagtaggattagattgtgattttctgtttcataagtttatctcaggtttggtatcaatgccttaaatagtaaaagtaattagtttctctctctttatttatttatttatttatttttgagagggagtcttgctctgtcgcccaggctggagtgcagtggtacaatctcggctcagtgcaacctccgcctcctgggttcaaacgattctcctgcctcagcctcccaagtagagctgggattacaggcgcccaccagcacgcccggctaatttttgtatttttaatagagacagtgtttcgccatgttggttaggctggtctcgaactcctgacctcaggtaatccgcccaggtcagcctcccaaagtgttgggattacaggcttcagccaccacgccaggccagtttctctttttataagaagtctaaagataaacagtattgggtgtggtaaattaaagaattaaaaaggaaatttcaggacccagggtcatgagaaccatgcttacacactcaggatatctcaaatgattcttcacattgatctctgtttccaaaggactctctttagagcccctttcacctctgcattcctaaggctgtagatgagggggttcaggatcgggttgaaaaggctgtaaaacagggaaaggatcttcctccgttcttgagaatggcttgacttgggggccatgtacatgacaatggcgctgccaaagaaaagccccaccacgcagaggtgggaggagcaggtagagaaggcctttctgcggccctccccagactggatcctcaagatggccaccaggatgtgcaagtaggagaccagcaccaggcagagcggccccactaagatgaacgcagaacccgcaaataggaccacctggttgagcctagtgtcagcacaggccaatttgaatacggacatgatttgacagaaaaagtggttgatcttttgtgggccacaaaaaggcagcctcagaataagagtaatatggaccagagccaagagaaagctaaatatccagcaagttgaggccaggacagtgcacactctccagttcataatgagggtgtattgcaaggggtgacagattgccacataccgatcatagcacatcatcaccaaaatcagacactctgtaatagcaaacgccaaatacaaaaaagtctgaagtatgcaaggagcaaaggagatgacttttttgtgcatcacaagatttgctagcatcttagggacagtactcgaggcataggacatgtccacaatggccaggtgtgacaggaagacatacatgggtgtgtgcagtctagagtccaagtagatgagccccaggataatcccatttcccatcagggttaagctgtagaatagcaagaaaaacccaaagaggaacaactccagagctgggtccacctggaatcccaacaggatgacttctgtgatccaggtctgattgctttccatgttctcgtgacagaaaaatcttgtgatgtacttaagacagaaatttcacagctaatgggagaaaataaaaaacatttcattatagagcatgaattttatgccagaggccacaaatcagtatttcatgggtacatccagcccaaagtcctatgatgttgacttacaaatttggcttttagagatatttaaaatctgtagttattgactaatattaaaaactaggcgatttcatgataaaattggtgtctctagattcttttgagaaaaatagaagatttgtcatttcatgatattcattgaaagcaataatcagctaaatctaatgaggcaatagatagaggctggtcctctttcatttaccactgttttcaccaatctttattttctcccagaagttgagctcagtgacactgaacaattttatcattgtacctactctactgatgacatatttacataagaagagagtgaagatttttgctcaagatgggttcccaatttctcctctacttcaaatacatggatatgagagataaaatacaaaatgcaaaccctaaagagtttaaaatgtgacaactccttcatacactggaaatgaatcagaaacataatatgctccaagtctggaagcagacagtaatacctggaacttagcttttatggggttaaggcaagttgttgtgagatgtggtactgatgtgattgtttgaagctcagggcttggattggggccatgaaagaagttttaaaacaactattggcttgctggataaagtgactttcaagaagtcaatatgcttgccggctctataatttgatcaacagaacctgagaaagtgttataagacctgatttttataaggggcccttggagtcaggtgaagaacaacaaaatctaaagaccacaagagggagaaacaagataggaaaatcaaataataataatgatgataataataacaacaataaaaacaaaaacttctccactcaaaatttgcctaataaacatgtttgttttaaaacacaaatttaacactaaaaagggaaaacaaagtaaataattagaaccttaaattcattgaagatgcaattaaatgtatagaacaacagtatctcattgtggttttgatttgcatttctctgatggccagtgatgatacatgcacacgtatgtttattgcggcactattcacaatagcaaagacttggaaccaacccaaatgtccaacaatgatagactggattaagaaaatgtggcacatatacaccatggaatactatgcagccataaaaaatgatgagttcatgtcctttgtagggacatggatgaagctggaaaccatcattctcagcaaactatcacaaggacaaaaaaccaaacaccgcatgttctcactcataggtgggaaatgagcaatgagaacacatggacacaagaaggggaacatcacacactggggcctgttgcggggtggggggtggggggagggatagcattaggagatatacctaatgtaaatgacgagttaatgggtgcagcacaccaacattgcacatgtatacatgtgtaacaaacctgcaagttgtgcacatgtaccctaaaacttaaagtattaaaaaaaagagaaatataacacacaattttaaaaaacaataaagaggataatgtccacatctaccattaaagggaagaagttgtgtagtggaagatgtcatgaaggaatctacccagattttaatacagataggcaaagggataacattttgaaagcaccacttagagacataaatgattgagaggctaaatttagatgtgatagtttcctaagcaaaagaatgaagaaaatggggaagaaacaatatttgaagagatttcaccaaaaatgttcgagaattgaaaacaatttgtctttaaatcactaaaaaaatgcattccacttaatgaatacaataaaggtaaatttatactcaagcaaattgaaattttcataactgaagat

SEQ ID NO: 586767 - DNA, 4001 bp, Homo sapiens
tctcactctcaagtaagtacaatgtgatcacaggaatttgactgcaagacatgtctaatcacatgctccctgaggccccacccagtgagggtctctaaagtgggatcagctggaactatgctagttttaagatctagaacaagggttcacaaactactgtccctgggcaccattccagcagccacctgtttttacaaataaagttttattggaacacgggcacacccatttgtttacacattgtctatggctgcttttgtcagagttgagttgttttgacgcagaagatggccctcaaagccttaagcattaacctgtgtatcttcacaggaagtgtcactaattattgatcttgaggatgtgtactatgctcctgttaactcaatgtgacttggctactattggcacaaactctgctagtatcgaccatttccaatattagaaatagatttccaataacctcaatgataaataagccattaaaaatttcagacatcttagtgggtatataatagtatctcatggtggttttaatttacaattccttgcttactaatggtggaaagcagcatttgtatgtttatcagccccttgtattttctgtaagagtatatgttcacatgttttgctaattttataaaatttggttgtttatattttttattgctgatttaaaggagttctttctatgtactgtatgaacaatagttccatttctgggtacatgtagtttccatacgatcacttggtttgtggcttgcatttcttctttcttaatggtgactttgatgagcacaatgattaatgtgaagaggtcctatatttatcgaacttaaaaattttatatctagggacttttgtgtcttctttatgaatttatgcctatccagtattataaatgcatttacctatcttttctaaaagatttgtgtcttcagtttatatgtataggtctatagtattccagtttaaggtagcatttattctagcagaagacaaaaaaaaaaagccaacttctatattttgcagggagcaaggctccctccccatggttccctttgagatgtctcacgtcagcctctccttcctcagtgccctcctcagggcgcccttgacctctgcattccttaggctatatatcagggggttcagcattggattgaaaaggctgtaaaacagggaaagaactttctgctgctcctcaggatggcgggacttgggggccatgtacgtgacaatggcgctgccaaagaagagtcccaccacgcaaaggtgggaggagcaggtggagaaggcctttctgcggccctccccagactggatcctcaagatggcggccaggatgcgcaagtaggagaccagcaccaggcagagtggccccaccaggatgaacacgcaggctgcaaagatgaccacctggttgagccaggtgtcagcacaggccaacttgaggacagacaggatttcacagaagaagtggttgatttcatgaggcccgcagaagggcaggctcaggatgagaactaaagggaccagagccaggaggaagctgaacacccaggaagccacagccaggacagtgcacactctccagctcatgaggctattgtaacgtaaggggtggcagatgtccgcatagcgatcataggacatcaccaccaaaatcagacactctacgtgagcaaaagccaaatacaagaatgtctgcattatgcatggaaaaaaggagatggtgctttcctggttcataagattcgtcagcatcttggggacatagttggaagcataggatatgtcaacaatggccaggtgtgagaggaagaagtacatgggtgtgtgaagcttacagtccaggcagataatcccaaagatgaccccattccccagcagggtgagtgtatagaaggcagagaaaagtccacagaggagaatctccagtgctggaccaacctggaatcgcggcaaggtgatgtctgtgatccatgtcttgttgccttccatgctcttgtggacatctaggacaggaaggtcagagctgtgggccagtcaaagatgcacagagggagcacttagaaattataactttgaatgaattttctagaatttattctcagatatgttgccaaaactaaccaagtgtgctcataaaaatgagaaaaaatcgcattgtatcaatggaataataagaatacatacatgtatatgtgtatatatatttgtgtgtgtatgtgtacatgtatataacatttaataaaatataacaaaacaggatctattataatataccctacataaggggatacacacgcacatgtgttattttgaagaactcaagtatccttgcttccctttcagtgtgaaatcttgatttttacgtagtttgagaagagaggaccttgacaaatgttgcattatgaggtggtttcacttgctcatcctgcttccttctcagtctgagatgtgcagggacggggaccctctgtttgccatgggcttgctcactgtccctcacctcctcacaggcttttctacccacttatttcagatttgaaatcacttttaaatagctttcaattttgtagtttctttaaagctttctgagataagacgctccttttcagaagctggccagtactccctagcagcaactttaggtgcctcttttccatatctggtgtttgtagttttattttgagagttttccttacttcttcatcagcatctgttattgtaaattaggcatgagtgaaataattcttggctacatacaatgaatacatgtatatatctttaaaataactaagcatggtgacatttctgaggtcttttaaataagaaattcaaaagaaaaaccaatttacattaagtggttacatttaaagatgatcgctgtatcgtaattgtattttattggactcttttctcgattataacttaatatgttgacatctctcagagcttatcttactttccagtgtgacagagtcttttgtcatcaatatattcccagctatggcaactggggttgctgtcggttcccctaactgtattcttctccatcacctgtgatcatgccagcagccctgttgctgttcagatggaatctgagcatgtgatggggatgggatcaggtgcagccccagctggtgagctctttctaaggagctcttcctggagggtctgggtctatccagccagcagggggcgaccaagggccatgaacaggacggatggcctcatcaggtggagaaaccatgtgacctggtgctgttctgttaacacttcacatttattccagaaacagcctgaggactatctttattttcaaatcaggctaaaggttcaaatccaacaggatacttttaaaaaaacaattttgatgtcttttattttagtaaatacgtagatcctcaaatttatatattaaaatagggtattgtacagagtatttaaacattacaatttttcacttaatataatacttttcctgtatcgaaattatattttatggacattattttaaaggggcacaatattctgtcacaatttactgaatttcttactgtttgaatttttgtttatttcttatttttattggcattgagatacatttctcttaaacttaagatttgcctatattcataattatttattagaacatattctaaaagtgaaattgcagatgctaaatatacagacatttctaaggtttttatccctattttaacttccatctagaaaatctgaccaattgcaattccctcccacagtgtgtaagaatcatgtctctttgccacatagtcagtactaggcattaccaattacaatctctgttactttcataagcaaacaatgttctgtaacttatatttgtattttgtatatcccttaacgaatgatccttgagtgcatgatctgtttcagccactgttctaagctttagaggcccagctgtggatgatgtaaacacattctgaaagggaggcagattataaagaagt

SEQ ID NO: 586768 - DNA, 4001 bp, Homo sapiens
aaatggaagccattatcctaagcaaattaatactggaacagaaaaccaaataccacatgttctcatttataactgggagctaaactttgagtacatatggacataaagatgggaaaagtagacactggggactactagagagtgtaaggaggaagggggtgtggaccgaaaaaaaacctattgggtactatgcctagtacctgggggagggatcatctgtaccacagacctcatcatcacacaatacacccatgtaacaaacctgcacatgtacaacctgaatctaaaataaatgtagaaattatttttaaaatgtacacaagagaaatgtacacaaagcataaatgtatagtgcaagggattatcagtaaatggccattacccagctgccttcctacccctcccagtcactatctactcccttcatcctaatgatgtctaatatcctagctttaacgttatagtttagttattgcctatgtttgaaatttatgtacgcgtggaatcatacatccttttgtgtctggcttctatcactccagattttgtatcactccagatctgtatcactccagattttgtgtttgtaatattcatccatgttactgtatgttgaggttcattcattttctttgttacttagtattctgctgtgtgaatatacaagttactcaacttctccctgttgatagatatttggattcttttcaggttttagctattatgaaacaatgctgttatctcctttaacatcagagtttcattttgcctatttcaggaaattatataaaatggcactgtgacataaaaagtaaataaataaaaataaaagcaaaaagatgttctaacacttttaaaggaaaggctaaatattctgataattttgctctcctatctactgagatgattcctcgattttagagaacatacattccattgaatattgccctattttcaaagcttgaattcaatcactcaccatttttatattaaacttcttctacaaaatatattcaaaattcttgcttcagcaaaccacatgttttaaaggcaaagcccatacaccgttctcatggacctcttcctctggagtgctctgtggagggcgcccttcaactgagcattcctcaggctgtagatcagggggttcagcattggattaaagacactgtgaaacagggacagcattttctcctgctcctctcgttgattagagtctgggaccatgtaaaccaccatggctatgccaaagaatagtccaaccacacacaggtgggaggagcaggtggagaaggcctttatgcggccctcctttgtctggatcttcaggatggccccgaggatgtgcatgtaggagaccagaatcaaggaaagaggcccgactaagacaaacacacaggtagcaaatatgaccacttggttaacccaggtgtcagcacaggccagcttgaggacagacagaatttcacagaagaggtggttcacatcccggggcccacagaagggcaaccttagaaggagaatttcatgtaccagggacagggcaaacccacatgaccaggacgtgagaaccaggatcgtgcacactctccagctcatgatgacagtgtactggaaagggtggcagatggccacatacctatcataggacatcaccaccaaaatcaggcactctgtaacagcaaaagccaaatacaaaaaagtctgcattatgcatggaacaaaggagatggttcttttctggttcattaggtttgccaacatcttgggaacattgttggaagcataggacatgtcaatgatggccaggtgtgagaggaagaagtacatgggtgtgtgaagcttagagtccaggcagataatcccaaagatgaccccattccccagcagggtgagtgtatagaagacagagaagagtccacagaggagaatcgccagtgctggaccaacctggaatcccagcagggtgatgtctgtgatccatgtctggttgccttccatgctcttgtggcagagaaagacaaaccctcatctaggacaggaaggtcagagctgtgggtcaaagatgcacaatatttgctgagtgtttcagagggagcattaagaaatgtattattttgaatggattctttgttgaatttgttttcaaatatgttactggaaccaactcaattatgctcatgaaattaaaaaaatcctcttctaccaacagagtaatcggaaaaaaagtatagctataatacttcttatataaaaaaaaaattaacataaggtgtaatataatatatcttgtattactgtatacacatacatgcatggaaacacgtgtcatttaggagaattcaggtactctgcttcttttatagggtggaatccttagttattaacatagtgaaattagagatgacactgacaaaatgctgcaatacaagatggttttatatcctgggcatgcttgagtttttctacccagtatgaagtggttagggcattctgttcttcatattcttgcttagcaacccatttaccttctcacatgaattctactttcatatttaagattgaaaatcttttgtaaatagcttttcaactttgtaatttctttaaaacttcctacaaccgtcattttttcagccactggcccatactccctggaagcacctctggtacctattttccatctctagggtttgtagttctatttcaagtattttatttaattcttcatcagcacttgatgctaaaatttagtcacacgtgaaagaattaaaatggaagaaaatgtaggaaaatagtttcaagtctgtaaatcaaaatagtaaatatataatatacaaaaaataaaaaggcaatatacaaatatataataatatataaaagcagtacaatatcctttttattataatttattgaatcatttttcttgtcagaaatttttggtttctatttctcttatgtttggtagcattgagataaatattcttacaagcttatgtttggcttatattgatgatttttaattgagaatgtattctaaaagtgaatttgcaggtgctaaatatattgaaatttcaaagcttttgatatctatttccagctttgcttcagaaaatttaccaatacaaattctactaatttttatctatataaattctattattttataccaatataatatatcactgatgtgtacctcagaatcatgcctctttcccacatggtcatcacaaccatgtatttttattttcaacctttgctaattcgataagagaacaatattatccagtgtcaatttgtacttcatccatcctttaacaaacgatcctggagtgcatgatctgttttagccactgttctaagcgcaggaggcacagtggtggaggtagatgcattcagaaggggaccaggtcatgaagaagtgaagttaaggcagtgttctcttcaactcctcacattcccatttagaggaggaaattgttatgcccctggatgaaattgtcttggaatatacctgcttttctctgtcccctaatttatatgattgtgaaccagaaagagaaactaaggataccccttctctgtttcacccacacgaatttccaccccctttagcataaggcatcaggaacatgtttcttcccatttggaggtcgggagaggtgtcagctaatggttatgattttaatttggagagaaatttttttgaagatatgaaccatgcttttcaataagccttactagcaaaatatataaaatatatatattttaaaattatatctgattcttgtgtgcatttcttaactgatttttttctggagcagagagagggaatggttagttactaccactaaaacaccaggagtaaatgagtaaataattgctgactgtgaaaagaacagtaaaaaaataatctgggtaaaataatagaaagttgcttggtttgaggaagactcctttagatgagatggtcaggaaaggtctctctcaagcagagtcaggtg

SEQ ID NO: 586769 - DNA, 4001 bp, Homo sapiens
agaaaatgtcaccaccagagaaatatgtgcaaatattttatatgtagacctatttttaaatatagcatttttttttttttgagatggagtctcgctctgtcacccaggctggagtgcagtggcacgatcttggctcactgcaacctccacctcctgggttcaagcaattatcctgactcagcctcccaagtagctgggattacaggtctgcgccaacatgcctggctaatttttgtgtttttagtagagacggggtttcaccatgttggccaggatggtctcaatctcctgacctcatgatctccttgccttggcctcccaaagtgctgggattacaggcatgagacactacgcctggcctaaatatgacactttcttttttttttttttgagacggagtctcgctgtgtcccccaggttggagtgcagtggcgccatctcagctcactgcaagctccgcctctccagggttcgcgccattctcctgcctcagcctcccgagtagctgggactacaggcgcccgccaacacgcccggctaattttttgtatttttagtagaaacggggtttcaccgtgttagccaagatggtctcggtctcctgaccgcgtgatccacctgtctcggcctcccaaagtgctgggattacaggcgtgagccaccgtgtctggccggcacgttctaaattaagaataattaaataatgactttgttatcagtctctcctaactcccatatccttattctacaaaaattcgccttcaagtcttatttacagaacaaaaagatacacatttatttccaactttcagaatatttcacataattatattaaaagtgtgtacactatacagctagtataaacatatttttattaattgtgcagctccgaccttcaatgctggagagaggaaagcagaatgggctttctcgggaggtagtcataggaaaatttcaagaagatggaaagggttctctagagtgtgattatgtatcctgagtagggatgggttcagatgtaatctcaaagccctttgaagccagctattttactattctttcaggctttcatgaagttctcttcttttcaagcatcctctttagagtaccttggacttccttgttcctaagactataaattaggggattaagcatgggattgaagaggctgtgaaacagcaggagatatttcttctgctccttggggctctcatactggggctcaacatacatgatgatggctgtgccataaaagagtccaaccacacagaggtgggaggagcagatggagaaggctttctggcacccctctcctgactggatctttagaatggcacatagaatatgaacataagatattacagtggaaaagaaggctcccaccagcacagacactgcccctgccaaaaccattacctcattaatgtgggtatccgcacaggcaagtttgagaacagccataatttcacagaaaaagtgattaagtttctggggtccacagaaggacagtggtagcagtaacactagatggacaagggccaataagactcctaaaatccaggaagtcaatgccaaagtgatgcagactttccaggtcatgatggtagaatatcggagagggtggcagatggccacgtaccgatcataggacatcaccaccaggaggagacattctgtatgtgcaaaactcaaaaacagaaacatctgggtcatgcagccagcaaaggagatgggcttggctggatgcaggaggttcaccagcatctggggcaccgtgctgcaagcacaggcgatgtcgacgaccgccaggtgtgagaggaagaagtacatgggggtgtggagtctggagtccagtgagatgagccccaggattgtcccgttccccaacagaatgaagatgtagaacagggagaagagcccaaagaggagcatctgaatccttgggccaatgggaaatcccagtaggaggaactctgtgatggaagtctgatttccccccatttccctgtagaagaaacaaggagctcaccaagtctgaatgtctaaggcaaatgtttaagcatgctgcaactgtacatattattgtttgagtgttttctaagaaaacaccttcaattatattttgatcttagtcacttactaagagaaaattatgcattacaaatgaagcacaaggacattttgtcatctatgataaattcaatgttagtatgatattatagtattcattacatcttattttcaaatctactttcgttacagttcaaaatatgttaatacttaaattgccttaatagcatggactctttcctcagtttgtgatgattacatcagatgcttgccttctgtattccttcattgcagggtacttatatccatgcatgtggaagtgtgctggtgtctatgtctatatataaggatagaaagagggatgatgaccatgtcaatgatcctgctatcaggtcttctcaccaatttgtgcctttgttttatgaattattttttaaacttgtgatttttactgattgcataatcttgaattaagttaagagaatggcagtttgccctaactttggctggatttaaacagagatctttgtgtcttgacttttgtacccatagagggtctactctgtttgtgttgtcttatgatcagaatgtagttacctgtcacctttcttggactacagtaatctattgtatatttcattgtacatttcatcatacagtaatctactgtatatatagtatacttcttatactataaatgtgtatttatattatttatttgtatatatatttttctgttttttgcaaatttatttttaacaatttttaattgatacataatagatgtaaatagttttagggtacatgcgataatttaatatactcatttaatttataaagatcaaatctgtgtacttgggctatctgtcaccttaaatatttgtcttttctttatgttagaaacattcaaattattctcttctggctattttgaaatatacaatagattactgtaaactatagtcactcttctaatccattgaacactaggtcttatttcttctatgaaaccatatgtttgtactcattagtcaacttctcttttgtttcccttttgctacccctcctggcatctggtaaccaccaagctactctctgtcttcatgagatgcacatttttagctcccacatataagtgaaaacatacaatatttgtcattctgtgcttagcttgtttcatttaatgtaatgacctccagttccatccatgttgctgaaaatggcaggattttattcttttacatggctgaataatataccattgtgtatatatatcacattttctttattcattcattgatgagcacttaggcttattccatattttggttactgtgaatagtgctgcaataaacatggctgtgaagatatctttttgatatgttcacttcatttcttttggatatatacccagcagtgaaattgttacatatgatttatttagttgcatttggaaatttctaaaattctgctatattcctacagtaataaatgtctacccagtacatacacacatgagtacatatacaattgaatccttactctgtgtaatgtgcttgttttctgttttattctagtctaatgtattctatttcattagtaaaagtgctggctgaattatttcatgatgggtcatagcctgggatttaaaaaatactgatctctatccaaaactagagctaaaactctaaccatatacttatattcatagaatgtttaacatattttatagcttcttaactatcatgtacaaataaataactacttattatttatggtgactctttagtttttttttgtggcctatcaaatgttttaaaatccttccaaagccaagagggtatactgaggtttgaatcattgtaatttctaaattattgcttctgtttttttgcctgactctatagccttcttcagcccataatccatct

SEQ ID NO: 586770 - DNA, 4001 bp, Homo sapiens; identical to SEQ ID NO: 586764

SEQ ID NO: 586771 - DNA, 4001 bp, Homo sapiens; identical to SEQ ID NO: 586765

SEQ ID NO: 586772 - DNA, 4001 bp, Homo sapiens
actcaatgtgttaaagaaatcatattatcatattatgctgatcatttaggactcagacttgtgttaaaataaaacaaattacctgtccatgtcattctgaccacttgggtccaggaaaagtgatttatgtcacctggaatagcttctctttggaattttgttgaggttcctgaaagtctttatcaagacttgacatgttcttggttctaagcggtggtctatgatgttacatcaagctgtcagtttcccttgatgctttcttcctttgcagtattttcttactactacaatattttatgtaatcaccgtaatgataaattgtcacctacacccggctttgcgatctgaattatgaaaaaggtaactatccctaataacattctctcatatttattttaaatgcaaaatctttccaaactctttctaattaaatggtgcagaattaagtgaaatgaaacaaagatcctgatatttctctgccttttatataaaaaaatctatacaattaaactttgctttttacagaattagatttgttagggtgatttagatgaacttccagtactaatatcatcatccttaggctttaggttccaaaccaggcattttctatactcttagttgttgttacattcccagtagagggctgcttaaccaaggtcagtatttattctgtgtgattacaagtactctcttatagtagcatatggtatgggattaccagcatatacttatggcaaaaagagatggaaataatagaggaatttaagaggaagcttgagagaactaagcctcaaaagaacagaaagcagatcctgggtaggggtgggacctgggagtaggagttcatggcactttgcacctctgctgcaccacacggctcagcgcctgtctgcatgtgctttgtgatctgcatggtactccacgtttagggatagaatccaatcaatatacattcttgatatcagaaatctaagagatgagactgtaaggcatttacaccactgttcctacaaatctcattgggagcaaatcttcaaccctctagactttccctggcatccctcactttgatctctgtttccacaacactcttttcagggcacccttgacctctgcgttcctcaggctatagatcaaggggttcagcatcgggttgaaaaggctgtaaaacagggaaaggaccttctgctgctcctcagggtggcgggacttgggggccatgtacatgacaatggcgctgccaaagaagagtcccaccatgcaaaggtgggaggagcaggtggagaaggcctttctgcggccctccccagactggatcctcaagatggccgccaggatgcgcgagtaggagaccagcaccaggcagagcggccccaccaggatgaacactgaagcagcaaagatgaccacctggttgagccaggtgtcagcacaggccaacttgaggacagacaggatttcacagaagaagtggttgatttcatggggcccacagaagggcagcctcaggatgagaaccacatggaccagggccagaagggaaccacatgcccaagaagtgacagccaggactgtgcacactccccatctcatgatgacagaatattgcagagggtggcagatagccatgtaccgatcgtaggacatcattaccaagatgagacactcagtgtgagcaaaagccatgtataaaaaggtctgcattgtgcatgggacaaaggagattgtttttctcttgttcaagccaaggtttgtcagcatcttggggacattgttggaagcatacgaaatatcaatgatggccaggtgtgagagaaagaagtacatgggggtgtgcagtctggagtccagccagatgagccccaggatggccccatttcccagcagggtgaagacgtataacagggagaaaagcccagagaggagcatctgaatccttaggctgagtggaaatcccaggagaatgaattctgtgacccatgtctgattttttgtcatgcccttgtgacagtacctgcgttggactctgctgtggcaatgagctatgtgctgaggagcaaatgcagatccggattagtcagttaacagaaggagggggtttatggtgcacacagggtgctgactcagtcagcaaggtttttcggagccattatgccaaatcctttaatccagagtaaagcagaaaataaatttggttcagagaactagtgtaaatgcagacagggtgatgtatactatatccagtcccacagaattttacttaacttggattgcaagacccacatttttgctatcagaagggcagccacagagtaagttgtttttcagaatggctagccattttattttagagtaaggatcacagccatgttcttatgtgttttactttctaatttatttactttgcatattttcccccactttctcttccatatttggttttcaattattttgtaatttgtgcagagtgcattgcacatgcaggtgctccagtaaatgattagagaaaatacgtaaaagcatgaattaggaaatgaggtttacaaatgcaatttcaaagaggtttccttccctgtgtttactagttttagggaaaataaagcttgcattaaatgttttacttcctgaagcaactcaggaaaatctggctgtttccctttgcatgcaagccaagaaagtttgccatcactaatccagcaagcattcactgaagtcatttctgatatatggccagggcaagtggttatctatgtgaagagttaacaggataatattctgattcctgccttcaccccacccctttgcagggctgcttccctggttcttaccaggtgctgttgctggcacaatgcccactacacttgttggatgaattgatggatggatggatggatggacgaatgaaaggcattacgttaggaataacattcaaagagcatatcctagatttcaatcaagtcttcagactcttcttaaattttctctgcttgtcattcccccaaccacatagccacaggggctatagaaaggggaaaccaggatgtttcatagaagtacacaaatgttaaatgatcaatgcgtcattctcaatgtgcagcttatgactccacctctgcaaatgctaactccacctttagcccaggaaactgtctgccaataaattacctctgtatctcccattcaatgtactgatttctggagccctgccttcatccagaccctagcttctctaaactaccagactttgcaaaagaccctttactcactgtggtatcaggcctggtcttgtctcagaaatataattctatttagagaaattgtgcagagatcacaggagcttttgaaggccagagctgaggatcttgctcccaccagcagcccctgagagaaggaatttccagatgcaggagttgtctctcttttcttagcataggctgatgcagactgcagcctgctctctgggaacaccagcagtataggttttatggtggggttatctccactcaagccttcacggattgtccctgaggacaaggtagagtccctaagggaaacaggatacacagcagtcagactctgtgtctaccagaacaaacaaaagtagtttatcctcctgtctccatttctctgggccctggggatgggcattcagaaaaaaaaaagctggcaggtgatggcttaataaccagctggatctctacacataaaactcttgtagtaacaagagcatgcattctccaggggccacattgcaaattacaccccgtaagtatttggattgtgataagttcgtggatctcagtcttgccctggatggattaaatggagcttggaggaggcagagcatcatgcttctgtcataaatgcttgaaaatcttctccttcttagttaattctaacttggtattgatagattagaaaaaaaatacttctatcaaccctcccacactgtggtgagaaagattgaggcctttccacatagtacctgagatttgata

SEQ ID NO: 586773 - DNA, 4001 bp, Homo sapiens
aacctagaaaaaacatcatctcaaaatgacatgtttcccatggcataagaagctgctacaacttttaagtgtgtaggtggtggattttgaaatctttctagatttttctttcttgagaaatctgggtttatcttgaaaaccctgaattagaaaaattagattgatttcattcagcggcaaacacaggcagatgtatactgaatcatatttcttaaaaatctcaaatttagaagattgtgaggttgaatgaggtcatctcctgaagcttctatagcaggaatgccgatccatgatgaaggacaggattgcatttattttctttagatgatctaccattgaacagtagagacagggtccctcacggtctgtatccaaacagaacccggatttttacagactgatcgaggcataatgctcagaactacatctctttagaggctcactttgcaaggaaaaaagaaatcattctgccctagaagggggctgtaggaagtattcacaatgagtcaattaatatcaagatctcctgttccaggaaactgttactaagtattacaaaggaaattttatgtgctcacataagtttagaaaacactggcttaaagctggtatagaattattctttcctagagaaatatttacagcattcactatgctaatatgaattgtgatccctagacagaggcatctgatgtgaagtaagtctcaaacttatttgactatagaacttatttttaaagtcctctgaagggaccagtgttttgaggaaaacattatgggaggtatgggactggatcaaaagctaatgaggatattgtaaggggtattgtcctggtgtggagtggctgcagcacaacttgaagagatcaatttctagaatttcatcccacatctgctgaaatcagtcatttaaaggtagggcaggagatagctccattttaaataaatgtctcagataattctcatgtccattgagggcagaggtcccaccagtgcagagatgggttaagaaccgctcaatgatgtaacttcctaggtcactgtcagtcacaatgccataatccttttcataaagccctttctactcccagcactctcttcaaagtattcttcacttctgagttcctaagactacagataaggggattgagcatgggattaaagaggctgtgaaacagcaggagatatttcttctgctccttggggttcccatatctgggtccaacatacatgataatggctgtgccataaaagagtccaatcacacagaggtgggagaagcaggtgcagaaggctttcctctgaacttcccttgattggatctgaaggatagcacagaggatgcacatatatgaaactacaattgtggacaagggtcccaccagcccagaaattgctccggccaagaccatgttctcattgatgtgggtatctgcacaggcaagtttgagaacagccaagatttcacaaaaaaagtgataaattttctggggcctacagaagggtaaaggtagaagtaacacaagatgaatcaaggataaaaggactccagtggtccaggaagtcaccgcgagggtgatgcagactctccaggtcatgatggccaaatatcggagggggtggcagatggccacgtacagatcataggacatcaccaccaggaggagacattctgtgacagcaaaagtggaaaacagaaaggtctgcatcatgcggcccgcaaaggagatgggcttggctggatgcaggaggttcaccagcatccggggcaccgtgttgcaggcgtaggcgatgtcgacgaccgccaggtgtgagaggaagaagtacatgggggcgtgcagtctggagtccagtgagatgagccccagtatggtcccgttccccagcagggtgaagacgtagaacagggagaagagcccaaagaggagcatctgaatccttgggccaacgggaaatcccagtaggaggaactctgtgatggatgttatattgtcccccatatccctatgacagaggaaatcaagttaatgctcatggtttaggagaagtgtttaaaaacagattcattttaacttgttcggcactctttggtgaagtagaaaagtgttcagacagctgcagtgagtttttgtgtttttaaatgaatgcttcaagacaatttggtaacgctaaaataaatgtttaaaaaatatatgcaggccgggtgcggtagctcacgcctgtaatcccagcactttgggaggccgaggcgggcggattgcctgagctcaggagttcgagaccagcattgacaacacggtgaaaccccatttctactaaaaatacaaaaaattagcccggcgtggcggcgtgtacctgtagtcccagctactcgggaggctgaggcaggagaattgcttgatcccaggaggcggagcttgcagtgagccgagatcacaacactgcattccagcctgggtgacagagccagactctgtctccagaaaaaaaaaaaaaaaaaaagaaaaggaaaaaaaacgcatgcacacgtatacataggtttcttttttattacgttaattttttaataaaggctaaaatttaaaaataaacgtgtcacatattaatatatccttttggtctttttttaaaaaaaatttggctcaggcctttcagggatgaatgtcacatgtcaatgtagtacacagtttttgtttgattcagtgagctatctcatatccttcaaataaattcttcttttccttggtcgtattattcagagtttttctctgctatgtttcagaaacaatgaacactaactgatacacatgtcaaagtcttaaaaccacattaagtttaatcttaaagtggaaggtttaattaagggcgggctatactaaggttcgacataccatcagccaaatacaccagtggtcattcacctcttaaactttccactcttgcactgatcatcacctccacagcaaatatctcacaaaatcttttcttatccaagtgtaaagacttattttttagcccagaaccttattttttgttatttactttcccacaatgtttagatgagcatttatgtgaatgactgaatagatttgcaccgtgtcattatctaaacacgaaaacaggatcagtaacttttgttggatttgggcttactattgataaacactctagaatacacagttttaagcattgtctatgcaggtgattggcaatagttcgatgaatttatgaggaatgctgcagaaagagtctctgaattctctgattgaactcaggcctccttgatcccacaattaaaatgttagcataagcatgatattgtcatttttgcttaaattttattctcattttttatgtaaaattatattgtcttggagataggaaggatgagcaataatcctccatttaaatgtccataaaattataaatttaatcctgcaaaaccgactaaaaagtatttcatttgcattggatttttcctaccaccattccaaggataagtattatgctcatgttgaaaaaataaaataatttagttatttattgatttcttgtcatttatttcatgttgtcctgagattggatctaaactttgagctcctaatcatcgctcagattgtgtggcctcgtaagattgtgcgtaataagtaaacaagcatctgtacacttgttaacttaatgagcttctgtatgtgacactttaagcctttttaaaaattaagtgctgggctatgcttggtgtctcatgcctgtaatctaagcactttgggaggctgaggaaggaggttcgctggaacccaggcatttgaaaccagcctgggcagcatagagacctcatctcttttaaaaaatttttaaaatagtaattatatgaaaaaaaaattttaaagaaaaaaagtgctggtcttttttgttaacgttgaacatttaccagagtcagttgcacacagatatttcttgaacttaaaaaaagctaccagccaaaataaccattaacatat

SEQ ID NO: 586774 - DNA, 4001 bp, Homo sapiens
aatatgcctacctgctatggcaagtccaacgtagaccaaggaaaagcacaagcagatgtgtaaaaaatcttaagtttcacaatgcaattccaaacatctagtctaccacctggatcatactaggcactcaacaaagatttgttaaacacaacatggattacaagaattatgttatatattattatgtatgtatacaaaatgtattattctttcccttatgaattcttacacactgtgattcatggaacactaagggtctaagaatataacttttagggccaggtgcagtagctcacgtctgtaatctcagaactttgggaggccaaggtgggcagatcacctgaggtcaggggttgaagaccagcctgaccaacatggtgaaaccccgtctctactaaaaatacaaaaattagccaggcatggtggcacgcgcctgtaatcccagctactctgtaatactcagctactcctggctgaggcaggagaatcacttgaacctgggaggcggaggttgcagtgagccaagatcgtgccactgcactccagcctaggtgacagagagagactccgtcacaaaaaaaaaaaagaatacaacttttatatcatgcatcctccctttcaaacagccatcattcaccatttacttcccatgcttccaaaagtaagcaacacactccaattttaaactccataaatactctctggtggcatgttttatatatttttgttaataaaaataataatagataagggcccttatatctttatcttgccttctttttttcagggtgtcagtgacctttatatgtcttctttcaaagggactttttaaaaagttttccctaattctctaaagatctactcaaatgttctccacagtgcttggatacctgacaccaagctggaatactggaattgtgtgttaaatgtgtttttcttccagtagtaaaacagcataaggaagctatctccctgaaaaactttagaggtttatatgaattaatttaaggagcttatcctattccactctacactcggggcaaccacaattgcagtcgttgaatgcactgggtgataacatctctcctcagcactcttctcagagccttagctacatctttattccggagagtataaatcagagaattcaatgtgggcgtaatgatgctgtagaacacagaaccaactttgttctgcaatagagtgcactgggacctgggtctcatgtaggagaagatgcaggcaccaaaccaaagagaaaccaccgtgaggtgggagccacaagtggcaaaggcatttctcttgctcccagatgagcgcatctgaatgacactttgaaggatgaagacataggatgtagaaatcaggaagatggggaggaggaggagaatgctgctgatgtacactgtggtctcatacacagtgatgtcgccacataccaacttcacaacagctgggaactcacagtagaagtggtagactttccgaggcccacagaaagggaagtgcatcaagatcgccatgtgaattagggagttcacggatgcccccaaccatgacatgacagccatcatcagtcccaccttcttgttcatgagcacagcatagcgcagtggatgacagatggcaacatagcggtcataggacatgacagctaagagaaaacattcagcaccacctagacacaaatagaggaagtgctgggttgcacagcccacaaaggagatagatttcttgccagataggtagttggtagccatcttcaggatgattgtggagacatgcatcagatccatgagggagagctggctgagcaggaaatacattggtgtatgaagctggggatcaatgcagatgaggagaatggtgagggtgttgccactcaccgcaataaggaagaccaccatggtcaaggagaaaaggaaaaggtgggtaagggagtcatcgaagagcccctcaaggatgaagtctgccagagaggtctgattcttctgccacattgtcccctttctcaatccctgaggaaacagagagtggagataaagagtgtgactggaaatactggggtccagtatacccaaggaaaagcaccttttgatagaggacagaacctgtgaaaaaaatttccgtttctaattattcaacctctctaattattcaaataacctttttttaaaagagagcttagaaatctgccttcacaaacataatcactctgaaatttcagaatatctggactctattatcaaacttcaagtctcttctcgttaagaaagatatatatgtgtgtgtgtgtgtgtgtgtatgtatatgtatgtgtgtatatatttattccccatttacttcctaggcttccaaaacacacatatgtatacacacacacacacacacacacatttgtctttcttaatgagaagagacttgaagtttgatacttaatggagtctagatattctgagatttcagagtgatcatgtttgtgaaggcagatttttaagctctctctctctatacagacacacacagagagacagtttggagaaaagcttgggggcgttgcttattttatcagtgaggattttactagaaaagctataacactaagagatttctcttatacaattgtggaagctggttaggcaatctatgcgtggctgttacctttgtgtctgatgctggaactttaattccagagggcaagtagtcaggaaaaaaaaaatggatataaagagtggcagatcaaagtcatgctggaacccacaagcatgagctgcaatcccacaaaggcagactgaaacccatgtcagttcttgttgtctctgaaattggcggtgtggatatcctgcagaagctggggcgcctctttttttttttttttttttttttgagttggagtcttgctctgtcgcccaggctggaatgctgtggcccgatctcgtctcactgcaagctccgcctcccgggttcatgccattctcttgcctcagcctccgtagtagctgggactacaggcgcctgccaccacacccggctaattttttgtatttttagtagagacggggatttcaccgtgttcgacaggatggtctccatctcctgacctcgtgatccccccgcctcggcctcccaaagtgctgggattacaggcgtgaaccaccgcacccggccgctggggcgcttcttaatggccagattaaaaatgcacacacctggccgggcgcggcggctcacgcctgtaatcccagcactttgggaggccgaggcaggtggatcacgaggtcaggagatggagaccatcctggctaacacggtgaaaccccgtctctactaaaaatacaaaaaatttgccgggcgtggtggcgggcgcctgtagtcccagctactcgggaggctgaggcaagagaatggtgtgaacccaggaagcggagcttgcagtgagtggagatcgcatcactgcactccagcctgggcaacagagcgagactccgtcttaaaaaaaaaaataaaaaaaaaaaaataaaaaaaaaaaagaatgcacacacctgacccagaagtcagaaaaactaaaggagaatccaagggaaggccttttgaagaccatctggttggcaacacgttttggtgctggggcagtgtcctctaggatgtgaaatatactctaaatctgcatccaatttatgctgctcttcctcccatagcaagattcatggaaccagaaatcaccaggtagaagagagaatgagtcctctcactatagcccccataactgtgacccaccagcacaattttagttttctatcccttcacttttagcttttgctgttttagaggtcttagttccaaagggagaaattcttctaccaggtgtcacaacaataatcccattttctgatagttaagactgccaccatgccacttggggctcctcatagaactgaatcaataggcaaataaggttactctattggctagtaagactgattctgactagcaatgggaaa

SEQ ID NO: 586775 - DNA, 4001 bp, Homo sapiens
aggtggcaagagaagttctcaatgtgaagacttgagggtaacatttgcatagttgactgaccttccttgacgttccaaacttcatattaaattatcttacccttcattgactttggctgaagagtttttccttaaattaactatgtctttgacatttttcacagtatctcataatttgtgtgcttttttgtgtgtttctgaagattctgagaaagagcttacagatttttcagagattgatcatttttaatattttcaacgatatacctatatatgcagtaaaatccttctcaaactgtttgaatactgtcaagaagcacctgaagcttaacttttcttggtcaataattgtcttcagtacaaacaaccattgactgtcaccctatcgaggtgaaacaagaccttgagttgatattttttcactgaattagctccagcactcaggagaagacattatgttcaccttttgtaggtcctgcacaaaaacattttagtcagccttgacaataacacttttctcagaatgttgactcacacaattactgcatgtgatgacatacactacaaattatttaaagtgagtcttcaaatgtaaaaatgcattttgttttcaatggaagccccataaccttttataaaatgtggatgtgtaagtaccagtggtccaaggtaagatccatgagtaggtctatcattacaaacgatatgacaaatcaaaacagtaagtagtaattttttttcaacgattgtcaggctgtaagagtggaggtggaagaagtgtgggaggttttataacagcagtatctaactccactgttcataaatataaccccacgtcccacaccccatccaattgaaccactccccctcctccataacatccacagtacatgctacgtcatctccttcctggttgccagggcaatgtagtttacacctgtcagatctcagctgggtggagaacactgaggcaaagctgttttctctaagtcatactcatgagtcaagttgccagctttgatgttaacccagagaatttccataatagtttctgccaggcccccttcacctctttattccttaggctgtaaatcatggggttcagcattggtgttaaaatggcataaaagacagagaacaacttctcctgaaggacagagggactggagtggggctggatgtaagtgaaaatggccacaccatagcacagggcaaccactgtgaggtgagaggcacacgtgtggaaagctttctttcttccttctctggactggatctttaggatggtggagatgatctggatgtaggacaaaagaaccaggcagaagggtgtcatcagaagaacaatgctagacaccatgatggtgacctcattggaggaggtgtccacacaagccagcctgaccacagctaggagttcacaggatatgtgatcaataaacttgtttctgcacatgggcagctgaaaggtgatagcagtctgcacaggagagctgatgaagccactgacccaggatgtgatggccaacctagcacacagccctccatgcatgatggccgagtatcgcagggcatcacacacagccacatagcggtcataggccatcaccgccaggagaacaaactcaatcccacccaaggccagggagaaaaataactgggctgcacagctctggaatgggatggctttatgttctgcaagaaaatgtgccagcagctgagggactacacttgtggcataggagacatcgacaagggagaggttggtgagaaagaaatacatgggagtgtggagtcggctgtccagtctgatcagaaggacaatgagacagttccccagcacggtcaccacatacatgaccaagaacaggacaaacagggagacccgagtgtcccagtcactggacaggccgaggagaataaattcactcacccaagtctggttatctgttcccattaaaatattcaaggattattaatctgtgaagggagtcagaaaaaaacagaagctgttgaataactataagaattacttgtttgaatgcattctgtacatgccagccagccctaggcaggtattttagatcatttattggccaaaatgagagtcttgacccaacatgcattatatttactttgcatcagagagacaaactatggcctttacaagacacaatttgatatcagggaagccagttaaatcctggaaataatgcattgcaacattaggaattctacatcttcaccaacttacttcagattccagggcaaggagaaaattgcaaatgacaaccagcggtaaaatgataagcagtgaagaagaatatggttggaaagttaacaaattaccttaaacatgtcaactagactcatcttgatgaaatgtgtaaatctactacaaaaggaaagatttggaagaagcaaggcctggaggaaaaatctggaactggaaacctacgtttaaaccttattttattaggcagattcatgatgttggtttattgataaacattatatatacaagaggacattattacataactcacgagtatatttaacatcaaagtttctttgaactgatgttcatttaacatcagtttttcttggaagtctttttatttctagctataataattactatcaataacatatggggaaagtactttttgaactgttactggtaatacaactctagaatcatggattttagtagtaacatgatctctgtgttgggacaggtaagccaacaaacacgattttccctgcatcctctccacaaattcagatacaaataaaattggagacaatctgtaacatacctgagagtatagggatggtttggatgctttgaggatcctggggccaccggtctttcaggtagcccttgacctttttgtgggatgggattgtaattgtacttcggtctctctcttttttttttttttgctcttttcaacttgctgctgttgctatggctgccaaagaaaataaacatgcatatgaatgcttaggctttttagatacaagggaggaagagaaagcagatgtctaagtacccttcttcattgtccaagacagagaaggagatatgaattcacttgaatgtacattggaatggagattcccttcttacttttgctcagcaagtgctttgtcagtaaaactaatgttatagcatcaattttgaacataaataaaaacaaattacattgtaaaaaaaaaatagaaccaattccttcttattccatgtctgcctcttcataagcgttctttttattgcagtgttcacaataagggaaagtaggaaacaaatgaggcaggaggcattaaggacagaaacaggtccagacagactagggtctcttactcgcaagggaaagactgtcaatacttcaactctcttatgtgataaaggattaagcaaaacatgtagttccagaaatactcatccctttcatagttcacaaccattttttctaaactctccctaatgtcctcctcaagaccttccttctccaacatttcctcctttactgctctgtcctgatgctcccaccagcacccctcagggtgcttttctaaaatcataatgaggctgagaatacgtttgatttcctcaaagagacattcaaattcaaattctaaaacctcaaaaacatttcactaaaagaaaacctgtcaactattgttgactagattccagatttgcatctgaattagacatttttccattaacttggcaaacacctataaagtgtcatcgttgttagatgatggatttttagggtgaatattacccttaattttcacggagagctgacctatcatgagggaaaagacacagtgatcttcaccgtatcatttgctcctctgccgcactggagaccctgcaagcccatgactcactgtgctcctctcagccacccaacatgtctctccactaagtccttgtcacattacaaatgagtgacagtgtctcatctcagagaaagtgtgaactt

SEQ ID NO: 586776 - DNA, 4001 bp, Homo sapiens
tgactaggtttagaaagttgactagtgccctactgtatgtgtgagaagaaataagaaaagtccttaatatggaagcttgaaggtaacatttgcacaggtgaggcatctatcctgactcctcaaaattcatgttaaaattgtcttctctttcattggtattggctgaagagtgtcatttcttagattaactatgtctttgatgttttataaattatctcataatttattgcttattttgtttctaaacattaaaaaatggagtttgtgaattttcctgagattggacaattttaatatgttaaatgatacctcttatacagtaaaatttctctcaaactgagtgctgtgagtaatgcctgaaacttaaattttccttggctaataatagtcttcattacaaacaaccattttttaaccctatcagggcaaaataagaactttcattgatatttcttcactgaattacttccagcactcagagaaagacattttgttcacatttcgaaggtcctgcacaaaatcattttaataagccttgacaaacaacatccttctcggaatgttgattcataattattgtatgtggctacataaacaaccaattattttcagtgagtcttcaaatgtgaaaatgcattttgttttcaatgcaaacactacaacctttacaaaatgtcaataaataagaaccactggtccaaggtaagatgtatgaataggtctacggttataaataatgtgacaaaccaaaacagtaagtagtactttttttcagtttttatcagaacataagagtggagattgagaaattgtggaaggttctgttacagcagtagctaactccactaatcatactgctgggatataaaattatccccacatcccacaccccatccaactcaaccactcagcctcctacataacatccccagtacatgttacatcatctccttcccggttgccagagcaacatagtttatccctgccatatctgagctgggtggagaaaaatgaggcaaagcttcttcttaaagtaatgttcatgagtcaagttcccagcttggatgttaacccagagaatttctctaatagtttatgccaggcccccttcacctctttattccttagactataaatcacagggttcagcagaggcataacaatggcatagaagacagagatcagcttctcttgaaggactgagggaccagagtggggctggatgtaagtgaaaatcgttgtgccgtagcacagggcaaccaccgtgaggtgagaggcacacgtgtggaaggctttctttcttccttctctggactggatctttaggatggtggagatgatccggatgtaggacaacagaaccaggcagaaaggtgtcatcagaagaacaatgctagacaccatgatggcagcctcattggaggaggtgtccacacaagccagcctgaccacagctaggagttcacaggatatgtgatcaataaacttgttagtgcacatgggcagctgaaaggtgatagcagtctgcacaagagagttgatggagccactgacccaggatgtgatggccaacctagcacacagccctccatgcatgatggccgagtatcgcaggcggtcagacacagccacatggcggtcataggccatcactgccaggagaacaaactcaatcccacccaaggccagggagaaaaataactgggctgcacagctctggaatgggatggctttatgttctgcaagaaaatgtgccagcagctgggggactacgcttgtggcataggagacatcgacaagggagaggttggtgagaaagaaatacatgggagtgtggagtcggctgtccagtctgatcagaaggacaatgagacagttccccagcactgtcatgaggtatgtgaccaagaacagggaaaacagggatatctgagtgcaccagtcactggataagccaaggagaataaattctctcacccacgtctggttatctatttccatttaaaaatgtgaggaatattaatctgtagaaagagtcagaaaaaaacagaagctgttgaatcaaagaatcataagaataacttcttaggaatgcatactgtatacgacattccagccttggccaaatattttagataattcacaaggccaagatgacaggcttgtttccaacatacactatatttactttgcattagagagacagtagtgctttcataaggacatgatgtggactcaaataagccagttaaagcctgtagataatgcagtgcaatttttggaagctttacctctttactagcttacctcagtatccagggcagggagtttgttttctgatgatgtcagcaaaaaggaagaatagaaagtcccaggctctactcttctccacagaacattcaactagcaactatccccagaccagaatatctcttttaaaactccactacttggacactaacatgagacaaccacaaggtacgtggaatgaaaattgaattagaaggctaagaagcatagtttcacttcaaccctgccaccttgcctcctgccaaagtcaacacaacaccagacaaagagggttttcctgggcccatggtttttacaggaggaaaggaaaactagaggcagtcattcagcatctctagttttccaagatgcttctcagaaatcccactctgggcttatctcatggagaacactgggggtaacagcatagctagactacctggtgtcaagtaaaaacaaagaaaggaggcagaggtcttagtgaccagcacacagatcatggcattacctctgtgttcttgctagctgtggtgcccaatctgagacactagtcaacttcatagttcatttacaaagctaagctggtcatcttcagaagcatggtgggaagtacaacctagcttgaggccttagatagctagtccccatgtccagtctcagagcccacaccagtgacctctgccaagacaaggagatacacacctccacccatttcagaaacacacatgaggtagacctgcttaacccaggaagtcaatccatggctctactcagctaaaaggccccatcaaggacatctacatgcctttcagagaagcatgagggctagaactgtttgacctgggaagtcaaactcaattcagccaaaagcccatcttaaagggaagaaaccctacaaggaagctccaccttaacagggaagcaaccatcaattgtgtttttctgagtgtagcctctggcctcaatcattctaagcagcaacttctcctaactttggagttcagcctacagccctgcccaactgcaaatcccagaaagcataattttccagccagggaataaattctgtgactagtctgaccagaagccattgcagtacgcagtcagtagctctgtgtgataacagagctcagccagtggtcttgccagacagcagggcccagtcaatagccccagccaatatcagagcaaagacagcatcccaggcaggtagaaaatccacagttagctttgcttgcccagggccattaccagctggcccttgaagaattacaggctacactaaatagtataggtctagccctgccaaagaacacctgtaaaggccagaaggagggggtatctcttcaaatgaaaagataacaatgcaaagacacaaggattacaaagcactggggagttatgacacctccaaaagaaactaataaagggctaataatggaccctaaagaaatggagatttatggggtgacaaaaaattcagaataatcctcttaagttaaaaaaaagtaccaatagaaattttaaaaaatttggaaaaaaatacacaaacaagatgaggagttttacaaataaatagaaacaataaaaaagaaccaaatagaaatcctagagatgaagaataaaaagactggattgaaaaattcaattaaaagtttcaatggcagactcaagcagaagaaatatcagtgagctgaaagaacatttgaaat

SEQ ID NO: 586777 - DNA, 4001 bp, Homo sapiens
cactatgttgaatacagcttaaaaatatatctccctttgccaatggcaaaactatgaaccaagagcaagcatatctatgtaccttctatgggtgtaaagcacatttgatcaatgaggttctagcgtgtgtgtagagggtgttagatatataggtaaggaaagttgagaatcactatggcatggaatgaaaatctctgtcaattcctgaaacctgttacttatctctgagttgagtgtggagaaagtggaaaaccaagagaagataaaagagagggcgggaaggggggtgcggggcgggaacaagaggatatcaagatcaaaagaaaagagaagtaatgagggcaattattgtttggcaattcatatatttgatgatatttatttatcatctattttatgttcatccactaaaggatacattgtggcacctagaagggaaatataaaattcaataaaaggcaactgtgtgagttatatcagaagacaaaacacaattgtgtaaggtacaattcacttacagataaaagaaagcactctaactagtttaagcagaaagggatttaatacaggttagtaagtgcttgcaaaaagtgttgcaaaaactcaggaagcagtctctgccaccaaaattcactcccagaacatcaagaatgagactgttgagggagttgctacctctgtcttagaaagatgggaaatcaggaagctaccacctattttgttggccccagagctattagtgtatggcagatccaaaaacagctaactcacccatcaccatctctcttcctacttaactcagttataaatttactcacagtcttagaaaccccatttggggtcacaaccattgagaactgttttctctagctctctagaaggtgtatggccttagagcactgaccatatgcacagatgcagatacccaagcgcctgagattgaagtagacatggtgatgtcatattaacatgggcagtgtcctaactgagtcgttaaaggagaaaggatggaggaagacatacaggcacccactcagacctttctttctaatcagctgtaattgactagtcagatctgctggcctggcaatatgccagtttcttcagagcttccttgacctctcggtttcttaggcaataaatgaaagggttgagagaaggagtgacaatggcatagaagatggaaataattttgttcatgttgaaggcatggataactcgaggtcgagcatacatgaaaataatggctgaatagaaaatggtgaccaccacaagatgggaggcacaagtggagaacgctttctgctttcctgtgggcatgcataatatggtggccagaatgcatccgtaggacaggacagtaataaagagtgggaataggaagatgaccagtgccaggataaagtctaccaactcagttatggacatgtctgtgcaggagagattaagtactggagagatgtcacagaagaagtggttgatgacattgggaccacagaagctgaggcaggagatgaagtagatcttcgccagggagatgccaaagccaatggcccaggaaccaagagcgaggcggaagcagagcccatggctcattatggttgggtagtggagtgggcgacagatggccacataccggtcataggccatggcggccagaagcacacattctgtgcacatgagagcaatgaagaagtacagttgtatcatacagagtgtgaaagagatgctgttgttcacagaccaaaaactaaacagtaacttgggcacagtcacagagatgtaccaggtctccaagaaggacaggttggccaggaagaagtacataggcttgtgcagtggccgattttgcagcaccaataggatgatgatcacgttttcagccactgtcagaatataggccacaaggaatatcagaaacatggctgcccgcatactcaagctcccagggaatcccaccagaatgaacttggtgactcgtgtctggttctccaactccatattggagacacagggcttagctctcctggggaggaaaaatcatttgatcagactccatggcccagctatatttttccatacttgtcttctctatcagtaatagttatcatttattaatacatattacaggtcagaccatgaactgggtacgtgaggcacacaacgtaatttaatttccacatagccgtgtgtgtgtgtgtgtgtgtgtgtgtgtgtgtgtgtgattgtatctgttttaaagatgaagaaatcgtgtcttggagaggaattaagtaactgaccacgttgtcactggtagcagggcaggaatcacattcaagtctcagtctaaagcccacgctccttctaatatcttgcaccatctgacacctaacaattgccaattccaaaagatacacctgaccttcctgtctctccacctacccagagctctggaagttcttccttacaactcctttatccttcacatgctattattttcatctaccatccctggagatagagagtagctgtcatcacctatgaggtacatgagaaagtgagtagcagagatttgggcttttcagtattaaagacctcctggacctcattcaagtctaaggtctgccaccgatttgctatgaccttgaaatcttaccctctctgagattgagttttctcttccgtcaatgtgaatattaatatttattcagcttatttcattgaggatcaaaatccaaatgagttaatgtaaatgaaattttatataaactaatggcaataatcgtgaaaggggattttcccccatattagagcagtgatgaaggtaggaatacactaactggagggaggggaggatctgctgtgatccaaggcaaagccatgagcaaagtaaacatgggctcattcagggaatttgacattcttgagagtgaaaatggggatcactgagtgaagatttttaaagacaagcaaacaaagatagagatgcattataaaatttgaaatattttctatgaaggttaacagacacaacataatactaaggtaatcaggaaaggtccctctgacctttgaggaggtaatattaaggctgggaaggattctaggaccccagctctttgaagggctgaggttgtagggagctgtgctgaaggagatatgattgccatgctgtgatggatgggaaaggagccaaggaagaaggcaggaagccagggccagaaggtgcaggaccccagaggttataacaatcagggatctgaacagtggtctaaaagcagtcggaaacaagcaaaagattaaaggtgaatgggacatgatatgatttacgcaatggaaagataactctgtcgttgcaaaacggactccttggaggcaagagcatgagctgtgagctatgaaactagttggaggctactcagaataggtgacagtgaacttaaatactgtggttccagagaagcagatttaagatacacgttagaagcagaatctttaacagtaattggtgacttggatatggaaggtgagagaaagaaagaaatcacggaggaaccccaaatatagagcttattacctagaggtgatgccatttactaaggtagttagatggcatcatttactaactatcttactatctttactaactgtcttactatcagttcagaaaatcttctaataataatttattgagtatttaataggtgctgggaagttcttttcatgcaatatcccatttaatccacaaaataatgttaattagacattgctattctaatttcaaagaagacactgtggtttagatagattaaataatatttccaagttagacagtgataaaatcagaatcataaagcccaggtccgactacaaaggcatgtccttaaccactagagtgaaacacactgatgaagaatatcacattttggacttaccaatgtattttacatttaaaattcctgactattttaggaagtgttctttaatcctgctgaaattttattataagctgagactat

SEQ ID NO: 586778 - DNA, 4001 bp, Homo sapiens
aagtgaacttactaggtttattacaatcccttgcctttaggcaaatgaatgtttctaatcatacaggagcaaagtttattttgtctttctaaaactctgaatatttcctctctggaaaccacataattcctcactagcggagatttatcttgttttaatttctctctgtttcatctttctctgatgcaaaggtacctgatgaattgcactctcacagtgtccaccttatagtcaatgtgctactcaggtgtcatcttgtcaggaagccgtcgctgagcctcctcctggtctcagtgttgctcccctgtgtgctcataataccgtctgtgaatccactgttgcacgttccccactgtgctggaaacagctatttatcactttttccttccttaggccaagagctttgtcaggttaagaaccatttatgccttttttacctttctaccctctacctgttacagtgcctgacacacacagcctactcaatgttgaagaaatgaatgaataaatggatgaataattatacaaggacccagtcctcctcccaacactcacacacacattgaaaaacaatcagtttgtttttggtaagttttgcttcttctcttgatcccatgtagcccaagcacttatggtgcatacactcagcagcagtgcatactgtgatagagaagcacacccggaacatgcacacgcatacacacatatgtacacacatacacacccatgcacacatactgggattggacactacctcttgatcatagagcacttcttggctgctcttccttaaatgcaaagcacatgcacttccctttactgaaagctctgggctactctcagagttcttacggctgccaggggatgtagggaactcttccatggtggtccataagagctttgggccagacagtgcagcactcagggctcactgtagttattgctcagagggaaaaaaactaaagaaactcagcagtgttcttcccacttgctggaggtctccctccccacagaactgctcaatggaggcaggccaggttcccctgggccctgggctcatcattgtgccttgcaaaggcctttcagcctctgcatctgcccctgtagcactgttttaactgtctgattgcagaaggtaaggataaagggattgagaaagggggtgagaactgaagtcaccaaggccacgaccttcctgacttgcacagagtgagctttgccaggcctgacatacagaaagatggtactactgtagccgatgaagaccagtgtgaggtgagacccgcaagtggagaaagccttctggcagctgctggcagaggggatccgcagcacagtggtcactatgtagccataggagatgagggtcaccaggaaggagctgaggacaaaggtcaaggccatcagaaagtcccagaattccaacaggcgagtgtcagagcatgacaactgcaggagaggttcattgtcacagaagaagtggttgatgacgtcgccatggcagtaatcaagatgagctcgggagaggacagtgggtaccatggctaggaaaggagctgcccaggcagccccagccagctggacacacatagcccggctcatcagagtgccatagcgcagtgggtggcagatggccacaaagcgatcaagggccatgtctgtcaggatgaggaaggaggtggaccccagggaaaagtggaagtagaactggaccatgcagccagtgaaggtaatgactttgtgggggaccaacaggtctgagagcatcctgggcactgcagtcatggttaccaagatctccagcagggaaaaattgcccaggaagaagtacatgggtgtatgtaggtgggtgtcagctatgaccataactatgatgatggtgtttcccatgaaggcgagaagataaagcatgaggaaggggccatacagaagggcctgcagctcaccaaaggaggagaagcccaagaggacaaattcggagggctggctcagatttgccatgatccacagtatggggccctgcatgcaagagaaacaaaagacagacggagaggcagaaacagagagatagagacagagaaccattgaacttgaaacagaagaaacagggacagagacagagaatagagagagaaaggcaagtagccagcgagtgataaacagaaaagcagaaagaaacggcaataaagaaagataacaaaacaggaatgggagagtcaaggagaaacagagtgagggtatgagagaagtgaaagacatagaaagccattattaagaagagagaaggctggggatggtggttcatgcctgtaatcccagcactttgggaggccgaggcagggggaacacttgaggtcaggagttcaagaccagcctggccaacatggtgaaaccctgtctctactaaaaatacaaaaataagccaggtgcaggcaactgtaatctcagctacctgcaaaactgaggcatgagaatcgcttgaacctgggaggtggaggttgcagtgagccgaaatcgtgccactgcactccagcctgggtgacagagtgagactccatctcaaaaaagaaaaaaaaaaagggggggaagaaagaaaaacagaggaaaagattaaggaagaccacatggcaacagacattgacatttagggagaaaacaagaaggaaacaacagaggaccagagaaagaacagaaaaaattcaaatagagaaatacaggaaggggaggaacacagaaaaagagagggagagagagcattagtgcatgtgacccagaagcccccaaatgtaggctaatccgtctatgtcacacccagaggttgtgccccaagaccctttttaaagggtccctgcaaacctttctgagctgcctctctgaggaccctcgcttgtgcacatttctccggctatgatcatgaaattagtgaaagtcagagttttgagtccagaaattaacttcctttagaggagacctctgcttcgtgtttgcaaagatggagagcagaaagggtgcagcaggtcagggagcgagcctggaaatccaagtggctgctctcccaggacacacacagtcatcaggcttcccaacggcataatctgtctacccaagggtgctgctttgccgtctccattgcacttcccctcccgccgtggtgcaaagtgtaagctatggagttggcttgcctgtgtttgaattctggctctagacttgcttgtcacgggccgtaaatctgctcttctttgttacttactctctctgagcccgtttattcagctgtaaaataatggtattactggtacttagcctctatggtgattataaaattaaataagtaaactacttagtgcagtgactagcacatactagccaacaaatcgttgttgttattgttatcactgttcttattgttagaccgtcaatagaactcaaattttttttgcccatcatctctctacacttcttctcattgccagcatgtgtgtgtgtgaagatctttacagctttacactgtttcttggaatttcagttcactaaaagggtactttaaaacatttcaaacacaaacaaagtatttacaacacaaactgtcaggagtggaaggagtgaagctgtgtgtagatatactctggccctttctccagccccataaatgcttcatttggggttgtgtcctggccacacagcaatgacattctaattttaaaaagccttgcacccggccaggcgcggtagctcacgcttgtaatcccagctgtttggcaggctgaggtgggcggatcacgaggtcaggagttcaagaccagcctggccaacacagtgaaaccccgtctctactaaaaatacaaaaattagctgggcatggtggcgggcacttgtaatcccagctacttgggaggctgaggtaggagaatcacttgaacctgggatgtgggattgcagtgagctgagatcatgccaatacactccagcctggatgacaaagctagactccatctcaaaaa

SEQ ID NO: 586779 - DNA, 4001 bp, Homo sapiens
gctgattgttgttgtttaggtaaacttcttccttataaggacttcttccaatattatgtgaaattccaacagttacactaccaaacagccaatccctataatttctagaaagccgggagtcaaaagaatggcctcttatttttaaaaaattctgcccacagagaagatacacatgatggtactgagactgttggatttgagagacggagaatcaaaagacattataaagtttgaagtctagatctggatacagtctgaacagacatagttgtgtttaacagccataaaatacaggatgctctctagaattagtcatttagttcttatttgcccctgtccctatactcaccacaaagaagggcagtgaaaggaatatgctgaagcttaacaaaaataaattttcctccatttttatcctcaaatatttttatcttctttacaccacaaatatctcctgaatgagaagcattccaatcctcatatcgccattctagactggttctgtgacaaaacgtaaacagtgttacacttcctttccagtatcaatggggcagagagaaagagctttaggatatctaaaatgcatatggccatcttgccaaaaaattgcacaaaaatatagggaagaacttagcaacaggtgatgaaggaccaaagtgagcatctctacctttctactctgattaggacacctttctcagtacacctccctccacacttcctcccttccccagaaaatacattttcagagatggactatgaggaaatgagttgggctaatagaattcttacaaaaatgtctgcatttcctttctctagtcccccccaaatcacaagaatatgttcaacagtggaaacaggcaggaactaaggctatgagagtctcctggacagacaatggatttcattattaccagcctaatctacttccatggtgtgatggcgaattgtacacactctttgacttttgtaatgagaggataagagaaaagaggagttagaattttctaggtgacttaataattaaccctgaggcttggaccacctaaaactgacttacagaacagctaatctttcaggagttgacagcagcgtttcatcccatctcggagggcctctttgactttgtcattccgaagagtaaagatgaaaggattcaggaagggggttaacacagaaaccaacagggaaactatcttattgtactcaactccctgtgtttgcttgggtttcacgtagagaaacaagcagctgccatagccaatcacaacacaggtgaagtgggaggcaaaagtggagaaggctttcctccggccagaggctgacgggatcttgaggatggtggagataatgtaggtgtaggagacaatcgtagggatcaaagaaccaatgagaataaaaacagccattaagaaaaggataaactctgtgagaagagtgttatcgcaggacagtttgagcaattgccctcggtcacagtaaaaatggtctaatgaatttgatttgcggaaggtaaactgaaatgtggcatagatgggccagatttcagaaagaaatccaaacacccatgacactattaccacccaaatacaggtactgctgttcataatgatgttgtacctcaaagggttacacacagccacataacggtccacagccatcactccaagtaatgcaaactccatggtcccacaggaaaagttgagcgatacatgtagagaaagatactgtctgcatcccaggaagagcaatccccaaagcatcatggggacaattatggttgtgaccaggatctccagggtagagaggtggctgaggaagaaatacatgggggactgcagacgtttatccacacagacaatcacaatgatgaccgtgtttcccattaatgtcactaaatagaagaaaaagaatatagcaaaaagaatgtggtgtagtccttgggacccagggaagcctagaaggtggaattcagtggcactagagtggttgtccatcatttagtccttgattctgcttgttttgaagcccagagattaaaagagaggtggcattgctccacatggtcctgctctcaagagagaaggaagaaaaattaggttaagaaactatttccaacctgagaatcaggtgacatgtccctgctactgtggtcggcacatacatagcttgaggtacatgttgtcatcccaagtctacaagtgaggctctcacttccctgtgtaaccagccccctagaatgggtgaagacatcttcttctactggtggtgaaataccttccttgcctttttccccattaaatataccttctctcgggggcagaggctaagaccttttaaataggccagttttaaaggtgagtcaatcaggtccctccggtcctggagttactttctcttaggttaactgtgcaagatgacacaaaggcattttatatgatgttcaaaggacagaattttaaaccccagctctcatctgtaatggtaatgcatagacccacctttggggccagcagaaaggaggcagaggatgtaagactaacatctctgctgttccagattttaaaatctccattttacagaacagcaagatctctaaatgagaactctagagcttgggataatttcccagaacagatccattcttctctaattccattttccttccaaagttgtgggaggaaggaaagatggcacctggcacagaaaaggaatagatctgggaccgccagctgttaaggatgcctggctctctgcctgtcgcttcattccattattcaaatgtcaccctttccaaagactctttccaatcactctgcccaaaacagaaaagacacacttattattggacttccatttttttaataacagttgttattaccttgtattatgtctaattatttacttcattcctttatttaacaataaacaaatgtagtcatgaacagaacaaagaaaattccatgccctgtggagcttatattcaaggaagaggtgggggctagaccacacacaagacacctaagtaaaatatgcaatagtttagtttgcttatcatgtcacagggaaaaaaataagcaagaaagaaggagaggaaatttaagtgtatttattatttatcaacggcattagaatataaactccatgagggctaggacatgtcttcactgttgtattctgaggctggcacataaaatgtacatacataaattaagtagttatatattttatatatatatatcatatatcttttatatagatatagacagatacattatgtgaaatgaatatatcatagatatatcttatatattaaattatgtattaatttatcacaaggtaaccgaactaatagctgtgtgagtcaagatttgaacctaggtctgtcagatttcatcactcacacagctaactaccacaccttatattatattattatcttatattatttatcttatttatataagatatatgaaataagatatatgaaatatatcttatattatataaaatatacatatattttttatttataagatatttaaatacataagatatatgtatcatatacataaaataagtagtgctgacaaattttgctagatgaggtatggatggatggatggataatatatgattaaataatacttgttctggccagggcctgggccacattccctcaatcctattctggttggttttccttcctgcctcacattaccattttccctcctgcccttcccttgcttaggtaaccccttccctgtctacgtcactgttttactaatggtttaaaaagcttcagggacagaattgatgggaaagctcagtgttctggttttccacaacctctgcataaccagcacgagatgaagaaacatgagcgagaaggacaccgactgtcagggagccgtgactgtgttagcattgggtccaagaggagccggaagtgctctctgctatgcaggaagggtctggagatgagcctatacactctactg

SEQ ID NO: 586780 - DNA, 4001 bp, Homo sapiens
gaaggggaatatcacactctggggactgtggtggggtcggggaaggggggagggatagcattgggagatatacctaatgctagatgacacattagtgggtgcagcgcaccagcatggcacatgtatacatatgtaactaacctgcacaatgtgcacatgtaccctaaaacttagagtataataaaaaaaaaaaaaagaaaaaaaaaaaagaaaaaaatagtaaaataatattatctttttgcatacctggaaaaaaaaaaaggctcacaaggctctacatggtctgcattccagttaccactctgactgccattgctttctcctctgcacactccatttcagcatctttgttatgccttccctaggatctctcacttattactcactatgcctggaatgttctttaacaagtttccgaatgtatcaccaccttacctctctcaatccttccctgaaaaccttatttgaaatttcaacactcctgcaagagatattccctttcattcctgtttcacttttcttcacaatacttcttcatgatctaatatactattttcaaaagctttattgaaatataaatcacattccataaagttgactcattgaaaatgtatagttcaatgatttttggtatattcatagatatttacaaccatcatttcaaaaagaaagcctgtaccccatagctatcactaccctatgtctgcattcccctcagccctaagcaaccactagtctattttctagactatatagatagtctatctctgacatttaatttttcaaagtttaattgtgaaatcatcatatcttaagaaaggcagatgatagatagatagctagatagcaagacatgtcttaaaaataatagactgagtttcaagtaacaactaagcatactaaaaaccgtagctgtaacttaaaagtattttgttgcatgcaaatcatttgataatggcaataattatgatgcagttcaaagatgagcaagttcttttcagattattctagaatccatactaagtgctttaccatgtaaaagtcctcagagcaaggctaattcctgaatagttgacagcagcgtttcaccccatcccgaagggcctctatgactttatcattccggagggtgaagatgaaaggattgaggaaaggagttactactgaaaccatcagggaaactacccaattgtaatcagctgcctgcgtttgcttgggtttcacgtagagaaacaagcagctgccgtagccaatcacaacacaggtgaagtgggaggcacaagtggagaaggatttcctccggccagaggatgacgggatcttgagaatggtggagatgatgtaggcgttggagacaattgtagggatcaaagaaccaaagagaacaaaaacagccattaagaagaggataaactccgtgaaaagagtattattgcaggatagtttgagcaattgccctcggtcacaaaaaaaattgttcaccacatttgatttgcagtaagtaagctgaaacatgacatagaccggccagatttgaaaaagaaacccaaacacccatgacacaagaaccacaaagttgcaggtgtgtctgttcataatgatgttgtacctcagagggttacagacagccacataacggtccacagccattgctccaagtaatgcgaactctgttgtccccacagcaaggtacaagaagagctggacaacacaggcagacaaatatattgtctgcatcccagggagcagcaatccccaaagcatcacggggacgattatggttgtgaccaggatctccagggcagagaggtggccgaggaagaaatacatgggggactgcagacgtttatccacacagacaatcatgatgatgactgtgtttcccattaatgtcaccaagtagaaaaagaagaatatagcaaaaaggatatgatgtagttcttcagagccagggaagccaaggagataaaattcagtggcactagagtaattcatcaacatttagttctaagcccttgttccttgtgaaatctagagagcaaaagagagagaacaaccgcttatcctaaaaagattaaggacatttcaggttgaaaaaacattcctctcctgctcctcaactccataacctgactctactattttctacacgatgttgatgtcaaatacttcatgaagaatatatatcttttgaagataaatgtatatgttcaagaagatgaaatccagttatgaataccaaatggtaaacatgaaaacccacccaccctagtatgcactctttctcaatacactggacatctgcctccaactctgctctcaccggccaccctgtctgcttccatgatcacaatgtgttcacttacaccagcacctctatcatcttgggtggaactaaattgccttctctgcctattatgtctccatcttgcaaatcctaatgcatctaaacaattataagaaagtattcctggctgggtgcggtggctcacgcttgtaatcccaatactttgtgaggccaaggcaggcggatcaccaggtcaggagtttgagaccagcttgaccaacatggtgaaacctcgtctctactaaaaatacaaaaattagctgggcatgttggtgcgcgcctgtaatcccagctactcaggaggctgaggcaggagaattgcttgagctgagatcgcaccactgcactccagcctgggcaacagagtgagactccgtctcaaaaaataaataaataaagtattcctagccaatctcacacaggcatggttacttttttcttctgtatcctctaaacacaggctccatttgcattatgttcatttaaaagttttcacttcagttatatttaccattttggggggtgatgtcgggaagtgaggtctatccaggacattgtcacaaggtaagagccattttaagacaaagtattgagtttttccctgacctctgggataccagctcccttgagtggattacccacttcttcctcttttatttttataatgaaagccatccccacctcttatctaagtgactgtgtctcccccacgcagacagagtctgatcagctcccagttaacaatttctagctctgagattttgattcctcttgttatgagatgacaaagaggaggaggagaagtccaggagtgaagaggctggaactttaattctcaactcccaacacagcctccaccctagggccaggagacaagaaaacagctgtggtgtggaggtaacttatcctctgcatctcccagttctcaacaccccagtttcagcagagagacaagacctcccaatgggaagtctgtgcctgcatccaacttgccatggtctcagtctgttagagcagcttggaaggtccacagagcagatctgctcctccgtgaccacctgttttctccagagtcctggggcaacaaaaagtgtcagaagacaccaaaatggatcactctgaactccttagaatgtctggactccttcccttaccacattcaggtatttgctcaaatgtttcctctttatgggccccttcccactcagcttctctaaaacaatacaggcacaccttcctctcaaacctgtgttaggctacatttttcatactaattatcctcaccaatatctccagtcacattatactattacttgtttattaatttatcatcaaaatccaatatttaattaaatacttcataggtaggtcatttctctttctcgttcacttcatctctcttgtattaccagtgccaagaacagagtctgacactagaacagagtatgcactctgtattttaaatgaatatatcaatgaatagattaaagaaaaaaaatcagtgaatgaacaaggactatacagcctgactcttctctccattcattcttctctgaagcaacataaagtcaacctgcaatctctctccctggagctcccctactatgtggcaggcagatatatggaaggaatggggagaaatgagagagcaggg

SEQ ID NO: 586781 - DNA, 4001 bp, Homo sapiens
ggggcaatcctcatccactgagctaaaggcttcaatggagggcagggagcagaggactggctgcctcacaccaaggccaggaaaaggtgcttgcaggtaacaccggggaggggacagagcggccctttgcatgccaaagtgcctcatgcctgtaatcccagtgttttgtgaggccaaggtgggaggatcacctgcggccaggagctggagaccagcctaggcaacagagtaagacgctgtctctaaaaataattttttttgacatggggtcctgctgtgttaccaaggctggagtgcagtggcacaatctcagctccctgcaaattctacctcccaggctcaagcgatcctcccgcctcaaccacccgagtagctgggactacatgtgtgtgccaccatacctggctaatttttggtatttttggtagagacagggttttgctatgttggccaggctggtctagaactcctgagctcaagtgatccgcccaccttggcctcccaaagtgctgagattataggcatgaaccactgcgcctggcctctaaaaagaattttaaaaaagagggacctttcctcaaagacaagatgctgcctgcatggaaggattccgagagacgggaaggccactccaggtgtacatgtggggtggctctccttgtccaggagatatggagggaagactggctgccacctggggggtggagggggcagggagatgtgggtggaagacacttggagcctggggctgtggaatgagccagagggtctgggcagcatgactgggcgtccagccacaggagaatggaagaaattggtgagtggaacggtctgggcactgctagatcattctggtttgggaccacagttcaacccagggaaatggctggccgactggcaggagtgggacgcaagggagagcctggtggcctccaaaggaaggaagggtgaacaagagggatgccccatcagtaagggtgggctgggctcaggtctgagagtggaggtgaagagctcagggcagtgagggctgagggtggcttcctgggagccgccaggcctcccatgccccatcggtgaggccctgcagatgtccccagagtgggtgggattgtggaggaaacgatgtctgtctgcctggagctgggtcttgagacaggtctccaggtctcgaaggagcagcccaggagggggttcaaatccatcctttatgttcccaatgccaactgtgtgtgccaggcccggtggcccagggggagggacagagtctgggcctcacactggatcccaggcagggggtggggtggggcaggatggagccctgtacttctgtcaggtggcacagaccctagaggatgctccgggactgaaccttgtggggttgcttttttttttttttttttttttttgctttaatgagcagtccgagaaaacaggtcttgtagaataacgcgatcccctctctagagatgagcttttcttcctggctggcctactggacacatttccagagggcggtcttggagtttgacttcctctaagcatctggggcaccggcaatggcgagtgtctctctccagcaggcgcactgggagggggcctcccaggggcgctaggctgcatccctgtccctcccccagggacgccccggtgtccggaaccggctgcgccgccgaccctgatcctctgggcgccgcaccccgccagggatcccgcggggtggaggtcaccaaccccggatgggtagtgaccgcgcccgggcagcctacagtcgtccccttccccgccgagcgtccccggtccaattccggcccccccagccgcagggaccccgctccccgcgccaggcccccgcgccgccacactcaccggagctgccctcgccccgcccggctcggctcccgctcggactgcgtggccgcgtggcctgtggcccagtggcccggccggggcgccgagcgcggccccctccctccttccgccggtcgcgcggggtcccccggccccgcctccaccccgcccccgcggccgccgcagccgctgccaaggcaaccaggcgccgccaacacgtgacccacccgcgggagagccgcggccacgtcacccgccgggccgggaggggcggggctggcggcgcctcctcggagagtgggggggtgggggtccccgcctcacctggaaccaccccgggatcgcgcgagggagaggagcaggggaggtgggaagaccccgacccgcgcgcatccctcctgccccagctcctgtccccggccccagctctgggagtcaaggcgaggccccccaccgccccatcgggggtccggctacccacagaccacgagctgggctttccctgcccctgggtccgggcgcaaaaggggagccccaggcttggcagggtgagcctcggggggtgcccagcattggacgctggctgcgtagaggggcggggagtggggacagggcgggcgggtgcaggtgggcagtggaggggaaaggaaggtggggaggggagaatccgtctggccacgcccgagttttcacaggatttttttttttatttttttgagacagggtctggctctgtcgcccaggctggactgcagtggtgcgatcacggttcaatgcagcctcgaattcctgagctcgagtgatcctctgccctcagtcacccaaagtgctgaggctacatgtaggcaggagccaccacaccgtggtagtttttaaaaaatttgtttttgtttgttttttgagagggagttttgccctgtcacccaggctggagtgcagtggtgccatcttggctcactgcaacccccgaccccggggttgaaacgattctcctgtctcagcctccgagctacaggtgcacgccactagcctggctacttttttgtatgtttagtagagatggggtttcaccatgttggccggactggtcttgaactcctgacctcaggtgatcctgcctgcctcggcctcccaaagtgctgggatgatacatgtgagccactgtgcccagccaaaaaaaaaaaaaaaaattctttttttagagatagagtcttcctgtattgcccagactggtcttaaactcctggcctcaagcaatcctctcttagcctctcaaagcactgggattacaggcatgtgccacaatgtccagctaatttttaaattttttaaaaaaattgagatgggtcttgctatgttgcctctgctggtctcgaactcctgggctcaagtgatcctcccacctcagcctcccaaagtgctgggcatagaggcatgggccaccttgcttggcccctgcccagggtgttggatggcaccatgaagagcttgcactgagctaattgggggttgccacccagagtgcactgccactcacagacccagcgagacccctggggtcccaacttcagtgcagcgtgctgtccttctcatgctgttcgcagacagcagcaaagagtttctgctgtgccctggccccttccactccctactgcagggagcctctcacctttaacggtgaattctctgcggttttacgagcgaggcagtcaaacaggagcattcttttcaggaagtgcagcacatgaataattcacagacagacaagatgggttcctatcagcccggcggtgccagacggtcccttggagtccttcctccatgccgggtaggctgctgcgtgccctacataggatttttccatctgtcacaacagcattggaccgtgacacatttatccaaacgaaggaaaaattccactcatgtcagccagcccacattttatgacaattggaagagtagatgttacggacgccaggttaaatccatctacacttcgagttgtcttttacaggctactgctgacagccagaatgaaaccaggaggacacttagtctaataaaccaggtttccccctccgggttactgacctaaaaggcaagttaggccctaacatggacataagcaaatcccagggttccttactggc

SEQ ID NO: 586782 - DNA, 4001 bp, Homo sapiens
catgttgctgagtatctctgctatccattacatgttgttgcctaataataccttaaacatcttttctattgtgacctagaattatattgaactgttccactgttatttaacctttcaccttcataaatctcgctaacataaactgcaataagctagtacctgacacagaaaaggtgctcggtaaatatttatttattgaacaaataaatgagtattcttagaaacatgaaccaattttttatatttctttgctatagttgtttgtatttcccacatgcacagcaccttgcagaaaactgatattaaaatattgttaaacataattttcattaaaagcaaaggtcaaaaactcttctgtgatccaccactaagtttactcatccctatttgccaatttgctctttcagcaggaacatttctggctggagtgatctgcgttccatagatgaaatgcagagaacataatcaagaaaatgctccagtaataatataactataattgaaagcagtataaatagaaaattaattgaagatgcagttgttgacctctaacttccctaaataatgcacccctttagacagagggtagtacttttccactaatgcttcacaggccacctcaaattgccatgcaatatttctagttggatgaaagtacagtcacgtgtacattcaaagatggaccacatatacaacagtgatctcataagattataataccctattttcactgtaccttttctatgtttagacacttttagatgcagacttatcactgtgttacaactgcctacagtattcagtatagtagcaccgctgtagaggtttatagcctaggaggaacaggctacaccatacagcctaggtgtatagcaggctacaccatctaggtttgtgtaaatacactttctgatattcacagggattaaattgcctaacgatgcatttctcaggacgtatccccctcactaagtggcagcaacgcatgactgtacttaaaaaagcaaaccagaagatgggggtatgagtatgaccctgaattctcattcactctcttcgcaggtaagatccaagtttgattaattccaattctgattgagtctgaatcaaaaagcacatcaaagaccaccagaaaatagtcaaaaataggttaaattttgaattggtgaacgctaccctctgcctattgaaaggactccctacgtatctatgttcatccagacaagacaaactcctctctagggcatcctgtgaactatcagttaaggagaaaagtttaccctagacctcttctggactgttacaattctggaaaagccagtaaatttttaaacctgaagcactgctttggcccttagtggccttgaaagcaaccacctctctacacttgactcactccaactaccgcacagaaacgtgtgaacttacatttgaataaataacaccctgcaaacacatctgttacataaatgtcattgggttggggtaagataacaagcaacttctaggagctaatgtgggcaaacttctgaaaagtgtggcgtgtttcaaatacgtcttaggcaacgtcctatagtgcaggccggtcgctctcagactgtctcctcttcaatattcggaagagactgtgggtgaagctgcagtacagaaccacaacacccctatttaacgtaaaaacggccttttggccctcaatccaaacacgaaaaaacaaatattggaacaggtcgcaagactaccgaaacgtctgcctccaggatctggaagacagtttaactacaatacctctccaaacaaggactgcaagatggacacttgagactcgcgacaaagcaccacgttttccaagtggggcattctggcaggcaccaccgcagaggccagtgcagccagcccacaggacccttgcacaagacggagcctctcccgagtctggcggcccacgctcccgccggaaaccggacccgcagcgtcgtgggaggagcctgcgctgccgggctgcggcgtgacggcagcgcgtacgccgagcgtcgccgccgctctagtctcagggccggaaccatcctcttctcgctggtcctgtgcgcgccgaggttttgcccattcttgggcttggtggggatttcgggctgacgctttttccactcaaaggctaaggagacgacatggagatgggcgaatagggaaggggtggaaggggttaagggggtcccgtgggcctccaatgacccctgaaccccgtgcctttagttttaccggctggaagccccaagtttagaaaccttgagtgcctaagaagacggacccggagctggggcccttagagggacgtggaaggcggacttagaagactaatattgtcaaaagatgtttttgttgtcgtttttttccctgacgacgttgtgggaaattagtggcattgagtacaaaacagggtgtaatggggtttaatgcacagcttggaattactattttttgtgcaagctttaaaccagatgtggaaagcctctcagtcctaatgggatgaagtcgtagtgtgtgttggtgaggttgatagtaaaaataatgctacttttagcattaggctttcacgtgtatttatttgtgaggcacctactagcgactaaacactagaagattctggaaataagatacagaagtaggcaagtgcatggtggaaagagagcttggcgtcctgaaacccctgggttgggaccactgactgactcaactgctgaatagggggactttggaatagttgagcctcaacttccttatctataaaatagggataatactggctaggttattgctaggagtagaagatcctgtacatactacctgttatacataaatttaaattgtggacttcaatctgcccatagattgtagatcagtcttagatttgtgatggtcaaaaggatcttttgagagttgtggtatataacgtattagctagtcaaaatagtattttcacagcaacaattcaaaagcatttgcccaggtactttttaatagagaattctaaaggttataatgggaccacccattaaatttcaatgtctccaagggaagctggcctctgatactctcctaagatggttatacgtccgtaacatactgtgcatataaggtatacatatattataatcataacacgacatctttatagcattcaataaaactgactaaactgtctaaaatgttagtctccctctctatatactttatgaggacaggaaacactgtcttcacagttcaatttccagcatacacagttaacgcctggcagttacataataaagataattgttgatctgagagaacatgccttaccatctggatgatttaggatggtttctcagaggagagaacctggaagctgaggctgaagaaaagattcacctgtgagaccaagaaggaaattgtaaacaaaagaatgtacagacaaaaagggacaaatgggcaatcccataactgaaactagcaaatagtttttacatataaacctggagagtagtaggaggtcaggctggggaccaataaagaattgtaggcagagaagcaaatgttgagatttgacttagaaatattccttctggctacagtgtggaaagtggaatcaatttcatttgttgaaacgactattgcagtctcccaaacagtgaataataatggcctcgataggcagccaagatggccgaataggaacagctctggtctacagttcccagcatgagtgatgcagaagacgggtgatttctgcatttccatctgcggtactgggttcatctcactacggagtgccagacagtgggcacaggatagtgggtgcagtgcaccgtgcacgagccaaagcagggcgaggcattgcctcactcaggaaatgcaagggatcagggagttccctttcctagtcaaagaaaggggtgacagacagcatctggaaaatcgggtcactcacaccctaatactgcgcttttccgacgggcttaaaaaat

SEQ ID NO: 586783 - DNA, 4001 bp, Homo sapiens
cctagtattgctatttgttaattttcccaacagtaaaaaaaggataaagatgaaaatcaaaatcagctatgaaatcctcattcctcatatttacagagaaggtttcatttattcattctataaatgtttactgcaaacctactgcgtgttcttgacacaggggatcaagtgatgaacaagacagacaaggtctctgcattcctggtacttacatcctaatgagggaaggcagataacccaataacccaaagagacaatttcagagagaaatttaagtgctatgagcaacagcaaacgggtgatgtggcttggctggaggggatggtcatttagcttggatgcataagaacctaggcctgcttgactgatctcctttagccaagtatagtcctttagccaaggacctcaccttgtatgatacttgcggggtacagtgcagatgatgagaagccaggccttcgctttcacccatctgtggaagtatctcttttgcagctgtagtttaaaatatttctaaatgccctcatcccaatactcaaactctgagggtcagagcaacacctagggggtctcaagcacctctgcgcagtacgcagacacatggaaaccgacaacttcacagtcccctcagctccaagagtcccgactgaggagactggtggcttgtgaggcggagaaggacaagcacaagtgtgcagaaggcagcaagcaagttgcgttgccgaaggaagggcggcgcgcccctgcttaagaagtatctggacgacctgcgacagtgcccatcagcgactccagaggccacaaacgctccccgggaagctgggcagcgctaagaggctgcctgggagtttctggcttatgatgacagtacttaaagaatttacctgaccacggaataaacagagacagaggtaggaaaacccaactgtagacaacgttcagacagagtgcataagtccctaagaccctgaactaagacgctgcagggcctccaggaaaggaccaatgtgagagacactgagacgagagttagggtgagcctgaaggtgatctgaacagtagtaattggaaactaacaaaaaaaaaaaattccagaaggggccagaaagctgatgaatatgtaaattcagacaagaaaggaatgtgccctgggcctccagcccagcaccggggagctgagcaagccggggttgggaaggcgggcgagcggagcgcctgccccgcgagcgttgtctcagtctctccggcgcgccccatcccgcggatgtggtaaagcttcgcgctcgccccaatttaccaggcttcctgagcctctagccccggcgtagcgcctccccgctgcccaggacagctccgcgcgccgcgtcctcccgcacctgcgccgcggcccctgcgctcggctcctcctggcggtcaatcctctgagccgtccctcgagggaaggtgtcctggggtgggtgagacccgggtcctccttccccgggagctgcagccggcacccaagctcccaggcttgggtctgccccagggccggagcctccccgggcgactcggacagaccccggtccggcagagaaccgcggcgccccgcaaacagcagcccttccgagcccgcgccgccgccaggccccccgacacccaggccccatttaggcgggcgccccgccactcacctgagcgctgtgcagccggagacgctccctagttccccggggccgggctccggggttagcgcacagaaccgggagaaggcaaccccggcttctccggtacccccgcaacgtgcagctgacagctcccgcaccggccgcaggagtcgggggcggggatggccacttgcagacagactgcggggccggagccgcgctgcgcaccggccgcgaagcgctcaagtcccctctcccgggccggctggcgggcgccaccagcacgcggccagttctgagtactttgcccagaacttctcggcgcgcgccgcccggcgattagcccgaggagccgcgcaagggcgggagcgcaggggaggggcctgagaggcccaggggcggggccccgagggggcgggagggcggcagagtgatgcacaatctcaccaatcagaagtcgcctttcgggaaggaggtggggcgatgtcctcggaagaagccagcggattccatgacgcggcgggggaactagggaccccggattccggatgggttgggagggcggagggaggcgagtcctgcggcgaggcactgggtggggctcccggtggcccagctcggtgcctgcgcgcggtaggcgttcggtaaatgttcctctagtggcttttccgggccagggaaggaggaaaaagtgagggcagcgcgggaggggcaggtttacggagaaggctccaggggacccttgcggtcgcacaggctaggagaactcgacctcccgagaaagtcagactgtggcagaggagtcgagaacagaggaaatacatagggaggcagcactctaggcacgagatgacaaaggacagcatcagtgtgagacccggggctcggagaccgtgaccctacctccagaggcagtcgtgcagattcgtgccggggtgattttgttctgtgcagtttatgtgcaagggggtaggaggtggggagagcaccgtcgttactattaaatctccctgaaagacggaaaagtccacccgacttgacttcccactagcccaatggccttctttgatcctaggacgaatgcaagcagctgatggtttggggtcagtttgcagactgcaaatgtgtcgagtgccgcaggtggcgggtgggaagggcatgagcatttagtgagcacctagtatatgccaggagcagttgcgagcttgcaactgtgagaaaggcgcaccaggctccagtactcacggggcttgcattttttgtggaaagacagacaataaagaagagaaaatacatatctatgcaaaaaataaaaggctgacagactgttagtactgagaggagggccaagtccactttcgaaagtggtttagcgcgtgatggggcgctcaccctgagggcctctaggcgagggtggcttttacccagattcctgagcctgggaaaggagctgccacacccagtctcgcacagagcgttccaggcgaagggaatagcaaatacagggtatttagcctccctgaagacccaactaaccgacctcaccgagctgggcaccgcgcgtggctcgctgggctcagcgcctgggacggagtaagggctccacagtgttaaatccccctgccaaccaccacctgcagcgctcgacgcattttcagtctccaaactgaccccaattcaaggtttctgagactctttccggagctattctgttcacatttcattcaccacgctcagatcttcgctttctggaaccatccccctcgcgaaatgtctgggactgtctgtttcggatctggcaggcggcgggcgagggcgggaggcgccagagatgctgccgagcaaatccactgtcatgctgcccacgtcggcacacggagaagcttattggagaagatttcaaatcgaatgactccgcggttcctaaaccacctcgcaaagcccgaccagcgccaggtggctggacgggtagtggaaggacgcgtctggcaggcgcgcggaccgtccaaggaggcaccttgcccacgcccagccccgccgtcggagcagcttagactgggttttcccaaacctccttccgtctttctgtaatttctctctgagagaggcttgctctgtcctcctcctgccagtccctttcctcgttcaagctattttctttctttttcttttgctctccaccttcagcctctccgcctgtttctttagcattggtttttctgtaggagacaagccttcaatccgaaaggaagtgatttgcatagggctttgttgtttagcatcccgttccgagctttttcattaatgtcttcctaatcaaataataatagagtgtacattctctctctctctctc

SEQ ID NO: 586784 - DNA, 4001 bp, Homo sapiens
ttcaggctgaagttaaaataaacttaataaattctccaccttctctgccacagaggaaatataagtgtctccatttataaagtcacagtgtatgcatattaaagcaggagaccctaaatataaaagatgaccatttgatgaatgagtgactgattgaccaagcattccaagtcagaaaaaagttgaggcatcaagcacattcctcttacccttcatgatgtaacttccaaaaaagctttgtgaaaaccaaatcaattccaaataacacactgaaaaaagtttctgtagtatttgatctgagaatttcattgtactgttccaattcctatggtgtaatcaccacctgctacttaaatgaatcatgttctccccctttatcaaagaaggacataacaacccctaggtgtaaggaagatggcgcaggtaggggatataccacatactgttttaatcccaaccagagttttggcttagggagaaaaatactcctgtggaaagctgacaaagaggacaagcacagtgaccctcatgaaaacagaactgcagggagccatgatgcattagccaatgactaattttagtcttttcttattttttttttttttaattccagaaggaaccgatgacagtgctgacaaaattctccttaacccctcaggggagatcctggagggcttcccaaatgtcaggtctgtggcaaaatctaatttcctggaatcacagattcatgggtggcaaagctccttatcccaggcaacgctcagttggacagacccctgatgatgtgtcataaacgtgtagacgtgactgaggtgggagttgcttaattgctgcttccaattctggaaccaaagactctgggtgatttctcaggccagcacttcccatgaggaaaaggaaatgccaacagaagcagcaggtgctgaaaaggctcagagaccactttggtcataaattcagctttctgacagctcattctctctccatctaactgctgggggaagaattataatgattaatgtgcatttactgccactgatctaaaaccagcaaattctgccaacaaagatttattagaaaggaaaccaagaaacaatatataattactcaacagttatttaggagttaattattcattcctttgtttcagttctttcttcctcctacttaatttctttggaccatttttctgtagattaggttacctcatccattatagatataaagcaggtgagtctcgaagctactaacagggcaatctgtggttacaagctgccataaaaggtttgatgaagggaagaaagttggggtggatattataattaccagaaaaatgattgattgtttttttgttttgcttagcaggatataaaggaaagtgtgggctctgaagccaaacagactgagctttgcttctttctttgctccttattagctgtgtgtccttgggcaagtaacctggtcagtctgagtcagcttcctcatggggaaaatgaagatgttaaaatctacattgggggacagttgcaagaattaaataaaattatacgaagaaccaaatgcagttcttcccacctggtaggcacacattattaaaattatacagaatttactctcctcatacagtcaagagataaccaaaagtaaatgctcttaaactgagaagtaggctttcccaagtaaatgtgtgcattttaaccagcaaacttgatggcttacatttgcatattaaaatttgcatgagttaaactttacctgtcgacttccttgcttggaagagcagctacttgtgctccttgaaggtgataccaatttttgggacacaccaaggttcttctcatcactcatcatggacagcaagtcacttggcctcgagacaatcaaaatgccatcagatgacaagggagccgagagtatggaagtccccagtggcaggtggtttagctcttatccaaagtatttaaaaaacattttgggtggcccaaaggaaaccctaaaacctaaaaaagagaaattagaaagaaggtcagaggcatcagatatcatctctaatttgccacaaattgtctgcaagtggcttaaacatactacagattacagactcacgatgtttagctatagcaggcgccgagaaggaaaagaagctttacaccattctcttacagggaattttgtataggtggtttttcatgtagctttgcaatatagcaggcttaagaacattaatacaaaaatttgagtccagacacatacaaaatcagtactataaaaaatcttaaaacacagtaagacactacttcacatccactgtgatagctataataatttttttaatgggaaataactagtgttggaaagagtatggagaaattggaaccctcagacattgctggtggaactgtaaaatggcatagccgtggtggaaaacagtttggtagctgttctatttctcaaaaatttaaacatagaattatcatatgatccagtaattccaatcctaggtatagatccaaaagaagtgaaaacaggtgctcaaacaaaaagttgcagaccaatgttcatagcaatgttattcacaatagtcaaaggtggaaagaacccaaatgtccatcaactgatgaatggatgaacaaaatctcatatatacattcaatggaatattattcagatattaaagggaatgaggtactgatacatgctataacatcaatgaaccttgacaacattaggctaagtcaaataacccagacacaaaaaaataaacattgtatgtttccatatgaaatatccagagttggcaaatccatagagacagaaggccaataattagtggttactgaggggagagtagagtgactgcttaatggctacagtttctttttggtgtgataagaatattctggaactaggctgggctcagtggctcatgcctgtaatcctaacgctttgggaggccgaagtgggaggattacctgaggtcaggatttcgaaaccagcctggccaacatggtgaaactctgtctctactaaaaatacaaaaattagccaggcacggtagtgggtgcctgtaatcccagctactcaagaggctgaggcaggagaatcgcttgaaaccgggcggcggggcgggggggacgggggggtggaggctgcagctctttgggagtcttgccctgatggaggggtttctagttttcaaagaggaaatgtgggcctagaatcactggcttctcccacagccctgggttaagagtaactaacatgtttggttttggcttcagaaaaccaggactttatttaacacactaagttcaagtaaattctacagctttcctaagcaggttaacaacatcaaaatatacatacatatatatatatatctccaacccattccattattaatgttcacatagtctaattataaaaagaagagtatcatatatttgtctaggaaccagctagttaactatgatatcaaacctggctaattatcatatactctttcctacaccttcattaacacttagttcttcaaaaataaaaaagagtacattaaagcaataagctagaatcaaaacaatgaaaagaaatacaaaatctcagaaaatgaaattaaggtgcccagagccatagagctcaattcccatgttactcttaggtaactccccaaatctctttattcatttagtattggatccaataataagtaagactaaaagcaaaccagcaccagcctcttcataaaattagccttactgatgggggcatgactaggtgtacctgaagttagaagcaaatgcaatctaaaaagtagcaagagagtactgtaaagatatattaatagtttgtggaaaagcagtgttggctgttgctgtttgagaaagaaaaaaaaaaaatcaaaaacctggtgggagccccaaatgatgaaatgtgtgtctgtgcttggggcggggagggggcatccactgctatggcaacagattccacagtggattaggaat

SEQ ID NO: 586785 - DNA, 4001 bp, Homo sapiens
atggagaaatggcaggctgagagacagcgtgaggaatactttcgtttaatgcaacccctgaactttcattggtattcacctgttgcaaggaaaattcagtagcctgtatgttagccacagatgctgtcattacagccaaggcaggactgtttctaccctgagaactgctaatcaatgggcctgtcttcatagtgctagtagatgaaggcacagacatgctgttttcacagcctgcagacaagtcaaagctgctgtcgttcaaatctgtcaatcttctaccttctgttgagtgtgctttcttgtcctgaagcacatgatgaggcagcagctggtgaagttcctttcttcttaaatgcattgcagtaattttcatacccatctcaaacatcttactattcactgcttgcctataaacagtatctgtgaaagactggatatcataggtgagatcaatgctgagaatttcagaattatctggcttttttagccctaacccaatcacccacattgtacgaaattcttccatatcaggattttctttgggtgctggaaatgactgtggattcacatgtgccagtgtaataaattcattcttctccaagctcccaaccaggattcggatctttgattccaccaagcccacccattctaaatgttgtttttctgttgatgcacttgccagaagtacaatataatgcttgtacttttgaaagaagcttggagcttcaaagagtttggaccactctgccttacttagcaaaatctcgtgtgtgatagcaagcccctgtttaaactcctcaatcatgaccatcctggttgaaatagacacgttgtatgtggagttctgctgtgggtatgctggtgtgatgataggcataagatggtacctatcactgggatttactcttgggtcccatacaggcaaattaagattccgttcttcaggctccttcagtaacactgggtttggccattcccattctgaaaataccaagaagaatttccgtacaagagttgacgctactgcatttggataaagctgacaagttcttgctactagcatggcccaggaaacacctccgaggaaacctaatatattggaatagatattgtggcacttggcccacagtttgatggctctcagagtcagcctgaagttgtcaatgtttggcactagatgtaaaatttcatcggttacccggcaaccattaaggcttcttatgcatctaatgtctaaatttttaagtagactgtcatctcttaagtccaaatcttctggaatagtctgtagtgctaatcttgcaaataaaatatcaatctctatcccatcaaaacacagtttgataactggcacaaatgcctcctcgacagcccttaaatctttcacttcctcctgtagtttcagtttagcatagaatgaggtgaaaaagtcgcttcgatccacatgacttggtgcaacgcacaaggcgtcaatatctgcgcctttcgtatgtactcctaatctgtaagagccaaacgtaaaaatctttcctccaacgttttcaattacagactggggaagactcttgctttcactgatttcgcgtatccattcctttaccagattatttaatttttccaaaactaaaatcctgcgctgcagttcctcttcctcttcgaagaccccgaagggcctgagggtttctattagcctctgggtgaggaggcagtccgtctccttggggaccgctagactgataggcgaggagacgccgtagcgattcggcggcggcgccggctgcggtggtccctgggttgtcaccggaaacggcatcatctttcagcgcccgccccgccagggcacgtcccccaccaccgcgaccttcgcggccgccgcccgggtcatgatccgctgaggcggaagggcagggcttctagctgccctggtccgaccccactcccactcccgctgcgcgcccgccgcttcaggagcttctcctccttcccctcagccccaacatggcgccagacccctcagcggctgcgttccagaacctaccgtacacgcgcgggcgcctgcgcacccgccgccagcgcgagggctcacgggagccacagcgttctgggctggggctcctaccgctgcgcggggggctatacatgggggtgggcaggattcacgttgttgatgaccggccaaactcaaccctttattgccactattttacatatttgcccaactttacccatctaattctttgctctccaagtcccttgacatcgcagatgtgcatcctttttgggggcaccctcagcactcttcaccctagcgtgcaccctttggaagtccaaagaccccttcgtggtgggaacccgcggtggaaagcagcttctgtcttgtttcttgggccgttgctggacattggtttagctggggcagcatttcgaggtcgacatttgtgttctggccatgctttaagggcgcgatactgctgtcctctggttcccgttgagaattccgcagctaggtgaactactgctcgtctgtcttttcttatggcagctataaaagtgtctgtccctagtgccctgtgatcccaccactgtgtgtccaggcatagatttctctttaataatcttacccaggctgggcgcagtggctcacgcctgtaatcccagcactatgggaggccgaggcgggcagatcacctgaggtcaggagttggagaccagcctcaacatggagaaaccccgtcactactaaaaatacaaaattagccgggcgtggtggtgcatgcctgtaatcccagctactcgggaggctgaggcaggagaattgcttgaacctgagaggcagaggttgcggtgagccaagatcacaccattgcactccagcctgggcaacaagagtgaaactctgtctcaaaaaaaaaaataaaattaaaaataaaaataaaaaataaaaaatataatcttacccaggatacactatgattcccgaatcagaagtcatgctttttatgatctccagaagcttcttgggcacttcctgggaatatgttctcccacttgtctcctgattctcttcatctagacacgttgtcaaccttctcactctgtcctccatgtctcttaagccgtgtgtctttctgggtgatgccagattacctccaagtcctctcttcagttgtatttagtctgctgtttaagcatcattgaaatatccacttaaatacttatatttcactattttgttcttttccaagcttctctgccttttagatggcattctgttctttcatgtttttccccctaccttttatttctttaaacgtgttaaacatacttatttagtactctataactaattattctaattccgaatgctcttgagaaactgtatagtttgttgttatccaagaactcagagtggtattacctcttgggtcttgtaattttggattgtgagctcatttctggtgaagcttggaatgcctgtgtagacgctgtgtccttccaaagaggatttgctttgtttccagtagatgttcttgtacactatagaattgcagtcagtgtaatttcttatccagggattatccacaacatctagatggtgcaactttgaaccccaaatacatgtaagaggacatgtggttttcatttttaaggaacagtctttagtttttcccacccaagtcaagagagagaacttcctttgccatctcctttcaccaggtagcagattcttcttactccattttttcactcaatgtgtcaccctttgaggattccaattgtatttggaggggtctcaattctaactccctaccttttaaggtcccaagagctttctgtctcttcttggacagctgctaaacttaagtttctcagtttccaagactggccaatgcctctagggcggttctagtttcagaatcagctacaatcctgaggtttcaaggtatccctttttcttccagccctagagacttcctttattttcctgggtactcagctat

SEQ ID NO: 586786 - DNA, 4001 bp, Homo sapiens
tgcacagaacatggacgctaagtgctggggagacagctggagcctctgccctcagggagtttctattctactggcagctgggtgccatgaggaaaataaacagttccctgtgaccaagagtaaggggaggaaaaatcctcaaatgggatgtgatctttaggttgaggcctgaaggattaacaaatagggccaaccaagagcaagaagggcattccaggcagagcaaagactcccagaaatgcccaggctcccagaaatgcccgggggggggggggtgttccagtcacagaagggtcctgggtgggcagggaccagtgccccaggaccttgtgggcgatggcagggagtctgcattttccagtttgtaagcagattaatagggttgaactgggtttaaagatctctaccagctgctgggcagagaaaaccttcattgtctggcctcaaagctggcaaggggcgacccgcggcgtcgtggagttcccctaagccgccgcctccctccctccccaccccacacggccacacccgggtgttccacccggcactaccatgctctatgtaaatcactctctccccccaggcgtctagaggaccccactcgaccctgagtccctcgcactgtgccaggtactccgcaggtgctcattaaacgctcgctttagtgaatgacggtgcgaggtcagggcagagccaccgaattgtctgctcaaacttcaagtaggacccccaagcgggctggaagtgcgtgagggcgcgcaggacctccgcccgccgtcgctcccggcgcggcgccttacccggctctcaggaacttgcaggcgccgtagaccatgaacctgcagaggtggagctgcgcgcagagccccacgcagcccggcttggagccctggtgcgcgcgacacaggcgcagcggcgaggcggccagcaccacgcgctccggggccgcggctgcgccgcccgcccgcaccgccaccacgaagcgcccacgctgccgcagcagccgctccagcgcgtcggcgctcaagcccatccgcaagcggcgccgcagctcgggcaactccagggcgcccccggccgcgcacagcacctgggtgacctcaccgacgacgccggcctgggccatggccgctgggcctgctcccgtcggaccgcgggtggcgcgacgcggacggcggcggacgctggctggcgggcggctctcgcagggtggagacgccggcgggaaacgaaaccgaaagcggccccgggccggcgaaaaacagaacctgtgcgccctcgccacgcccccggtccgcagctgagcggctgcgccttccgcctcagggcccccagctgtgaggccgccgcccgacggaagctcgggagctcttgagctcgggcgttcggcccggagcgcgggctgtggctgtggcggctcgcgggggtcagtacctagtccctgaaaatggcttccctggatgtttgagggaccaggagcccctaatgccgcgatgctcagcgcgccttcagtcagagggagcctcgagggcggcggcagcgctggcggagccggctggacgccgccggttaaagccgctcagcgtcgcccaggccaagcccgggcttcgtagacggctcacagaaacagggacaactgacgggagctctcacccctcgaacaagtgacaaaagcgatcactccgcatagaagacgcacttaattaaaggttcctttcgcctcggtgcatcaatgagttccttcatttaaacataaaagggtatgtcctttaaaagagcaaatccgtgagccgagattgcgcgactgcactccagcctgggcgacagagcgagactccgtctcaaaaaataaaataaaataaaataaaatccgttactcccagcccctgctaagtaacgattgaacaaatattttagaagacccttcagagcaaaggaccctctcacacgctgagagcaatgcgagttgttagagccctttgaggaggtaatccaggaatagctattaaaattgaaaacgcgtgtgacctttgacccagcaatctttcctctcggaatcttccagaagtaaaaggaacagtaaataagttatgtgtgaaagtgttactgggggaaccctacctgggaggtagggttacgtgggaacagtgtggttgatctttaaagactattacgaaggctgtttaacaagcatgcgttagagctccgtgtgcggatgtagaggggcagacagccatgatgtggtggtaaacgagaaaagatggctgtacagaaatgtctaaataatcaagttgaatgatcaagaattaatttttttaaatgtctgaataacaaaaagagaagcctgtgtgtgtgtgtgtggcaggatatttttgaataagcacggagaaagatgaagaaacacacaagggtagttgagaggaggcagtaggaggtattaggaaaatggaaaagggaagatgagaggcagaaggattgtggggggagagtacttacggtatacggtataacattcactaaaaatgaatataaaaatcttaactataggccaggcacagtggctcacgcctgtaatcccagcactttgggaggtcaaggcgggcggatcacttgaggtcagtagtttgagaccagcctggccaacgtggtgaaaccccgtctctgctaaaaacgtaaaaattagccgggcgtggtaacgggcgccagtaatcccagctactcgggagacaggcaggagaatcgcttgaatccgggaggcagagattgcagtgagcggagatcatgacactgcactccagcctgggcgacagagtgagactccatctttaaaaaaaaaaaaaaaattacctgtactattactacaaaaatgtaaataataagtgtatggataaagactagatagtaacatggacaaatgaaaatgaatttatttaattaggaaattgaatgaagggttttctcttggattttaattgtgattttaatgttttcattgtataaaatgttaattttgtttttgttattgttttagagacaaggtcttggtctgtcacccaggctgtagtataatggtacagtcatagctcactacaacctggaacttctgggctcaagcgaaccttccaccttagcctcccaagtagctgggcctagaggcacgtgccaccatgcccagataatttttatatttttttgtagagacactgtctcatttgttgcccaggctgatcttgaactcctggcctcaagcagtcctcccacctcagattcctaaagtgctgggattacagtgagccaccacgcctagcctaaaatgttaatttttaatttaaaatgttaggcagagtgcagtggctcacgcatgtaatcccagcattttgggaggccgaggtgggtggatcacttgaggtcaggagttcaagaccagcctggccaacttggtgaaaccccatctctcctaaaaatacaaaaattagccaggtgtgatggtgtgtgcctgtaatcccagctacctgggaggctgaggcaggaaaatcgtttgaaccagggaggcggaggttgcagtgagtcaagatcgcaccgttgcactccagcctgggcaacagagcaagactccgtctcaaaaaaaaagttaattttagttgtggtttccatatttttttgcaataaaataacattttttaaaaaagaaaggaagagtgatgtcagtgaaaatggtggattaagtatcccagcaagtttgcccttccataaaggaagcaaggaaagaactgacaaaaattgtcagaatcaactttcttagagccctagaaattagtcacaggtttgcagcaacccatctggcatttagtcaggaaaaacagcaaactctcagtaagaacagcaatatttatagtattttaatttaccctagtcctatcgcacccccatctctagttccatggcagccttgaaaacttacagcccacgttcctagtacctgtaccagagggaggagacag

SEQ ID NO: 586787 - DNA, 4001 bp, Homo sapiens
ctgaccctccatctgtcccagcccagcacctttctccagtgcctctgcttggcttggggagaagatagtccgattccggtggccggtccctgggtgggtaccccggggagtctcagagccactatggggagtgaggacagctggagccaaaacagctgaaaaggaagataacagtttgtggtggtttgtgatggtgattcctctggtcagatggggtccctgagtctctggggctgcagccgggagacaccatgggtagaagagcagagccaagctggtggggcattcatagttattagaggtcactgcagggtcacttggtggaaagggtgctcaataccatggtggggtgcatgcttaatgtgcaagagtttggagggacaagcagtaggcttggtccaggggtgtgttatcccaaagaacatgaatgatgctctaagaagctatgcatggggcagagggagggtatgagatgcagtcctgcctcttcttcaatagatcctgtgaacccaggggctaggggacctgtgttctgttccagggcctgccatcaactaggtggtgaccttgggtaagtcacttcacttttctggacctcaattttcttctgctgggagagaatgagactccctgcccagtcctccttattgggttgttgtgagggtgatccaagaaagaacgagaaagggctttgagaactataaaatgctagagatttggctgtgattagccctggggacaactccaagacccacctggtgacctgagccgtgtgcacggtagtccctggtcctcctgtaatgcccgcaggactcggttgatggaggagacctgggagtgtcagggtgttgagtggagagatggtgctcagactcagggctataccctgaggatgttgcccttaatatcctttttcccatctgtctccacctacacattgttcccaagggcagcctcctctctctctctctatgctttctccttcccaatcctcttattaccaccacttttcaaaagaaaaacttatgggtcagaattgcccaggagccctgtcaccagcttgggatgcccacattgccaaataagaaaggttctttgtctcccccagaaagcctcttttccagccccagtgtggggagggaagggtacttacactgggagtcttgtcctgggtgcaaagcccttcagcacaaagctggcgttggatttcccaggcaaagagggctggacactcacccttcagctgggcaattcgagccaccacagggggtgtagccagccgtggcttgcttcccccaatgccctttggctccaagacacctgtgcggtagtaacgccctaggatcttgctcacacagccattagatacctgagtcaggtgagaagcagggacaggtgaggcatgatgggcagaaggaaggagagtgtccctgggacaggaggaggctataagacaaagccaagacttactggaccaggccatgaagtcgggagtccagcctcacctttgagggcctgaggctccccttttcaacctccgagaggatctcccaggaagtgacccaagtcccagaagccctcagagcctgcaacagccccaggctcttgccttcagaggagccctttctccctgcttcctgtccccatcactgggtaaaggtgctggcccattaccttaaggatccgtgagatgtcacagggccgcattccactgactgctagccgcacaatctgctgccgggtatccagaggcaggggccggccattcacaaagagccccccaagctggttcatgctgctgatccctgggcgtgagacagaggtatccacacaccacctctcccactgccctgcccgcctgtggagagggtcactcaggcccctccagcctggcttcccaccaccgagtgcatcctctcctgggagactgcatccttgctgcccccaggctgtcaacgcaagctgctttctttgagagctggctcacgggtgagtctttgttccttgcccatacccgccaactctcctgatctaagggaagcaggacagggcaggaagggagggactggaaaaagcttccccagaacattggccaatagcagatgaaacagttgatggaagcaaagccctgaggtcttcccctgtctctgttgtcctccctgtcttcccacttcccccaggctcctcaccgtcctgatgcatgctccaggctgaccctcctcagaaggatgagactccagctgggaaggctgggaagggaagttccttctaggagctccttttccagcttgggggctggctctgcaataatggggggttatttgggtgaggtcttttgcttgaaatggtcctgggaggtagtgttttgtgatagagggtcaggttcctaaaatttgccagtgggttggctaaaatcagaaaattctaattccttttatttaaacctttgtgtgataaaaactaaaacactgcaggttggctgaggactggatctttcttgaagtcctgataaggggctgggaggattgagagggttctcctttcctacacattcattagaaaagtttggggaggtagaaagggataatgctttcaaatgctcaagctttcccctttccaaatggacagctgttgtctccagctgctcctaagccttctcagccctggaagacacacccgagccagagattctggggtcctcaagttcaggggtccaccttcactattaggcagtcctcggttgggctctccaaactgccacccaaatgctgcacttcagaaaggcttgctcctgtttttttatactctccaggaagctctagggaaactgggactcagctctaacccaccaggcattgaggctctggtcctacacactgggcatagagatgaacacgcctgaagagccggcttctcctaggagacgcatctcttagcatctctaacctgctgagattgttcattctgttcattctctgaagagttctagatctcacagtgaagcttcaatttcagagacgatgtttctggtatcagacactcattcattcaactaacatttatcaaaggcatattgaagggaatgagaagcaggagaagactgtccgctgagcaacatagaaaccgtcatgagcccaagcgagtctctgagcagcaagggacacaggtcccacaggccaccatacctcttctactttcattagtaatcaatgggagttgaagatgcctcctttcatgcctggaaccctggtagtgctggagatcaccccaaggaacagcttatgcacagaactttcttataataagcgtgccatctgggcttagttaattcatctgcagttgtatgctgaataagatattaagcatgagcacattgctggttgttcaggatgaaggcagtaaacagaaaagggtaaagtctttgctctccaacacattacagagcaactggagaaaagagactagcaccagtgaaacaaagaattacaaagagtttggaatccagagtctacttattaagttcagtcgctaaattggcttttactcacttgtttctaggtaggtagaggcacagaccccttcaaattctcatctttccaaaaagtcgggaaagaaggcagaggttttccaaagagaaaactgaggcacagattggcattgccacaagtcaggggctgtccagagagtaaaattcaaggtttagaagccagttcctcatcagaagctacaatttctggctcctaatcctgggctctctttctctgctcccacccctgtttcatgtttgtgtaattgccacaaaaacaatggagagaggagaatcaagcagggactgtaaagggctgtgccaagacagggtgaaggagctcaaaatatcagccaaaccctaaatccttgatgggactcagttctcctaagtgaccagaattcaaaagagcagtagggatgcaggttcagtatccaaacctaaataatctccaaacctaaatcattatgcccca

SEQ ID NO: 586788 - DNA, 4001 bp, Homo sapiens
gtgtgctccctcccccaccaatgaggggcgctaaagggcaggtaccatgtcctcttcacctctgtattatacctggcacctagtccatgcctgcctcatattagatggtcaacatgtgaacttataatccacagtcataagagtcagagaatcagatgtccaggctcaaaacttttcagaaaatatactgtttcagatgaaagtggtttgccaaggacatttttaagcacttagatttgattcaaagtcgagtaaatatggttccagttcaacttgttccaggttttaagtaacatttggttcaagtcccctataagagccaaagtcctaaaatgaaacacgaaggctaggaaggagggggaagagaaaaatggtggatagcaaaaaacaaaaacaaaaaaacaaacaaaaaaaagaggggcgggggaatcatcaatactggaaaaagctaacactgttacaggcactcatcttcatcgctccgtgttcagcaactgttttactctgtaaattcaaagatagaaggctttttttttttttttgagacggagtctagctgttgttgcccaggctggagtgcagtggcgcgatctcggctcactgcaacttccacctcccaggttccagcaattctcctgcctcagcctcccgagtagctgagaccacaggcgcccgccaccacgcccggctaatttttgtatttttagtagagatgaggcttcaccatgttggccaggctggtctcgaactcatgacctcaggtgatccacccgccttggcctcccaaagtgctgggattacaggggtaaacccggccttgaagtctctttaccctaaagttacagggcaaaaagggtccaaaaagttgttacaaggacgaacctcaagaaggccaagatcactcagccttctacaattccttctacaccatccaagttcatctgcgaaatatgagtctccgcccttccaggcctaactctgatcactggggatccccatcctccaaggtgggggccactgatgtcacacccaaggcaacacaactgtacagctaaacttttaagaaggaaatattttgaagattaacctgaagaggatattcaactaagatgcattcctaccacggactgataactgtgtgacatcaaacagatatattattataggaatactaaggaaaacccacaatatcctttggcgtgagcccaaactacacaaaattaaatgtgtaatgtgatggtgttaccagggtaccgtaaaattaatcgtccaagtgggaaaatcaaggaagacgaatgccagcccccacgtgcagggacacaggctggaagggagcgctcctcagccccgcacaggacggcagctgcccgggtggcggaggcggccaagccggtgcacggccacgacccccgccggccgagcgaggctggggtccccgcgcgagctgccccggctggggatcccggcgcccctcgtccgccctcggagctgctctcccgggagccgagacgcccggcgcggggaatggggagacgcgaccccgcgcccgtcccgctcagcaaaggagcagagaacgaggcggcccggtgggtcgggggcggcgaccccagggccgcaggccgggggctcagggcgcgcactaggggccgaggtacagagccccagccgccttccctcccgcactcccccgggcccgggcctcccgcgcccaccccgcggtcgcccctgccctcagcgcagtcaggccagcggcctcggcggacccgacgctctgcgcccggcgcgcgcccgcggcaggagcggggacggggacggggacggggacggacggggacgcggacgggggaggaggccgcggcaggggcgggcgcggtacctgcgggtcgatgtcgcccaccgcgtaatacttgacctccctgaacatctcctcaggaactttgggcgcctggtccgacatgatcgcggcggcccgggaggctccgcggcggcgcccggccccgcccaccccccgcccccggcccccgcggcgcccggcgcccccactcgccccgccaacggccctgcccgcgcagcccgggcccggtcctgcgaatcggggtccgctcccccgccctccgcgcccccgcccgcgcccgcgccgagcgcccgaagcgcgggagccgcgcgcgccctgcgggacgcaccatcccgccccggccaccgagggggagcgccgaggagccgcccggcctccagtgacgccccgcgcctctgccgccagccacggctccggggtagctggcgccggcagcccgctctggcccttgcggttccgtggccgccgctctgcaacgagggggccccgaggacgaggggaaaccagctcccccctcggcggggccggagtgagccggtcccggggaggaggggagctggcaggcccctcccgtcgccacatgcggctgctcgggggcggcgcatgcgcgcggcggaggggggggtggggccttggggccgcgagtgggagcgggagcggttctgcggcctcctcgggcttcttggccctgggcggagtgggattgggtgtcccggctgttcgcagtggccgcgagtgcggccggacctggagtagtacctgagccgctctggccgagcaaggcgcggggccccggtctacaccgcgctggacccggctatgccgtgacggaattcccgaggccgtagcgccacgcgagacgcgcactggtggcctccgcggcgagtcctggggtctccgcaaggcctcagtgcccgagctggggacgtgctggggggaggcccggccccgtcgctgcccgaggccccgctgtcccggccggaccggcctggtccctggcgtcctgtcgggtccgcgctggaggagagtcccagacagcagagcccgcggtgcagctccagccccgggaagccccgcgctcaacaggttaatactacacagcggcgattctaatggtcacgcttttatttacagctcgcctcccttccgccaagattcacagaacacggcagagtggcctcgggatcacctgcccaagacacctgcacgaccggaagttgggagaagaaattaaggccatgatgatgaacgcagcctttctcgtttatttccaatcccacaacaaaccggagtccaggaactcatgggtgattatcggactattacctagtcgtaaaactgtggagcattggtgtctaaaggaatctgagacagacccgcagtgtctcccccacatgccttaagtcacttctgccaagcagaaaatcatttttaagtaaatgttagtgaaattggttttaaaaaagagaaggggccgggcgcggtggctcacgcctgtaatcctatcctttaggaggccgaggtgggcggattgcctgagttcaggagttcgagaccagcctgggcgacacggtgaaaccccgtccctactaaaatacaaaaaattagccgggcgtggcggcacgcgcctgtagtcccagctactcaggaggctgaggcaggagaatggcttgaactcgggtgggggaggttgcaatgagccgagatcgcgccgctgcactccagcctgggcgacagagcgagactctgtctctgaaaaaaaacaaaacaaaacgagaaggctttcaaaattactctgcggtacactaatttaacagattagatcactttccaggctttaagttggcctttgttctaccctttttttagtgtatgataaaagttgtgttggttcgttgatcagcatgcaatgaactctggctcttgttaatcaggtgactacagttttgtccttacatttgtatgtatgtcatgagtggttttgtatgggcaggaggtaaacaacgcacatttaaatatacttaatgatttatcattccaatgttttctggttgttttagtctttcatttgtctcttgaacaatctgaaacatccctattctaaggctaaaaaatttcctttacaaacttaggttaaacattccta

SEQ ID NO: 586789 - DNA, 4001 bp, Homo sapiens
ccttgttattatcctgtgaaagtctactgaatgaacactaaattttttttcttgtcaagttttcatcaagtagaggaaaacagtacatatcataaactggataagagaacaagaaagactttttccaaatagccccatggattactagtttaaaaacacagaaaaacatatttaacataaaggggctagttttcactagtactagtagtttcaagataaacagactttttacctggtagattttaagcatttaagattttatgtgaaaatattgtcactatccataaaacattttacatttctcctataattatttggcaaaattatgcttacgtgatagtgactaagttaattttttttttattttataaagtggaggataaggatctacacctatatatccaggtctttcgtgcttacagtatctcaaatgaaaaattgtaggtttgccttcagttgtcataaaagaggaattgtttcagaaccacggacagaaaactgttctctactagagggtgcaaagttaaagggtttgtttacagtaagaaaggcaaggcaggcacaatgattatacccctctcagtactctaattagaaaacaactaatctattgggatgaaggaaaatggagagttacaggcggaaatgaaaacattcatattactgattagctcttatacttgcctatgcaagttgccatttatttgctttgtttttaaaagtatgtattgaaaattattttctaaggtaataaaattcacatgttcttccctaaactgaaggccacttttgcataaaacagagcagtggcttaaaaatagcatatgctaatttagaaatatatgtacagcacctgctctgctgtgaccaaaccatctgtttaatgccacacatattttagggttcctcaatgaatataaaaggtatattcattctattccttctacctaaacagcttctgctctcctctgggggtggggtggcaagagaggacaaatcacctacaaggggattaaagttacagaaatatttagacatcattcacagagaaaaagacccgcaatggccaagaggtttaaacagagacaggtaaacacccagctctatccatttcctaacacgtccgtgttgtattaatggaagacttccagattagtaaaacactggagggcgtctctccacgccatcctagaggggaagggctacaaaaggccaaaaatcacaacctaaaatcacagttccaagaatgtaacccttgactatcccaccagaaactctacaatgcatcatttttattccgcccatcacaaggcttaggatctctctatggccaccccactggggagaataaaatgaacggaggcgacatatatgtaccgccgtgctggcacatacaggctggcacatatgtgcacgggaagctgtacatatatgcccggacatatacatcatgctgtgcatgcctgtgcatggaaggcgactccgcagcggccggggggacgcttcccttgggcagcccctgcgcccttgacatgacagcggcgatctgtctcctctcctcttcgctcagctggctcaaatccgcctccatgccggccgggatcgcggtgtgagaggggctccccgccccgctagctcctcctccagccgctgcggccgccgccagcccttcggggagcccttccccttccaagctcgcctcgttgcccatggctcagggagactcggggccgccgcgctccctcctcgcgccgcgtcccagtcgagaagcccgcggccaggggagcagtcagagccggggtccgcctcggggcgtgcaggcagccgagtccctggactctggaccaggcactgccgcccggaacgccaggcaggggttagtcccgctcgcaggtaacgcccgctgccggtgcctcctccatgttggacagcgccaggcaacctttgcagaagacacctcccggacgccgcctcggcgccccgagccggggagaagcagatctgagcggtgccagccgggcgccgtccgcccctcccaccgcgcaccgcctcctcgcccgcgccctctcagtgcgcaggcgcctctcggaacaggtgatgcccgcggcccacgcccaccccatcctgcgtcgctccggatccttcctcgctctcagcaccgatttaaaggagcccagtgaacgcccggctaaaaacagggaagaaacaggcgacgtttctttcaggcatatttcaggatgcctcactggagttttagcttactagacacctagatttaaagggggcgggaggggcaggagaggaaatgtctgttttcagctttggctcctgggatttgtagtttcatttattttctttaaaagaaggttttaaaacattctaggaaagggttcaagtaactgaagattagcaagagagaccctgatacctttgaggcacatttcccaagggagctaagaatggcccttttcatttagaactttcacagaacaattaaattgttaattagattatttaaaatgatacaatattagtaagcagctaaggttttgagtgcttataactagttccctaaagggagggactacacaataataaaggattatgggaagttgtggacgtggggttctgcagtaatatcgagattgtaaaaatattaaaatgttttagtatgaaagtttgaaaacatgattttattcccccgccccttttttaacaaatgtggacagaagaaccccacgaagttcatttaatgtgtgactgttaagttacagtcacacaattggttagcagcacgttatcataataaccagtttttgagacccactttcgactatcactcctacacttttcttgctgttacatttcttagacgggactgttcagcactgaatctgcagcctcaatgttgttacctacgtttcctcagaatgtgaacttaatgtctcaactgttgaggttaggtaatagagactgaataaataaatcaaacagaaatgaataagttgctcagaaagtaagtccaggtttttgcaataatcattacatagttcgatcttctaccttccaaagtgaatttgtagttttacagtataaaagcacgaataattacaactgatttttttttaaatgacaaaaataatgcagtctcttatgagggaaccaaatgctaacatcttttgtaacaaatgccgaaaaaaaatgacatagtgtatattaatacccgtaactgcttttgtgtgtgatgtaatgagtaataaaactcaagctattctcatccttcgtatgtttaaaagtccatgcatttttgtgtatgtatgaatatatacgattgtataactatagacaatatggcttataatttttatataggtgcatatgaaggtctttaattaatattccttcctaacagaaggtgagagaggattgtgttcattgagtggagcaagaacctgcagtggcttaaggtccgacgcttcattttttgttaaggccgagttacttctgaattgctgctctcagccatttttgttagctctactttaaagtgggatttacagttagagtggaagaaattcaagtaaggttacaactgattataaactggcttctcaattttgagagaaaaatcacgagaagtattttagtgaaaagtttgataaatttaattttgaattcttaatatctgaaccatcaattttttcctttatacttagtccaaagtgtatctgtaatttaaataaaagaaaaactcgtatttagaatgtgttcctatagacatacaatgtataaaatattaagtaataaaattagttttgtcactttacaatatttgtaaattgaaaaatattaataagtcatgaagttataacttagatgatcagcattatttattcaaccattttataaatggagtttagaatttagaacccgctttttggagaaagggtacatgtgtgcatgtcttatacttcaggttttttctgttgacgatgtctggt

SEQ ID NO: 586790 - DNA, 4001 bp, Homo sapiens
ggggcctggagggggggaaggcggaggtgagggagttctcaccagtgcccgaggtggcccgcccgctgtaccagagcaggaagcctcgtcctcctgtgccctcatccgtcgtcatcctcagggtcacctggttgccgggggcgactaggggcgcaggccggaaggtcccacaaaagcgtccgagccgctggccggaagtcccagacccagcgaagacctccagagcatcgtagcggcaggcggggtgcagctccaggtcgaagactcggaatgagagggacacagtctggccctcggggacctgatagcggggacagaggcggggacccacagagtcaggccccacacaacccagccagagggcagctcccctgccccaagcgtttcttgcagaaacggactgaatgggaaggggcctccatgtgagtgcagagcagagggcctggtctctgcagctctgctggtagcctgtgcaggggacaagagctgaggctttggaagaggagggagggccggggactggagaatgaagatttgagggaagggttaagatgatgcgtgttacggtgggaatgatgccttcagtgacagagggaagacacttggagctgccccaggttgagaaggtggtgcgggggggacggggggggggtcccttcgcagtcaggcctttttgcctctgagactttaacaaggggtagtgcccagaggggtttctcaccgttatggtccagatgcactccttattaggggggtagaggttggggaacccctcacttgccacgtaacctgattcccccttcacatcccctccgcacaggaacacgggtctggagaacagaaaaggggtcaggaaagagcagggacgggtgggacgggggagcactggcaagatggggatgaggtgatgaggatgaaactccaaggagggaagctgggggatgaaatggaaaggccttgagagacctggggcagcttccaccagccaggacagggctggggtgtcccagactcccacaaagataagggaaaagtgggcctggcaactcgaccatccctccaaccccaagagtccccacccccaccccaacaggaattcccggaatcctcctcggccccccttccagactcccgcctcactctgcctggcagtccagggacaggagccgcctaactacttccagatgtggacacagccacgaggcggtgggggggagggggtggagagatggagggagctgcagtggcgatggccctctgattgaacctggaggccaggctccgcgagctccacaccttagccctgcccctgttccaaactacttcagattctgactcccaagtctccactcactgccccctcctccccctacaatccctctcgaattccttcctggaatccagctaccaggcaagttcaggagcttggctctctcttgggttctatggggggtcaaggatctgggtgggtggggagacttaagagaccagaggacgaaggtgggggaatgggagcagtggtggcctgcaggagaccaaggtcttgcagcagatggggaggatttgggggccagagaagggtgaggcggtggggaatctggggagtggtgtgtcagcaagggaacccaaaatatctccaggcataaccccaaaggaatcgggggtctgaagttcactggagctgtctggaagatgccaagagacctacctggtgtagttgggggtctggccctgggcaaaaggcagcagggcgcaggcagtgaggaggggccccaggagggaggctgtggctgcaggcagcatggccccgggggaaaggcgctggggtcctcaagacagaggcagcagctgaattttgcagagcagcagcagcggtggcggcagcagcaggataatcagcgccagatggggcagccttgggtgtgtgggcgtggggactggccagtggggcgggcaatggggaaggcgggacagtggcgtgtcctgggacctctctaggtctaggacacataaatgttgaccttaggagggggaggagcagtgaggggcagaggccgtctcccaggcctcaagtaacgtcatcgggaaccccactctgtccagtgagggagtatctccgggaacttctgaggactccctagcccccatcctccccccgcccctgcttcctcagctcaggagccctcattgctcaccccctgcctgaccacccctgccagctcattttccacttcaatttctttttttttttttttttttttttgagacagagtctcattctgtgacccaggctggagtgcagtggcgcgatctctgctcactgcaacctccgcctcccgggttcaagcaattcttgtgccttagcctcccgagtagctgggactgcaggtgcatgcctccacacctggctaatttttgtatttttagtagaggcagggtttcagcatgctgtccaggctggtctcaaattcctagcctcaggtgatccgcccacctcggactcccaaagtgctgggattataggcgtagccaccacacctggcctccacttcacatctccattgccttctctccagacctgggccagactaggccaaggagaaggaattctcacccatgacctcttccaactacttgaaggtacaggaagcaaggcaggaggcatggggtgtggatgaagggagtgtccttgttactcaggaagaggtggaaggagtagaaaatagagcccaaacctgggaggtaaacagaagggagagaggaggggggctggcttcaggccgaagggagatgggtgggaagctttcgggggtcaggaggaacaggctgcctcaggatggggacaagtctagtgggcaggggatcccagtggggtagccaagagcatctgtgcatagagttgttccagaaggtagggccagaacttcccagtccaaacgaccaggtgtgctcttgggagcagggagtggacaacaatgtgaagggttcaggcagcatcagctctgctgcacctgagacctggagctgcttgtgctgcctgcccctgcctgggctcctgccctcctgcacccaccaagccgggcacccacccaccccatccctgcccctgtccctcccagcccccaaggcttccacaccaggcctcgctgcagccttttattctatccatcaaatctcttgtccatgatagtcaggttgggggcccctcctgggcagccccctgaacattcttaccctggttagccgtccccaccccctagcaaccccttcccacacgcatgtgcacaatggtcattgctccttagtccctggcctggggccggactccctcctccagggactaggctagcatgagggggattaggtctcaggggctgggggccctacaccacccccgcctccttcagccctctgcagcatgtccagggcctcccagaagaagtccttctgtgcggccatcaggggcatccaccctacgatctccttcatcttctccgtgcggtcctgcaacgtttggcaactgtggatctggctgaggtactcctcgcaggcctgggccatccccccggggtcctggggtgctctggcccccaggctgggctcaggagtccccaccaccctgctggctggcaggtggcgatagggggcgtgctgctcaatgtcgtggctggacaggatgtataggcactccctggtggcacagagggcacaggcacacagagggaccttggaggaggagagaaagggggcatggctgagtggtgctttccttgcagggtttcccagggtgcccgggctaatctgcctattgcattcttccctctcacaccagccctgagccggctaagtcccaggggtgtgtgaggttgggcaaggccagcacagtctgctaagggagaaagcagagagcgtggtgtgcggcagaggagggaggtggggtggtgctagggaaatgggaccccctgggtccctgcaggagccccagctacagcctgtgggct

SEQ ID NO: 586791 - DNA, 4001 bp, Homo sapiens
tccacacaggaagctgaggcccacctgatttccatagtctgtctctgtgagcagagactctgtaatcagccagagttgctctgcactccagaggcggtagcagagatactggcctcctctgattccttacagcagctgcaaagccataattgggctgctaaagatcacaccacccatttttaatgactacctaggttcccaggggtgtctaagtctatgcttattaaagtcctattgtgagagagcaagtgtgccaagaaaaaaaccaacaccctttcttgctctcttaatacaccaggcaacagtaacaactcaaaattgattactataggctctcctctcatgcacttggctatgggaccctgaccttagcttggtccacagtaattttatagtagactcttcaagactttaaaaaacgatttgcacttaacataatggaaacaagcgttggtcctttgctcttagggagtttgatacttttaacaccttcacggttttttgtggttttcagattaacccaagaaaatgtaaaccttgtctaccccaaaaagcttttcacaagcccaaagaccatttagctatgaattcatatttaaggttttatcgttgtaacctccaacctttacccaaagtatccattaagtaaaacttcggagggaggatggctcattcagcaacctccttttacagatgaagggactggggaacaatagcagagagacttttccagccacagaataaatcagtagagagctaggtttaaacacatttagctctgtaatgcccaattatctctggagtcaggaagcgatttaggtttgaaaacgctacaggcagatgtttctgtgggttgagtgcattaaccaatataacacatgagctaccaacacaaatatatttgttctgtgccaggaggtggccaggcactttatgagcgctataattttaccaccccggccccaattcaacaagctaaggattagcccagtgtttcagatgaggaagaggttaacttgttcagggccacagaattagacgtgacatagctgggattcaaactggggactatcgattctaaagggggaaacaggatagagaacgggctagaagatagaggacgggctacaatggactgggcagtcatgaacctacttacaagatcaagagctggcaaagccttaaaaataagaatagttactgcttcactgggcacttttaacgactgcctggcactgtactgcgcactccacgtggattacctagttgaagcctcccaacagtactaagaggtaggtacaatcgttattcccattggcaaatgagaaaacggagacacaggaggtggagcgactggctcaaaggaacacaccgagccgctaccgaacgggggagtcgaaaccaggtctggaaggctcatgggcatctccttaagtcctcctaggcaggcctggctgaaccgaagccagaaaaagcccacgttttacgcgagaggcaggcgggcccggcacaagcgcgggacgcggtgactcagttcctagccagccaaagagtgggataaattccagaacccctagacccggagaagcgcatcctagatccggctttctaggccggcgaggacccagagcttccgaaactcctcagaccactgacggagtgactctgggacaccacagtcctcagtttccccatcgggacaattgggcgtcgaggcccaggcctggctctcagccggtgcggacagcctccctctgcgctgctctcagagacgcgcacgggctgaggggacagcggaagccggacctgggccgcccctccaggcctgcgggccaccggcgcccgcccctcacctcctttaggcattgcggctccggcggctgcggcggcggcggcggcgcctcgaactgacaccggaaccggaaatagcttgggctcgacttcttcctcctgggccagccgccgccgccgcttcagtggccgcagtggccgcaaggacccggacctcagggaggcctccgcacgaagtcggaccgtcctgcgcgccgcctaagtccaggcttgcccgtctgctgccaggcaacaacgcccctagtctctccgttcgggaagacgcgtggccctgcctgccacccaccggaagtgagggcaaatggcaacagcggctctggaattctatacaggcattgctgaggacacctaagatgacgcaatctccgcgcgggtagggcggggctccgcaaggacctcatgccttagagatcgcctgaagagcggaagccttctgtcgagaagcagctacccaagctccaggagcttccggtatgtgttttccctctgttctcgattaccttggcaacggctgaggcgggagaccggtggtctgcaccgtcctggagggagatatgagtggctggactctcagccagccactgggatgtgttcgggctttggaccttgaggccggagagagctcccgagaggaggcggcgccacgttcgttcttctgaggggacggtagatttgggggttttcctctaggattctcgcgccgtttcctctggtaggaacgtcttctgtgttctgattgtttttctaagctgggttcagatgctgtcctttttatgagttttccctacaatcctgcactatcttccttcgctcctcctcgcctccttcccctagcgccccaatctctcttacacctcccggcacatctttcttctcgatctgattacctcctacgtcctctttctcctcgatctggttaccgcctaccattttcacctccgagaggcctcttctgacttccaggctggatcagggccctcgaatttccctgggtcgtagaaaagcgatcattctcttgtcacagactatgcgccttggggccgagaccagaattcacctatttttagcttcagcgtaggggagactagtgcgaagaccactgatttgggagtcaggagccctccagagtcaggttttgcaaattctcagctgtgtgaccctgattctaccttatagagtttgattcctcctctatatggttgttttagagagttcatgagaggaggctctgtgggcggggggggggtgggtctttgtaaagtgtcagtacagaagggagtgactgaatgaatttgagagagatgaatctgttatgctgaaaggtaaatacttaacctgggttctctctggcagcaaggaaatgctgtgtggtttgaaaaacgctttgctatttagattgggatcggcctcttgtatgggaactacctgactttatgtaatatgttgtttggtgtgaaagagaccttggcaatcagccaatccactgccctcattttacagaagaaacaggaccagagagggaaggtgacctgaaagtcacagaataattttttagagctgaacaagaatccaagcctgcaactgcagagacgagagatctttctgctgtctatactcttggaaagcacatcctaaggtactttgattttacagtcatctttccctttttattttatgttttgttttgttttgtttgttattgagacatggtctcactccgtcacttaggctggagtgcagtagtgtgaacatggctaactgaagactttcaacctcctgggctcaagtgatcctcttgcctcagccttccgtgtagctcagaccacaggcacccaccaccatgctcagttaatttttttgatttttttttttttttggtagagatagggtttcacctcattgctcagactggtctcaaattcctgggctcaagtgatcctcccatctcagcctcccaaggtgctggccaagaccagaattacaggcatgagccaccgtgcctgaccttccatctttgcctttttaaatactcacccccatggctccccgagtcacagccctccttatactctattgtaattgctttttctcttgtctgtctctttgctaaaatgtcaccttctaaggggcaaaggcttaacttttgttct

SEQ ID NO: 586792 - DNA, 4001 bp, Homo sapiens
cagactttgtggacacaacaaactttctgtgtgcagcacaatacaatcggacgtaatgttcactaaatataacatgagattactgtaaacaccactccgagagctgctgcgttgcaggcatctaaactgtcaggaaagcctgccagccagagacaaggtttccaaataaatttacagtctccactagcggtggctagacaagtcaaaaatcaaattatttggcatggtttcccattgaaatcaatggcaatgaagctcacttggactatatatggaatggcttttataaattgcacctgtcaataaggaccccttaaagaaacacatactaccttaatgcttctccttagaaactttgaatatcaagctaacttagatcaacacattttttatttgtcttttgtttgtgtgtgtgctttcaaaaacaataacagcagcaaaacaaacaaactggcaggaagctggttttcccatcagtgcccttgttagaaacagaatgtctagagaatatgcttggagaaaagccatatttttaaaccacactagatatctgatgccaaatgactgatgaaagtagtatctagtagtaatggaaggtgtctttgggacctgcccagtgactgaggagcaagctgtgaatatacagctatccctcaagctcctgactggagtgaccagcagttcactgatgatgaaatatttttacagaaaataccatgtattttcaggtcacctctcctcagtacccaaaaacagacagaacccaatgaagtgaatgaaattcagagatctccatccatcagggcaactagaattctggccactctatttcattgttcaaatattgcaagaaaaccccaatatcgtttctgccccccctttctccacaagagcctttccttctagtaaacatttctccaccaaaaagaaccccaggaaatatcagaagttcgactgggctaaggagagggaaaaaagaaatgtagcagccagaatgcatgttgaattttaactgttggtaagttcttggaccacctgcccaagtgtatgcaagcagtttgcagagaaaaattcttccttcaattaaaagtccctgtctgggtctcaaacttttctccctgggcaaaaaggatcagaaacacctcattgagtattgggccaccataactgactcatcaaaggacatctctccttccccccaaaaaagcatgacttggaacagcaaggcattctaagacagaaagacaaccctctctgtgttggaagaaaagtagcagtgactgtaattaacagagcagcagttgtggaacttctagggttgtatttaaaggcccatgcaggaacagggtgagcagtcgtgactgcggctgtgtggtaaaataaggatgggagcgggaaatggggcaggagaagtaaataggtatacttacagcccgcggagccgaagccagattttctcgatctgttccggttgcaggtatttcagagagttgctctcaaattcttcaatctccttggttggcgactccatagctgcaggtaggtgaccactggcggtgaagctgagatagtttgggctgtcccctccccgtctcctcgcccagctcgcgatgcccagccaggcgcggcgcgcgtttgcccggcactttctcggcgcgctcccccttctgcgcccccagactccgacttagagcggactccgatcgcggcaaaccatggccccaggtgcgctccggaggcagctgcgggaaccagccatggtcccgggctaatgcccagggataagcacagggatagggatagagatagggattgggattggactccagctccaagagaaagcacctcgggtctattcgtattctccccctacccccaaacaaagccacagaagcgatcagcgcgcagctaaagggtttggaggtgaaaaggagggctgggtggggaggagagaaagtgagaagggagagaaaagcggcggctgagcaaagcgggagccggcgcgggcggtggggcctgacccggacgccgcgcacccggctccgccccgcgcccagcgccccgctcactccctggccgcgcctgccttcgcgcccctctgttttctctcacttaccagcagctctgctgacaagcgagaaaactgacaagtgagaaaagtcgtctgtcagcgcccgggctggtgtctgggctgtcaccgcgggcgcggagggaggggcgcgcgggcaccgccgtctgccgggcacacgctgggctccgaccccggccgggcacactcacccccgcagggcagccgcggccaccaccgacctgcggagctgcgtgggcttccggaaccctcacctcaacaagagctcggctccgcgcgcaagtaggagggaagggaaatccttatcctcccggggccagggcacgcagaagccgcgaggcttcgcggaggttgggcctggaggtcccccacagcctcactctcgcacccgccacagaaccggatccattttgaaatattgaagcgactgatggggacgaagggaaccacacaccacactcaaaaactcttgatgttttcttgctaaaggggctctctcgctcgcgctctctctcctccctcattccctccctccctccctttcacccccccacccccatctctctctcttgtgcggaagaaaaggagaaaatataccaatagtgaggaggtaagtttcttcagatcaatatcacacgctactcaagagggtccctcctgggtgctggctgggcggctgtggatggtgacaaagtttcagctccacaaagctgcaactcactgtcagggttcccctagttcatgaacaatgtcaataaggtagaatgctctggaagaacgggaccaggtatgaagttgggagtcagggagggaggacagatgaagagaggaaccaaagactgggggaatccatgcccaagatgattgcaagcgacatcacagaagggtccgtcaaacttccttctaggtgaagccaccaccaggggctatttcaaacctggctctcagggttcctgagattcagggtggggcatgccctatacagtatttttcctcaatgacaggtaatacttctttccatcacactctcagaattattttcctatctattagatgattacctgcttcccaaaagcatgataaacttagaagtgaggactagtttctcttcactgctcaagtaaagttccattcacctgaccttaacaaaggaataaaatggtctctaaatcataaatgctcacccacttcataattggcattcattttccagaacttagaggtgagagtgatgaggatgcttggctggccccatgcattctagcagagaaggtagtaactcaaggtaagacaaaagacctgtttgatgaaaaacgacttacctactcacctgccaggtaaatctgaagtcgccccattaaaggcagccttttaaggtttatggaggcgcatatattttcactgagttaaggtattattactaggcaatggtaacattaagcaatattttaacatggagttcatctatctgaataaaaccaattacccttccagtgtcacccagcagagaaacagtgccctggggaaatagaatgtcacaagaggaaatttttatagtgacgtgttttgagaatggaagacagcagcatggtccccaaatggggtatttccattagtgtgtgcaccttgggcagcctgctggcaccatgtggaagtacaataatgataataacagcaaacaagtgtcagaaactttccatagcccaagcattgttctaagtgttctactctcatgtaatactcgagactattctatgaggtagatactattattatcatccccattttacagtaagaaaactgaagcaccaggaggcttcctagaccaactagagagaaaactgaactagaaaagaccagagtttgagttatggctgattaccttatcctatacaaatacatccccctcaca

SEQ ID NO: 586793 - DNA, 4001 bp, Homo sapiens
ccaaaagtaggaatcagagtggctcctgcctctatcctgctgttctccaaaggctgacgtcccaaaaagcaggcctccagggctccacctgagacttgggttctactcacctccaaggaagatgtggaggcaatccctcacaagtagtttcaaaacagtcacagcatggggcggaaggtagaagtatcaagcacccacctcttcaaatgctaggcctccagagggtcaaccctgtggtcctgctgctccctgaaggtccccaaaaccccctctggtccccctcttggtgaagggttttgggggaaagaaaacaggagccactgggagtcccaagggcaggagagggaaacaccacctgcagctcagagacaccacagctttttctcaaatactttgggtagcatgacatatgatcccccctccctgcggcctctctctcagactgaattggcctctttttctgctttatttttctgaatctctctgttctcttctctctcttcatgtgtcccttttcctttgtttcaacttttatagaaactattgttcaatctctctctctctctctctctctctctctctctctctctctcctctctctctctctctctccctctctctctctctctctctctctctctctctctctctctctctctcccctctctctctgaattccccggtctctgtctctctcagcctctcctctcttgtttcagtcactgtctccacgtctttgtcactctattagtctgtcttgacgtccgcctctatctctggggcctaggtgtttctatcagtgtccccgtgtctggatgttcctgccgctctgtctgtgtgtctctatcatgtccacatcttcctgtcgctttctgtctccctctctcggcactatcttcatctctccatcgcagcgtctccagccctatttccacccctcctttcccccggcctgccttattaaaatcgcagccaggaaaccgagcagttcggggaggtgtgatgctgaaaaccagcttccgcgcgacgccgggtcggagcccgcgaggggtgccgggggggacagcccagggtgcggcttctgtcccgacccagtcgccgctcccgggggctcccgcccggagagcaccctccggccccagcccgacccctgagctccccctgcccgcttagaaaggaactctgaccgccaccggagagggcgtttgcccgagccaggagtccgagaggggtggaaagttctcacctatggtgaagctgtagccatcgatgctgaaagtggcgctccggcattttttgaagccctccttcctgttgccggcgtccgtcatggctcggccggccgggcaggggcctcgcagcgagaccagcggcgtctgcggtcccccccacggcggagtgagcagcccggggctcggcggcgaatcctcccccggccgcgccgcgctgtcactctcagccccgccgcgcgctggcagctgagcgcctggagacaacagcggggacccaatgtcaacagctaaagcgctaggagctcggcggaggcaggagccgtcgcgactgccccatctccaagccgagttccagaggcggcgagaggagtgtcaggaagggaggacgcgcgcccgagcgcgtggacggggctgaccggtgggcgcggagatccctgcctggccacgctactctctgtcagccgcggatcccgcgcgccacaggaaagtctgttttctacttcaccttctccttccgtctctggtggctggggggatttggggacccaagggaatggctgaattggcgtcgtgcgtcttctagatatgttttctctggcagaccggggagcttccagaaagcacatcaacagatggaaaggcaaacccctcagccatgagatgttgccgaagtttactccaaacaaggaagtcgggaaaatcgccacgcccacttccttctagccactgcccccagcactggcctggagccccgatagtgtttcttctccactgtccctgccaggaaggtaattgtcaaagtcaccggaggctctatgatgtgaaatgtacaatcgaattagaactcgccccttaccaaccattccaaatagcttgtcctgtcctttcgaatttgggtttgcccaatgtgatagactcctggaatttgctgatgtggaagatatcttaccaatcccatagctgacgctcttattacaggggaggaaactgaggctgcatggggcttgagaaaagtgctacacaaggaagtggcggactttggaggcagaagtttcactttatgacgatgccaagttagccattggcctttgcagtgcctgaaatgaccgagttaggcaaggcttacactgggaaaatttttcccaccgatcagcaagcaattattgaggatttacagttgcagtgctatcaggggctgcagatgcccacgggaaaagagaccagagctgagtcacacagaagagtccacggtataacaatgtggaatgagggttctgtgctcaagctattgtgagactacaattaatttagcctcatttttgtgatgaaatttgacacaattaacgaacacttgccaataataagaatcaaccaggtatattcttaattgattccagttcagtttagagggtaatggctccacatatcttcagaatctaatgaagattagaaaccttgtcccaaaaaaaacacacagacacacatgtacaatattctacatacaacttcagggggcccattaaaacccccaagcctactggaacccaggttaatgcatgtcccaggaatttaatctttttcaattcaccatgtatttttaaagaaatggaattgtgtcagagtgtatgtagttgacacttcagttataaattctctcaggaaagacctagaaccacattcacatggtctggttaggttggtagcgagattaattaatcacaaaggcaaccaacagtgtcatgaacctcatgccacatagaatggcatatttcagcatgcagtcaggggtgtttcaaaatcatcatgtagtccttgagactgtaatacccatgcctggaacctgttacaacctggaggcatgaaaatggctctgctcacagatagacctgggtctgaaagctggctccaccacttaccagctacatggccttgacctccctgagtcttactttcctcctctgacaataaggattaagtaggagtaagtgcataaaacctaggcacagtgtatgcttccagttattgcaatcactagctgactcccagatcttactatgtagactgcacggaaaattcttctctgtgacaaaaataacgtattttagttattgttgccaccattaattttataggtgaagagaatttttatatgtaacattttatatataatatattacatgtaatataatgtgggcttggttttttgtttgtttgtttttgagacagtgtttcactctgctgcccaggctggagtgcagtggtgcaatcatggctcactgtggcatcgacctcttgggctcaagtgatcttcccacttcagcctccaaagtagcagggtctatagatacacgccaccacacctggctgctttaaaaaaaaaattgtagaggcaaggtctcactatgttgccaaggcttgtctcgaactcccgagctcaagtcaccctctgcctccatctcccaaaatgttgggattacaggaatgagacacatgcctgaccttaatattatgtattttttaatatagtaaccaccaaaggtttcttatagttcccctttccctgtatttctcccatcttcccaagcttttaagtgaagcacatgtcttttttgtgccaaaataagtcctcagctgaggaacctgaaagccctgagtctcctgtagtaaattatcaaaaaaaagaaaaaagaaaaagtctattgcaatggaaatttttccttgcgtaagtgagtgaaattaaaacttggtatttaatcatcttaacagaaa

SEQ ID NO: 586794 - DNA, 4001 bp, Homo sapiens
tagtatctagtagtaatggaaggtgtctttgggacctgcccagtgactgaggagcaagctgtgaatatacagctatccctcaagctcctgactggagtgaccagcagttcactgatgatgaaatatttttacagaaaataccatgtattttcaggtcacctctcctcagtacccaaaaacagacagaacccaatgaagtgaatgaaattcagagatctccatccatcagggcaactagaattctggccactctatttcattgttcaaatattgcaagaaaaccccaatatcgtttctgccccccctttctccacaagagcctttccttctagtaaacatttctccaccaaaaagaaccccaggaaatatcagaagttcgactgggctaaggagagggaaaaaagaaatgtagcagccagaatgcatgttgaattttaactgttggtaagttcttggaccacctgcccaagtgtatgcaagcagtttgcagagaaaaattcttccttcaattaaaagtccctgtctgggtctcaaacttttctccctgggcaaaaaggatcagaaacacctcattgagtattgggccaccataactgactcatcaaaggacatctctccttccccccaaaaaagcatgacttggaacagcaaggcattctaagacagaaagacaaccctctctgtgttggaagaaaagtagcagtgactgtaattaacagagcagcagttgtggaacttctagggttgtatttaaaggcccatgcaggaacagggtgagcagtcgtgactgcggctgtgtggtaaaataaggatgggagcgggaaatggggcaggagaagtaaataggtatacttacagcccgcggagccgaagccagattttctcgatctgttccggttgcaggtatttcagagagttgctctcaaattcttcaatctccttggttggcgactccatagctgcaggtaggtgaccactggcggtgaagctgagatagtttgggctgtcccctccccgtctcctcgcccagctcgcgatgcccagccaggcgcggcgcgcgtttgcccggcactttctcggcgcgctcccccttctgcgcccccagactccgacttagagcggactccgatcgcggcaaaccatggccccaggtgcgctccggaggcagctgcgggaaccagccatggtcccgggctaatgcccagggataagcacagggatagggatagagatagggattgggattggactccagctccaagagaaagcacctcgggtctattcgtattctccccctacccccaaacaaagccacagaagcgatcagcgcgcagctaaagggtttggaggtgaaaaggagggctgggtggggaggagagaaagtgagaagggagagaaaagcggcggctgagcaaagcgggagccggcgcgggcggtggggcctgacccggacgccgcgcacccggctccgccccgcgcccagcgccccgctcactccctggccgcgcctgccttcgcgcccctctgttttctctcacttaccagcagctctgctgacaagcgagaaaactgacaagtgagaaaagtcgtctgtcagcgcccgggctggtgtctgggctgtcaccgcgggcgcggagggaggggcgcgcgggcaccgccgtctgccgggcacacgctgggctccgaccccggccgggcacactcacccccgcagggcagccgcggccaccaccgacctgcggagctgcgtgggcttccggaaccctcacctcaacaagagctcggctccgcgcgcaagtaggagggaagggaaatccttatcctcccggggccagggcacgcagaagccgcgaggcttcgcggaggttgggcctggaggtcccccacagcctcactctcgcacccgccacagaaccggatccattttgaaatattgaagcgactgatggggacgaagggaaccacacaccacactcaaaaactcttgatgttttcttgctaaaggggctctctcgctcgcgctctctctcctccctcattccctccctccctccctttcacccccccacccccatctctctctcttgtgcggaagaaaaggagaaaatataccaatagtgaggaggtaagtttcttcagatcaatatcacacgctactcaagagggtccctcctgggtgctggctgggcggctgtggatggtgacaaagtttcagctccacaaagctgcaactcactgtcagggttcccctagttcatgaacaatgtcaataaggtagaatgctctggaagaacgggaccaggtatgaagttgggagtcagggagggaggacagatgaagagaggaaccaaagactgggggaatccatgcccaagatgattgcaagcgacatcacagaagggtccgtcaaacttccttctaggtgaagccaccaccaggggctatttcaaacctggctctcagggttcctgagattcagggtggggcatgccctatacagtatttttcctcaatgacaggtaatacttctttccatcacactctcagaattattttcctatctattagatgattacctgcttcccaaaagcatgataaacttagaagtgaggactagtttctcttcactgctcaagtaaagttccattcacctgaccttaacaaaggaataaaatggtctctaaatcataaatgctcacccacttcataattggcattcattttccagaacttagaggtgagagtgatgaggatgcttggctggccccatgcattctagcagagaaggtagtaactcaaggtaagacaaaagacctgtttgatgaaaaacgacttacctactcacctgccaggtaaatctgaagtcgccccattaaaggcagccttttaaggtttatggaggcgcatatattttcactgagttaaggtattattactaggcaatggtaacattaagcaatattttaacatggagttcatctatctgaataaaaccaattacccttccagtgtcacccagcagagaaacagtgccctggggaaatagaatgtcacaagaggaaatttttatagtgacgtgttttgagaatggaagacagcagcatggtccccaaatggggtatttccattagtgtgtgcaccttgggcagcctgctggcaccatgtggaagtacaataatgataataacagcaaacaagtgtcagaaactttccatagcccaagcattgttctaagtgttctactctcatgtaatactcgagactattctatgaggtagatactattattatcatccccattttacagtaagaaaactgaagcaccaggaggcttcctagaccaactagagagaaaactgaactagaaaagaccagagtttgagttatggctgattaccttatcctatacaaatacatccccctcacagagtcccattttccacatctataaagtgatacatttaggcaaaaatatttttatgttgttttcagctttatgattcattgaggtcatctggagagacttggaaaaagaaattgctgaaaagagagacgaataatgctgaattcacattttaactatgtcatagtttctctaagtactggcctaggatgaaaatatacaaaggaatattaagcatgatacttacctttcactccataccacatctatgactttttcctactcttagtggaattttgattgtcagagaaaagcaaattttggaagaaaaaggaaagaaatcgacttttgctgcaattaagcaaatcagagagaaaagagcaaaaacattttttttaagtttttgaagctagattttgtttcatttgagaaaatttcttacaaaattaatgtgtattagaaagtcaggaaaaatataactttgctttatctacagccataatagtctttagagcaggaaggagcccaaaagacaacacagtttggaggttttcaaatttttgaagcaacagaatattttattttaaataatataagg

SEQ ID NO: 586795 - DNA, 4001 bp, Homo sapiens
aagtagtatctagtagtaatggaaggtgtctttgggacctgcccagtgactgaggagcaagctgtgaatatacagctatccctcaagctcctgactggagtgaccagcagttcactgatgatgaaatatttttacagaaaataccatgtattttcaggtcacctctcctcagtacccaaaaacagacagaacccaatgaagtgaatgaaattcagagatctccatccatcagggcaactagaattctggccactctatttcattgttcaaatattgcaagaaaaccccaatatcgtttctgccccccctttctccacaagagcctttccttctagtaaacatttctccaccaaaaagaaccccaggaaatatcagaagttcgactgggctaaggagagggaaaaaagaaatgtagcagccagaatgcatgttgaattttaactgttggtaagttcttggaccacctgcccaagtgtatgcaagcagtttgcagagaaaaattcttccttcaattaaaagtccctgtctgggtctcaaacttttctccctgggcaaaaaggatcagaaacacctcattgagtattgggccaccataactgactcatcaaaggacatctctccttccccccaaaaaagcatgacttggaacagcaaggcattctaagacagaaagacaaccctctctgtgttggaagaaaagtagcagtgactgtaattaacagagcagcagttgtggaacttctagggttgtatttaaaggcccatgcaggaacagggtgagcagtcgtgactgcggctgtgtggtaaaataaggatgggagcgggaaatggggcaggagaagtaaataggtatacttacagcccgcggagccgaagccagattttctcgatctgttccggttgcaggtatttcagagagttgctctcaaattcttcaatctccttggttggcgactccatagctgcaggtaggtgaccactggcggtgaagctgagatagtttgggctgtcccctccccgtctcctcgcccagctcgcgatgcccagccaggcgcggcgcgcgtttgcccggcactttctcggcgcgctcccccttctgcgcccccagactccgacttagagcggactccgatcgcggcaaaccatggccccaggtgcgctccggaggcagctgcgggaaccagccatggtcccgggctaatgcccagggataagcacagggatagggatagagatagggattgggattggactccagctccaagagaaagcacctcgggtctattcgtattctccccctacccccaaacaaagccacagaagcgatcagcgcgcagctaaagggtttggaggtgaaaaggagggctgggtggggaggagagaaagtgagaagggagagaaaagcggcggctgagcaaagcgggagccggcgcgggcggtggggcctgacccggacgccgcgcacccggctccgccccgcgcccagcgccccgctcactccctggccgcgcctgccttcgcgcccctctgttttctctcacttaccagcagctctgctgacaagcgagaaaactgacaagtgagaaaagtcgtctgtcagcgcccgggctggtgtctgggctgtcaccgcgggcgcggagggaggggcgcgcgggcaccgccgtctgccgggcacacgctgggctccgaccccggccgggcacactcacccccgcagggcagccgcggccaccaccgacctgcggagctgcgtgggcttccggaaccctcacctcaacaagagctcggctccgcgcgcaagtaggagggaagggaaatccttatcctcccggggccagggcacgcagaagccgcgaggcttcgcggaggttgggcctggaggtcccccacagcctcactctcgcacccgccacagaaccggatccattttgaaatattgaagcgactgatggggacgaagggaaccacacaccacactcaaaaactcttgatgttttcttgctaaaggggctctctcgctcgcgctctctctcctccctcattccctccctccctccctttcacccccccacccccatctctctctcttgtgcggaagaaaaggagaaaatataccaatagtgaggaggtaagtttcttcagatcaatatcacacgctactcaagagggtccctcctgggtgctggctgggcggctgtggatggtgacaaagtttcagctccacaaagctgcaactcactgtcagggttcccctagttcatgaacaatgtcaataaggtagaatgctctggaagaacgggaccaggtatgaagttgggagtcagggagggaggacagatgaagagaggaaccaaagactgggggaatccatgcccaagatgattgcaagcgacatcacagaagggtccgtcaaacttccttctaggtgaagccaccaccaggggctatttcaaacctggctctcagggttcctgagattcagggtggggcatgccctatacagtatttttcctcaatgacaggtaatacttctttccatcacactctcagaattattttcctatctattagatgattacctgcttcccaaaagcatgataaacttagaagtgaggactagtttctcttcactgctcaagtaaagttccattcacctgaccttaacaaaggaataaaatggtctctaaatcataaatgctcacccacttcataattggcattcattttccagaacttagaggtgagagtgatgaggatgcttggctggccccatgcattctagcagagaaggtagtaactcaaggtaagacaaaagacctgtttgatgaaaaacgacttacctactcacctgccaggtaaatctgaagtcgccccattaaaggcagccttttaaggtttatggaggcgcatatattttcactgagttaaggtattattactaggcaatggtaacattaagcaatattttaacatggagttcatctatctgaataaaaccaattacccttccagtgtcacccagcagagaaacagtgccctggggaaatagaatgtcacaagaggaaatttttatagtgacgtgttttgagaatggaagacagcagcatggtccccaaatggggtatttccattagtgtgtgcaccttgggcagcctgctggcaccatgtggaagtacaataatgataataacagcaaacaagtgtcagaaactttccatagcccaagcattgttctaagtgttctactctcatgtaatactcgagactattctatgaggtagatactattattatcatccccattttacagtaagaaaactgaagcaccaggaggcttcctagaccaactagagagaaaactgaactagaaaagaccagagtttgagttatggctgattaccttatcctatacaaatacatccccctcacagagtcccattttccacatctataaagtgatacatttaggcaaaaatatttttatgttgttttcagctttatgattcattgaggtcatctggagagacttggaaaaagaaattgctgaaaagagagacgaataatgctgaattcacattttaactatgtcatagtttctctaagtactggcctaggatgaaaatatacaaaggaatattaagcatgatacttacctttcactccataccacatctatgactttttcctactcttagtggaattttgattgtcagagaaaagcaaattttggaagaaaaaggaaagaaatcgacttttgctgcaattaagcaaatcagagagaaaagagcaaaaacattttttttaagtttttgaagctagattttgtttcatttgagaaaatttcttacaaaattaatgtgtattagaaagtcaggaaaaatataactttgctttatctacagccataatagtctttagagcaggaaggagcccaaaagacaacacagtttggaggttttcaaatttttgaagcaacagaatattttattttaaataatata

SEQ ID NO: 586796 - DNA, 4001 bp, Homo sapiens
agtgagatcaacatctagaaagatcaagttaaaatgcgtcacgggtcggcgagagtcacggcagccctaacactttaatccaggcagggcttaaatttcacgccccggaatcccgggccgaacccgtggagaggtctctccgtctcacaaacacacgcacgcgcgcgcagacacacacacgcgcacacacatctcactcacacactcgccccaccccgggctccggcccagccgcggccctagcgccgactaagacgcccaaatccagccggcggccgggagaagaagcctccagggaaagcgagggttaaacttccacctcgcgcagctctccgtgccctgcggagaccaccctcacctctggcctcccccactcccctccccgatttttaaggagagtcgggggtcgctggggagcctgaagcactaagttcccacgacgggggctgtggaaagtcattcatcacagcaaagctcccggggatggggatggggatggggatgggggggcggggacgccgcggtgggagggtgcggacgcctggcccagccccagctcgcctcgctcagccacctgtaagcaggcccgggcgggcgggactgcgccggccctgagccccgccgggcttggggactgggaaccgagggctgcagcttggcgctgcccaccctgcccggccaggggcttccgcagcagccgcccctacctatttatccgccgcccttctctcctccccaggctccgccggctcacacacacccccttccccgctccccgcaccccgctgctgcagcgcccgctgcgccccagctccccttccccggagaggacactgcgccccccgaagtttctgcccactcgtccacctcgctgctccccggtccccccgaggcagagcgaccgacgcaacacgctggaaactccccacacacacttaggcatggcagaaaatagaacccagttgggaaaatctaaacatcgaccaccctggcaggaaccaaaacgctctctgcagagcccgtggcgccccagccggcggggggtgtgcgccggaggagccggcgcagggacggggcgcgggggcggcaccaacctcggccagaacatgggcgaggtatccgcagccgaggagcagcaggcaagccaaggtcctcatcgcgtcccgaggcgctggctgctcggaggagaggcgaggccgcggggcgggcgctccagccggtctcctgtggcggcgaaattcagtaccatcccttagggagcgcggcccggaggagggtggcgcggggagcacggagctggcggagcgcgcccggcgcgagcagtgagtgcggagaggcaggcagcgccagccaggaggaggagaaacagggagtgcgcgcccgcagcgcggggagcctcctgggccgccgggtagggggtggggacggaaggggcggagggcgggggctgggcttcttcctcggtgcgttcccggtgctggccgccgccgcgctcgctccccgcgctggcttcaggagcgacccggccggtaattctgcatatttgcggacatcagccccaagaagaactccggagggagtctggggccgccgccgccgccgccgccacaccgatcacctgcctggacgcctggcccggccccggctgcgagctgcgagccgccctgcgcgcccaccgccggccccgcgctcgcctccggcctcctcttgcagccgccgcccggccgggcacagcgcggcccagcaccccctccgcggcgcgccctcggctccggcgccgcgctccgccctccgctcgccggggccgggcagcgcccgcggccgagccgcctggcagccaccacccgccgcccggggcctcgctgcgccgcccgcgcgggcctgagggcgggcgcaaggccgagtcggcgcctccgccgcagccgccgccgggagaggaggaggaggagtaggcgcaggcccggctcgccggagttgggcgggctccgcagggcgcgcgtgtggagccggccggcggcggggagagggttatagcgccgccgccgcgcccctcccccgcccccgcccccgccccccccccccgcctcccccggattccgggcctgggacccgcacctcggaagcgctcggggttcgtgcggacccggcagggcccgggcgccgccgccgcggcagggagcacacacgcgctcgcgcaagcagctaaatccatcaaagccccgcgcccggctccgcgccggggctccgcgcccctccctcgagcttgcccaccctccagtgccagctgcaatcctgcggcaccgggtggggagggaggaggccgccgcagaagcgccgccgtcgccggctcgcctctctcgggccccagcggcggcagcgggcagcgcccagagctgctgcgccaaaaagggccagagagccggtccccgcccccgccccggcgctccggccgctctccacggttcggatccagggccccagccttcctctctccataaaaggagggggagtcagtctttggggaaggaggggggcgggtttggggcactcacctggcggctgccacgcgcccccgcccaggatccgaggcctggggcatctgaatgaggaccctccacccacatttccacttgggagcgagctccagtcggggaaagggcctgcagcccgcctcgtccccaccctgggaccccgcgccccccagtcccccactcccgcgccgaaggcagggccgcgccctgagccgggaagtcgaggggatggaagggaaaggagccaccggtgagggtcccccgggttctgagcctcccgcgtcgggatccgtggggcgcacagagcgccacctccggccgaggcgcagctcagagcgcgatgcgggggaggaacgcgcgcggaggccgaggtctgagcgtggctagacggctcccacgccgagaaagggcgggtgcgcctgggctggatggatttcgcctccctagaccaggagggattggaccctgactacaggtccaggtgctcgtcagtgccctgccagggggtctacgcgtcctggtaccgggtccagcggggtggcgtgctgtgcagaccccgaggctagacggcctaggcccctggagcccaggagacgcttccttgggtgagcagcggagaatcccgcccggcccagccgtcacccccaaccctgtcgattaaacccctgcccccgtcgcggtcgccctccctccagacaaaggccgttaaggcgcagccccgcgggcggtctttcatccccagctaggccagctctagcatttcaaaggccgaatccggagagcgcttcgggggctctccccttcccccaaatatttggggagcgacgcctctccctccgctcccagtgggtcgcgtctacacgcgcccttccacacacctgcaggccccctccccacgtctctcccttccgttggccgcagccccacaccacgacccccgcggtcaagcatgccctctgggtggtcaggaccaagcgggaccgggacagaaccaggggagccttggaaacgtggaggagccccttaaagccaggccttgtccctccagggggaacttgcggcttgggaggggacacccactgcatggcttctggaaagagccggactcgcagggccaggacgcaggccggaccccggcctcattcttcggccagttatcccggagtggcgcgcatcctgtcttcctgggcctcggactgctcgcgcgcagagggggcccgaggacacctctgtggggttagaggactcggtaagacggtgtggaaggcaaggaggaaggtcgcgttgtattggggatggggtacccgtccctcccagcttgagggatcctgggggtcctcgccgcctctgagggcctagatggctgcttccctcggctcccctgcccggcctggagctacgggtgcgcccagctagagtttagggccacctggggacgtgcaaggggcgctggagcgaggcgggggctgg

SEQ ID NO: 586797 - DNA, 4001 bp, Homo sapiens
cgggaggctgaggcaggaggatcccatgagcccaggagtttgaggcttaagtaagccatgatcaggacagtgcactcaagcctgggcaacaatgcgtaaccttatctaggaaaaaaaaaaaaaaaaacggagctagaagtcccaggaggcctgcccttggccatgatgacccctgggattcctaggctcaccctaggagcaactgcttcccagggactcttctgtgttaaagacctctgaccggaaggataaacttgctggtcctaacagctcctaaagccactctcccaggcctctcaagaatccccccaaaaacagaatcactggatcaaaaccaagacagtgctatatgcttttccgctatgttccaaaaagcatcttccacccacactggtcctcaactttcactgtgcctcccgaagttaattctatgtctcaagggaaaactgacttaaaacgcagattccggggcccacccctgcattctgcttcagtgtattttgggtatctgtatttaaataaacactatttaaacaaacatgatttgggtaaaggtctcaagacacaatttgtaagcagtcccgctatcggattcctttcggcaggtgtttttctcgccgagtgtgggtttttacttccttttctatttgggcaaagactctttttgaatcagtgacccacgcagaagttactcaatctgtttgaaagagtataaagttcacgatttccctacacactaacattatcaaagagtgtatatttatattagaacaaactcagaaggttaaaaagctagtgattaaaagtaagggcagagaggaagaaggtaaagaccagtacctggatgccttattctctaggaataacaacttttccttaattagcacttcctaatcttcagagttcttatgtctgcagctagctcacttcgaagaaaaatgcagggaccatgaagtagttgttactattcctactggagtacgcgcttcatgggcagggaccacactcacaatcttttcctcccagaacccagtacagggactggcacacagtaaatgctaaatgcagaaggaatggtatctctagtttctcaaaggtgcaaaccaagccatccctttctccagaatctatggattaatcatttccaaatctacagaccacattttgaaaaggaatgcttgctgttccaaagaactcgcacttgtttcttcacgccctcgccccttctctccagtggctctccctctcccttcccactgcctgggcgcgttcgcctggagttagcctggacctgacgaaaatctgtaaattaaggcgaaggacccagctgcaaaaaaggcgctctgcagccctctcccagcctcgggtgacaggggtcttccagggcgtcggagcccaagagaccccggccaccttcctctcccgggaaccccaaatcgatcctgccactgccacagccaccgcccccgccccttcaactccgccaagtttaccccgggctcggcgcccatcactagttctggagctgaccgcgcggaagcccgcccgccggggtcgcagggcccaggcccccgcacagctctgcagcccccgcaagcacagcccgacccgcggcgcgcttgccgctcaccctcgtccgggccctcggcacccgccacggccagcagctgcaccagccccaagagcagcaggagcaggaaggctttccggggcctcatggtagcgggggcggagcgcggcctcctagcgtcggcggccgctgagcgcaccgagaactcggggtctggccgacagcccgtcgctccttagcgacgcgggggagccggaaaaacccacggaagtcgtccccggcgattggcagggggcggaggaagtcgcgggccggccaatcccagactgacgccggcacggaccgcgcgcgcctcggccgcgacgagtcggctccgccgccctaggccctccctactcctgcgcgcggccctcggctgcgcgtttaaaactccgagccctaacgtgaggtgcccccttctgattggctgcgccacaaccaccaatcagcggctgccactcggtttgccgggagcgcacaggccaagagggagagcgggggagaacaaaggcggcgggccgggcacggggagtgcgggacctggctacgcctcggggcgctattggcaatcggtgccgggggcggggcaggagaggcggagcctgggaaatgtggagcggggcggggctcggctcagcatcctgcggccgaacttggcagtaagaacacgtgtcggtaccggagcggtggggagcagtggcgagcagggcggtcctcgcaacccgccggggctctgggaagctggagaccaacgcgggcggaggagcacgagcctgtttgttgctagaaaggggctccaagtccgctgcatgttcgtggccttcttaatttctttttctgctcgagcaaataaaagtttcatttctctccggagtattgagctagagagcggggaagagcatgcagtaaagtgaatccagactagaatctggggaagcctctctccaaggttgcatctcggagaaacaagccatcagattcttgtctaaactttgcctcgtcttatttagttttctagtgattttctgcaaaaggaaataccagataggcaatctagtggtttacatagatctgaataaaagcttgaggttttccctcttgaccactttggagaagaaaactaggttaagatgacgatttttgtatgtcagaaaagaagcctgtaatgtgcattaagtttgagacttttttttaacacctgggagtttgagaaggcaaatagggaaaagaaaaaaaatagaaactcaagttcaggaatattttctcgtgtgtgcagattattacgtgaggaagaaaaaagggataactcacagaccttagcaattaaaaatacttaatttttttgttgaatgcctattaatctgatggttcctggtcaattttgtagggcagaacattatgcaactgtacacactgatttattagagtgctatgaatgtgggccaccagacagttcggtatcatgttattttattttttgagacaagagtcttgctctgtcacccaagctggaatgcagtggcgccatctcctctcactgcaacctccgcctcctgggttcaagtgattctactgtctcagcctcccgggtaggtgggaccacaggcgcccgccaccactccctgctaatttttatatttttagtagagacagggtttcaccacgttggcctggctggtctcaaactcctgaccgacctcaagtgatccacccacctcggcctcccaaagtgctgggattacaggtgtgagccaccgtgcccagccttaatatcatgttaaagatagacctgttcttcaaaaagacaagtcagagttctcatctttcttcttgtttcctatgacactgttaaactgagaggaatgaggaccccatttgctcagtggtgggagaaacacaatttcactggccttttgttgatacaaagataggaagaaggctcttgaagtgctgtctgtatatgtgtataaacacacatatatcttgtgacattaaagtaacaatgttctttttgaaagcatttagggtatagctatagaagttcattcaacaaaacagaactttatcaagttggaaagctcctttctctttatccctaaatttttcactcaattttgttatgggtacaaacagcactgtgttgagggtcagaatggagagagatgagaaatgatacttccatgactatatccaagatctccacagttggttgttgtaagcgtagagaggctgtctgtcaaatcatagatatgaggccgggcacagtggctcactcctgtaatcccagcactttgggagactgaggcaggcggatcatgagaggtggggagttccagatcagcctggccaacgtggtgaaatcctgtctctactaaaaatacaaaattagctg

SEQ ID NO: 586798 - DNA, 4001 bp, Homo sapiens
tctgtcaatcactttgtaagttacaaagattaggccttccctaaatagcagtcatgtgaattggtttctaggcataggatttcttttgcaatatcaaactcttttattattgaaagtgctcttctataattgaaaattaaaattgcatgccaatttttttcaaatttttcctagaactcaaaattttattataaagtaatctactttttcagggtaaaaatgtctgtttatagttttataacttctctaatgataacttaccctaaattaattttaaaattcttacatctttcaaaagtagttaccattcagatcacctgttttccaattatgatgttaacatagtataagaattcatacccgggtaactgtttcaaaactagagacttcaatatggttcaccacttaccagcttttaaccaattgcactgaagaggtatttactaattgggtcgggaggatatcaatttccttcagaatgttggcgagtctcacaggcaattcttgtcgcaaaaatgcaaaagaagttctttcacatgcattttctgaacctataataaatgaaatcaatttagttttgagaaaaagtgtgtctaaatgatatatctaaatagcattaactatcaaatattgaacacacatatattataaaattatatttcactctcagttgggttactgttaatcgataattcaggggcgattgtctccttaattgactaattcccttcgtcctttcgtctttccttctttcttttaaaaagtgacagatataggagaattattgtcttctctttttgaagaggattcacttccaagaagtaagaatatcccacagttcttagaatttataaaagactgcaggattcggtcacaccacaatgtcaacaacacaacatcctttaatgagtggggacatggaattggagttgggggataagaggctggagggggagctgtgatatttccagagtagtgatatcacatttaaacccttgaaatcttccttataagattactgcaacaaatgtgtaaatattttcagcaacaatgcaaatatatggaaaactataatgataaagagacaaagaaatctgtcaggaatgcagagagatgtaccctgtggaaggatgccaggtggctaaggaataaaatctgttaatttgaggctatttaatactattcagaaacttctccaagcagtactatgctgtgaaggagaggataaagtttccagtccattgttaaacggtgaccgaaagcaaaaagtattttgactggaagagcgggtcagaaagaagagtgtgcagatgaagtcaaaccatccagcgtcggcaggcttgcaggtggccttgacctggaggcacccctgtcagaaagtaaccaaatctaggaaaaggaaaggtgtgctggcgtcgaggctccagggctcagcagcaaagtgaaccccagttgttttagcttgagcctagccctccctctaccaaggctgaaagttaaggcagttccccaaccctaggacccagcttgggccctgtgtcccctctcaccaaagtccagtagctgcttcatggacagcggggacgggctgtagcgcgagaaatgctccacctctcggggcaccaggccggcgccgttgagcgagccagcgctgcgcagcacgaagcgggccgccttcatcttgacgcccacccggcctggcggggactgtggctggcttgaggggcgaaggctgctcggagcagagcctggttccgagggggcgcggcgcgtccgggcgaggactgcaggtgcgctggctggcttgtgcgccccggcctgggctggggtttgagggtgccgcggagtgaagagtctgggcagagtcggagatgcagtggttcgagattcaagttcaagtcttcccaccagccgccgccgcccgaggttttatttgtctccccgcactctccccccgagtcccaaacaggaggagtcactggaacttggaaacgcgtcctgaactccaggtcgcgccaatcagatcagagaaagaactatgggctccgcccctccagccgcggtcatcacagaatggcctggcacggtgaccacggagtgccctggcaccggtgcccgcggctgtgacggaaaaagggtgggaagaacagggaagaggaagcagaaacaggtatctggggcaacgtgggcttaagattagcctcttgggacggggctccgagtcgcgtgggctggggtcccgcccaggctcgcccttgtttacaactcggaggctgtctcaatgtcaagtactcctggccacaaactgtttccaagagtttggactccgcgtgctcattggtccttgctcagagcagggcttttacagtagccaacaagctgcgttcaaaagtatgggcttctctgccactggacagagagaaaggaataaacaacctaaagacctgcgcccccacccccaccgcccccttttcttcagaagagaccggcacatggcaggaactgtacgttccttttgctgagacttgaggggctgcccagatacatttactttttcctgtggtaataaaaggccatcaattcgttcttctccggcaacacattctttccgttaggtttagttctgttaattaaaaacaaaattaaaaagggatcaatttgtcagtttgccttaccttttgcggtgatcagagaatttgttcactctgccctgtacgaaatgtccttactccaaatctttacctaagacattccattctaccctcaaatgtctggcacaagctgtctgctgcaaaaggtcttccttgattacttctcctcacttcttccaaataaggccttggtctttcatggtactattctatagctatttatgtttttatattatccctctctgactcccccctttcctgaaagagatcagggtagggaccctgtctgatgcagctttgtgattcctactttttcactactcaatatttattaaattaatgacagtggttgagacacattaccctgtcatactaacctccttttcctctcccgacactctaaaaggactagggaatgaagccaccgtgtttgggaaagttgggagtaagagagttggttacaaatgtaatagaatgggaatttatgaggtgttaaaaatgatagtttgttataaaaaacctttttggcctcctccccctgcgtttattttattttaattaattaattaattactttatttattgagacagagtcacactgtctcccaggctggagtgcagtggtgccatctcggctcactgcaacctcggcctcccaggttcaagcgattctgctgcctcagtcttctgagtagctgggatcacaggcacacgccaccacactcagctaattttttctatttttggtgaagatggggtttctccatgttggccaggctggtctcaaactcctgacctcaagtgatccacccacctcggtctcccatagtgctgggattacaggagtgagccattgcgcccagcctgccctgcatttataagcagaacgggcaactctgaaagtcatgagtgatcctaggctctgctgtcatcctttgccctcttcgtctaggagactgcattaaatcacaggacagatttccaattctatctctagcacaaactttcttccaagagccagattctcctattcaattgcctatttggtttctccatttggatgtctaataggtatcaattttgcttctctaaaatcaacaccattatgagggatctgaaacagtcctggcaaaccctgtgtcagttatgtggcctgtttggaggcaccatattagctctcctactatttctcccattgtctatacattacctatagatggtcgagaatttgagacttcctgttatgaccaaatatttttttcagacctttgagaaacagctatgtgaagacatgcaatatttatgatcttccaatgaagaggatggggcctgggttcttagagaatattc

SEQ ID NO: 586799 - DNA, 4001 bp, Homo sapiens
gggcctgggcagttcacctcagaggaggcgggcccaggagaggtggggtctgggcagttcacctcagaggaggcgggcccaggagaggcggggcctgggcagttcacctcagaggaggcgggcccaggagaggtggggcctgggcagttcacctcagagggggcggccccgggagaggcggggcctggacagttcacctcagagtaggtgggcccgggagaggcagggcctgggcagctcaccacagaaaaggcgggcctggaagaggcggggcctgagcagctcacctcagaatgaggtggccagagagaggtggggcctgggcaggcaggcgctaaggagctgggaggaggggcctgaggaggccgcatctagaaggcgcgctctgggaaggcgcgctgcaggggaggcgcgctctgaggaggcgctgtaggaggaggcgctaagcaccgcagagaaggcacactaggatgggcggggcaggcctgagactggctgctacagggctgcagagtatctgcacaccccccccccccgccgccagaatcccccctcccaaacccctcccaccagtcaccaaagccagattcatttcatgcagcaagagcaatccacagatccaattcccccgccatactcagcaaacccacagtttccacaaactgttgctggacgctgattcgcgccaccacaactacaccgccacttcaatcaagcacaagtaggcaggcagcctgctctgccatcaccaaaagattcccatttccactccaatcagtgcccctccactccactgctatagcgggaatggtgtgggcagaatgttaaacactaatttttgcccggggctccattttgtctaccagcaccatcatgcgagaaccgtcctgcagaaaaatagagtgggagccattccaaaaggtgaaagggtggggtcctgctccaagaaaacagaggaattgtactccgcagctcatgtcccactacggctgctttatttgtagcgcaaacggtctgcagctcctgtacctctgcagctcttaccactttgtagtgcatcttaggtgtgaattgttccgcagctcatgtacctctgcagttcatgtgcctcgcagcgcaatgaagcgctgttgtcgggctggctaatcgcatcgtttttgtagcgttttttgtagtgctactcttctgcagctcagattttgcagcgcatgtaaagcgcaattcagttttctgtctgcagctcctatatcgctgctcctcgttctggattgtagcgccactgaagcgcccatccgtcagtttgtggcacataaagcgcccatcagtttatagcgcaatgaagcgccagttgtagctcccatcagtttgtcgcccgcgtgaagcgtgcttgtagcgcatctgaagcgccagtttgtagcgcatttgaagcgcttatctgtttgtaaagcatggcacttggtagcgcatttgaagagcaaattgcaaatcgatctatagctcctgaccgtctgcagctcatcactgtccgcagctcatctctgtctacagcccgtatctggacttggtcctggaaacccaagcctttaaggcttggtttccccatttgttttggggtacagccagtgaaggcgtgacaagttttgcgtggagacattctggggtgctactccatctcccgcagctcccgataagcacggggaatgaacgtgatctttaaaaaaaaaacgtcctcaccgcatactcaccacgcgaggactcctctgcgaagacaggaaggatggggtcccacacctgagccaggcgcggtctccactgggtgctccgcagcccggagtggctccggacgacagcccgctcagcggacctttcgccaggctcggtggaccttctccgctgttctcctcagggcgcagtcaggtttcttcgacacacaccaaccgaagttgaagcgcgtgtaccaggagcgcagactgtgagccttatataggttgcaccgaggaggggggcgccaaatcccagcgtgctccgcgggctagggggtggaggggggtgcggggatgggggatgggggtgggggcggtggccacgctgcagtggcccgccgctagagggagtacgggattaccgagggggtgcgggatgctgatgctgaactggccaagctgggagggaagaagaaagggaggggaggggagaatcgaggacggacggcctagccaggccaagaatgcaattgccccggtggtgggagctgggagacccctgtgcttggacgggacagggtcgggggacacgcaggatgagccccgcgaccactggcacattcttgctgacaggttagtggcctgcgcgcgacgtggaggtcccggggccaacaggccgccgcctccccctcccccgctcgggttccgggcgcctgagcgcgccctttgggcaccagcctctctttctgtcccggaccccaccgtacccctccttcagtacaccctgtaccccatttccccggcccagcttctctctccccaggcttgacccctggcctttttttcctctccgcgcccccgcgggcccctccctgctctgcgggcgcagaaattccatctccaattcctgttcccaacatccccctccccgcccagccccagggtagtcctctcccgatccctgtagcaaagagctgggggtcgttgcctgtttttctggggggcccgtttccccgcgattgggctctgcgaccgcgatgcgagccaaaggaaatgggtgtcaagctgcgtccccgctacacaaacacatcttttttccttttcttgatagtggtagagaacacaaaaatgtgacatttaaaacaccgaatttccccctcttgctaagtgcatttctcggtgacggaaatctcggttttcttcggttttacggagcagggaagcggaatcatgaaatgctgggagctaaacagggcgttcaggtcagggttaaccccggctggaggccagagatgctgccgtaccgagtgcgctatttccagaaaccaaaaccaatttaaaacagctgtggatgcttccagtgtgtttggcgggctttgaaggctcccagctaccgacttttggtggcgattacgaggtttacacagagaccttgcttcccttgcaacgttacattttcctaaatcttgtagggtgaatgaatgcgtttagtcacggcaaccgcacgtttaatcctttccagcgggttgccgagattcggccacaaatatttgcgtgcatttgtactatgaacatatatattttatgtcagggaaaattgcagtggctgataagacgctaaaattctgatgaggaaggatgctaaataaaaccttaacgcggattcccatctaagcgcctcagtgtcaggtgcttgggaaactgacaatctgttgatgatcttagtaaaacaagtttaagttaaaagggaaaaccaaattgtctacagctgagttaggtttctgaaacacagatgaaacgctttcatatttgaagagcaaaattgagcacattttagtaacattgctacggattattttatacttggaatatcaataagaatttgacttattgtcataacaacgttgcagacaccgcactttaaaagagagcctttctaggaataaacaaaactgtagcccatttactgagattttactttttattagaaaatgcccactatccggaatatgaatgaatgaaatgcagctttttaacaaagacatttccctaggaagttgggtaaacacaattatactttttagaagtgccttttaatttaatctttaggatgttcaccctcttctgcaagatagaataattccaggatttcttatgcttggtagagtactgttctggtgaccgctgtcaaattcttaccagttttgtttgtttgtttaaattcgaaagttacttcacctagttaactgagacattatttttctaaaaattgagatttaaaaccagtatagatgaaaa

SEQ ID NO: 586800 - DNA, 4001 bp, Homo sapiens
ataaaatgatgttttctaaacaaagatgtgttattttcaacgtctgattaaaatatagtttatcacttctaatgcctaaaaattaagtacaatctaaatggtcaatcatagtaaacaattaaataaattatggcaaatttgtgctagaatactaattaacaacttaaaatgatgaccttttaacaaaataaaacactcataataacattaaataaaaacaccaggacacaaaactgtacgtgtgtatacaggacctcatttatgttaaaaataaagattagaaacaaaactggaagatttgatccaaactgtcaacattagtcacctctaagttctgggattatgggtaacttattttcttgttaataattttccatgctttccaaattttctataaaacataaattctataaatttatataattcatcgaggaataaatgtatagatttatggaatctataaagtaataaacttattacattgataattagaaagtaaagttgacctattctgctaatatgggctgaacagaaacagcaatttgttccagggctaaagacatttacatttcaaaaagatatgcatgaattaattcttataagtacttcccgaaggctcaaaatttaaaacaaagatcaagaccactaaattcttaaacagtgatgaatgtaaggtaacaactacatcttaggatcaaattagagttactgtaagaaagcattcctactattaagtgcagatttgaaaacatgttgaaaaatcccatcgaagctgacagagcactgaaccaacttctacctggaacttggtgacagtgactgatttgtctctagccataaagcccatcaaaaaccaaaagattgtctacttagtggtaaaaaataataacgacgatgataggaggattctgctgaactcatgttttcagtggaccaaaaatatcttcccctaggtatggggaagtaactcaagtggaaagaagggatgcttgaaattattgcaaactctattcattgcatagattagccactggtgggtaccatgcatccaggatttatgaggatttcaaatacgccgtccttttgcccccataagtacactcaaactcgtgagaccatgtgcctctatttttaattatgaaaatatggacgctgtatctccaccagtggttagaactgtgaaacatcctaaccacaacgtccagaagggcgactgatcgcagagcttcaagtgatcttaactacgttatgtgttcctaacacactacagctgtgttccgcgtcagcgacgcagggcagaaccatcattgtattaacctttcccgctcatgggacgcggtgcttagtccccgggaaccgacaggggctccgccaacaactctgcgtcccgctctcgcggcccggacggcagcagcgcaggttaactggaaatggctggcaaggaaaacaccttttaaaataataaaaacaaaccacttctcaggagcttttccagcctggaataaggaatatttataaaaacagtggtagaatattaggacgtttctaggttcagtttcaccaagtgaaaagacctgggataagacgagcccagggctgcactggacttgtgggatccagagactacccagaagggccctgccgtcgagggaccctgatctctgcgcgcttcggcggcgcccgggtggcagccggtgtcccgccgcgtccctgagaggcttcggcctcgtccgaccccaggctgaagatcaggtggctcggggccggcaggttacctgcagcagatgcagctgggccacgagacgccgcggcaggtggaggaagcagtcgcgagcgttggtgaaggccacagtcactgccgccccgcctcccccagcacccgccaggcgatcgctgccccacatcgtcccggagcgtcgctctgggttcgcccaccctagcgccgcaaaggacccgggacccggcaggccgaggacgtcggagccggaggagatcgatcggccccgccccctgcggccccgccccctctccccgctgcgcatcctgccgtaagcctgtagtgggtgggacaagaaagcttctgtcacccaccgcgcctctccgccgagccgctcgggggcggcacctcgttcatcaaatcttcgcacgcaggaaacgatggccgacgctgtcgattctccagccaatcctggcactccttaactcatcccgctctcttattggataaaagggagctcagtagggcggatgttgtcctccctgcgaggatcaaagtaggcaagatggcgtcgagcggcggggagctagggagtttatttgatcaccacgtccagagggcggtatgcgacacacgggccaaatatcgagagggacgacggcctcgtgctgtgaaggtaaagtgattttggtttcattcgctctcctcggtagctttatgtgagtgctagcgccatatgaccagcctacggaaataaaggcacgacaaggcttccgtcagatctgtctctcgttagagctggcgtgaagaaccctcggtcagttaccaaagattctcacgacgcctttggtcaagtattagaacatcaactccacgagaataggccttggttttagtcattggatcttctgtgtttacagtactacttggcacaggtaagcactcagtgaatattcgttgagtgattgttcccagtgacttctaccgactcaatttctggaaaaaaatgtcgactgaaggtagtctgttatatgccttaggtagcctctcacatggactgttattctttatgcagaaggaatggcagaaatttcattttgtgttcttttgctgactgggttgaacagattatttcttgttttcaaagttctctttaaaaaaaaatagaggcagattcgtcctaggcttatttgcgaaatacgtttaataactctgcatttctttcaggtatatacaatcaatttggaatctcagtacttattaatacaaggagttcctgctgtgggagtcatgaaggaattagttgagcgattcgctttatatggtgcaattgaacagtacaatgctctagatgaatacccagcagaagactttactgaagtttatcttattaaatttatgaacttacaaagtgcaaggtaatgtgcaagttaagaaatgactcatttcctcatttcttccattcatatttctgtcattttggccccaagtttccctcattcataactgaattaccccaaaacgtaatctagcatatcttcctccagcctttttaaaagttaactttactgaaacactgtatccatcacatcattcccatgcttaacaatttaatgtcctgtagcttggtagagtagaagttgggtttggccaggcacggtggctcacgcctgcaatcccagcactctgggagaccgaggtgggcggatcacgaggtcaggagtttgagaccagcctggccaacatggtgaaacccccctctctactaaaaatacaaaattagctgggtctagtggcgcaggcctgtaatcccagctactcgggaggctgaggcaggagaatcgcttgaaaccgggaggcagaggttgcagtgagccgagattgcgccattgcactccagacagggcaacaagagggaagctctgcctcaaaaaaaaaaaaaaaaaaaaaatttgggtttgaagcctgggcgtggtgactcacgcctgtaatcccagcactttgggagaccgaggcaggcagatcacttgaggtcaggggttcaagacaagcctggccaacatgatggaaacccctcctctactaaaaatacaaaaattagccgggtgtggtggtgcggacctgtagtcccagctactcaggtggctgaggcatgggaattgcttgaacctgggaggtggagattgcagtgagcagagatcatgccactgccctccagcctagatgacagagcaaggctctgtctcaaaaaaaaaaaaaaattctggtttgacgccaggcacgt

SEQ ID NO: 586801 - DNA, 4001 bp, Homo sapiens
tttctaaagtgctctaaattctagacatcctgaacagaggagcaagtgcggaatggagctggaggagggacagggaggccgagcctggtcgaaacctgaccctgcctgcctcctgcagcccctgagctgggaatagcagctcgacctttgatgttcgcgccactccacccctgctccgtgcaggagggtttaagaaaatgttctctggggagtcagagtgaaatccctcatattcaccaccaaaagtgcgtcccctttccccaaaccaggctgtgggagggtcatggggctgcatgaagtctccggaagggagaggaggcaggtggtccttccctctgcctggccccagtgccaggtgccaggtgtccgtgtttggagcgggcaggcttggggctggctgggtctccggggcctgccggtctgggtgctctggccaactgcccaacggccctaggagcaggaggtctggggcacacccttctagcctttccaggactcaacaagctttaaggtcattcagatgctaatttagactgcccttgtgtcagaatactaaggtgggaggcggagcggaggtgccagtcactctgggcgaggccttactgcgcccatgcatcccgggcccatttgtcagcccttgctcttcagtgggagcccagctgcaagcccagagtctggccactccatagtcctgcacccctcttttgattggtctttcctttgcccagagaggggctccagagggagataggtggtgaagctcatgcagggattctgaggacctgatgggggagggccctgcgaggggtccaagcctacatcaagaggaattcagtaccagggggagctccccaccaccccggaaaagggagaggcccagagatggaggtggcttgtccagggccccacagtaagttgggatttggagccagatgctctaagcccagcccttccgtttcctagctgggtgtcccttggcagatgccacctttggagcctgccccacctcgggacacagcgagcttcgagtgcagtcagcccctgtggagtgtgtcccagttacacagaaatggggaaaatttcacaaaactaaaaaatggcttctcagccctcctttttcagtgaatgatgtggagccccacgcctagaaagcctggtccatgggcgagagactttgctgagatgagaagccagctggggctgctgcccacccaccctgcccaggctcctgaaggtggcctcaccttccaggtgcttgacaatgccccgcaggctgttcccgtgggctgcaatgagcactcgcttgccggccttgatctggggaacaatctcctcgttccagaagggcagggcccgggcaatggtgtccttgaggctctcgcaggtggggagttccccgggcttcaggcctgcgtaccgacgctcctgggggacacaggcacgctgctttccctcccaagccagtgggcccccacccgactccccactctgcagcttcccagaggccttcccagcaaaggcagcccaccttgctaatggagttgtagtaggggtgcttctcgtccatcgggggcggcgggatgtcgaaggagcgcctccagatcttcacctgctcctccccgtgcttggcggccgtttctgccttgttgaggcctgtgaggcccccgtaatgccgctcattgaggcgccaagtgcgcaccacaggcagccacatctggtccgtgccgtccaggatggcccagagggtgcggatggcccgcttcagcactgacgtgtagcagatgtcaaactccatcttggcatccttgatggccttggctccccgcttggcctcctcggtccccttttcactcagctctgcatcgaaccagccacagaaacggttctcctggttccatgtgctctcgccgtgccggaccatcacgaggcggtgagtggccatggtggcagcagggaccacagaggactctggacggggacggctgcttcccaacactcccagctttataatagtgtcttcccagcccccacccaccccagccaactgccaatcagcattccaggcggtggcaggtgaccagtagctgagctgctgggggctgggggccaggggagtgtgcaggccaagaggctgtgcttaaaatagccccacgcatccaccagctcctggcctgggttcaggtggcatgtctataaccagctggcacccagagcccagactgagtggggctgctggtcagggatgggcgtgaagggcagaagtctgggccaggggagatggggatagcagggacagaggggctctccagggcaacgctcagtggcctatcagccattctctgctcagacagaggcacaaacaaaatcccaacccctttctcctgtgattggcagccaggctaggaggcggccctcagcaggcagaggaggagagccagaggagctggtgcagaccacagctttgtggagaggagtctggccttgtggaaggtaccaggcagcagcagcagaatgggcaagggctggggctgagccgggtttccaggacaaagggggaaagggcccctgtctttcctccggggtccctttgtcaaggtctcatccatacatgccccatgctcccaccctatctgccctcacccaagccacgctcactctcctagccgaaaccaccttgaaaaagagaaatccaagggggtttgggggcaggactgaggactgtcagaagtcttgattgttaggtaaatgctcagcttagcaggaacccacaacgtaggctgaagggtggcacggagttgagtctaggaccaagacttctgcattcaggtttgggggatgagagccaccaaggcagggaagagactatgagcaataaagtcacaattggggccctaatgaaggggccatggccagacccttgggcatgggccccatccagggcctcccatttcctcccaccccagtgaccacactgtcacctgcgacacttctgataacaggagcgggtaggtgagaggccagcagagggaccaccactctgagacttggatctgagtgtgcaagaaaccctcgacaggcctccctccatccctgctggcctacctggggaggggctcctggcttggggcctgtgaagctaaggctctgtacccaaaggttggcagacaagtcccagtgggcaaagtcctgtcggctgccaggacccccaaggctggcaggtggaacccatccctcctagcagtgccatgcgcaggtctcactgttccacactgatcctgattgaagccacatctcctcatctgcttttgtccctttgaccaagagttgattcactagcccaactaaacatgactgaggaccaggctctggcagtcccacaggggccagacatgaagcccatatttcagtggaggagggatcgtaccagcagctaaacatgcctaccgtagatagcaccagatgctaggaaggaaggaccataatgtactgggagagatgggaaaggagaggccggggacagccctgaggtgacatgtgagtggaaagagcggagtgcaaaggcctcagctatgatgagtcctacagggagagcaattcaggtagaggggttggcaaagacccaagccctacagaaagcaaacaagctggggcagcgaccatcaggggcacatggcagagaggtgggctttgtgtcccaacacagtgggaatcactggagactttgaagcatggtcatattttcaagtcacttgcagctgtgtaggagtggaagtagaagctgagtaccctgcaggtctcggcagctttgatgagaacaaggccgcttagccagggctgggtgcagaagcagtggcaaggatcccccagacctgggagacctcactgccaaccaagcaggaggtgtcaaaaaggaaaggggagcccaaagaagggctggacttcggggaagcaagcccctgcttctgacccttggctccggcttgactttcctttgattcatt

SEQ ID NO: 586802 - DNA, 4001 bp, Homo sapiens
aagggaaaaccagaagaaggagagatgtgactaaccacggcaaactctctggaagtatatttaaaaactgttgaagagatgaaactggaaaggcttttacttctcattttatttaaattttcatctcactttattaaaattttcaaaagaggtggaattacacataattttcattgttcatgtttatcagtatttttcccataaaacatttaaattaaacataatttttgtttctcagattccttcaattgaaactgtatatatacataaggtacactgaacagaaaatacaaaggaaaatcatacttttctgttttccagtttagtacaatgtgaatatacgacctttaaaaaaagtttttaaaattactaaatatagtgagcaagcatgcatgacttatacttcagagacatctgaaaggcccaatccacaaggtccagcacctactataatttgaagtgcaactcttactctggtcaattttattctagtaaaagagctaatacacaaaaaaagcaaaactcccctaagagattgtcaagtgatctgaaaaaagaagaaccctgctcagggactattaatggtccacacacctctcaggatacttttctacttcgggatatctttcagttttttcctctataatataagcataaatatattttaaggtgtaaaacagagaaatccttttgcatctttggaaaaagtccttcccctgactgctaattatctctgaggaaaacagaagcaattataggtctagtgacaggatctaaaggcaaaatgggaaatcaaatggacaaaataaatgaagtttacgtgctttcacttaaaattggcattttaatcaaaaccgatttaaaaagtctaaaaataagcctaactccagaaagctgggaaaggggaagagagaaggaaatatttacctgaggcatctccaactttaaaatcactgtcatctgaactatcataatcaagagcttccagcagagaagctgccaaaggcttcacctgcctcctcttggagctgcgatccactgtgaagagaaaaaaattacattgtcattcataatcacaccaaacacaggggagagttgtggtgctaagagaacataaagatgacctcgcacaaggaatttttgtctaactgagttctcagcaaaaggggtcaggagaaggttggggtgcagaagcagggtggggagggctggacagctccacgggcagtttcaaaggcagctccagccctgatgctgccaacgccaactcagaccagctaaaatcgaagctgaccctcttgctcatcttttcgagatgtttctgcaccttcctcgtaatcccccacttagacatcgtaacagtcaataaaaacggcaaaaatcagggaataaaacaagcgggcttcattcccgcggaccatggagggcgagggtccaccaatcctgctttcccgcaggactctcccacccctgccctgctcccaccggccctgacttctagaatggctgaaatggacctctcgccgcagaggcctcggatacacttactaaggaatccgtgaggtggtcgtttggagaagacttagggagaggctgcaggagcccaggcagcgccgaggtcggggactggggccgcgaagacaagtccgaaagatgctatttaaaaccggcgcgcagccagccggacaggggcgctcccaagagtagccccgcggtcccctaaccccccgcccccccggcctcgcctggccctggccgctcgagccccttcccacagcgctccctggccggagaagacctccggcccaggcagcgcagtcaacccggcggccccggggagttaatttctcccgttaaaactagaagaaaaaaaattaaagaaagaaaaactttattagcctggaccagaagcaacgaaagaccagaaattgcacagcgcgagggcggctgcctcagacaatagggaaagcagcgacccggatacagctctgaaaaggaagtgaaaacacgaggctgagcgcagccctgagagcagcaggaattgagggcgcatgcgcaggactcgcccccgcgcacccttcccgagcaggagccgaacagagccgagtgaaagcccagggagccgcgcggaggcgagcggagccgagtagtgccaaggcggagcagagatccccgccaaaccctgtgcaattccgcccataaaccccaaaggctccgccctctccgcgcctaattcacctcctgagtccaaatccctgggaggccagtttttgtttctgatctgttttttaaggatttactgagtaaacgttccacaaagggatgtttgctaccttaagccactaccaatatttaaatgatattgtcaccggtagaggatcgtgactgcaagttgtccaggttcttggcgtttttaacaaagaattggacaaaacgcccagcaaagcaaagaaagaatgaagcaacaaaacaacaaaagcagggacttattgaaaattaaagcacgctctgtacggaagcgacctgagcagcggctcaagggcccggatacagaatcttgagtccaaataccctctagaagcttcctattggccacctaatgctcacctcatgtaaatgaagtaacgcgcaatcagtctgattggttgcagaaagcagccaaccagaggctgaagtgaagttacaaaggtcatgctcctgtgcaaacattggtgcaaaaagcaatcaatcagaggctagggtgaagttacaaagtggtatacctctatgcaaaggaagatttcccctgcaatcagtttgatttcttgcagatggtgaagttacaaagtgatacttctatgcaaaggaagactctcctgcaatcagtctgatttgctgcccacagccaatttcccatctgccctgcagaaaaagtgggggtttgcaaagggagtagcctctggtccttttgttacttaggcatggaaagttaggggtttcctttcaatttagttcttaggaagtcggagtgacacatccttaggttccctgcctccacaccctattctcctgcctcactctcacccaaactatcattgccatgtgacctctcaaacttttctattgtgctatagaaacttctattccaaaatgtataacctacttagtaaacatttttccttttcaatgcccattctttttacctcctcatctgaaatagaaacagttaccctgcagccctctcaaatgaaaaccactcatccttccatacttcattttctcaaggtgcagaagtggcatcccatgcttaatactcctcattgcctttcagatatttattcttccagttaaaatcctaggaacttggttattttaaaaactccactctgggaatttcacttccattctactttaaacaccaaccatatcatggactgatagtcttatctatgaaattataaatccaaatattccactgtttgacaatagccttttagatttatttggagcaattatgctgaatcatctaaaagagaaattcaaaatctggcattcgtgtttatgtaaaactaatttctagaaggagattttcagaatcaaaatgtattaattcatttactttaataaataacacctagttgctctagaaaaactgtactgccgggtgcggtggctcacgcctgtaatcccaacactttgggaggctgaggcgggtggatcacttgaggttgggagttcgagaccagcctgcccaacatgatgaaaccccgtgtctactaaaaatacaaaaattagctgggcgtggtggcacatacctgtaattccagctacttgggaggctgaggcaggagaatcacttgaacctgggaggcagaggttgcagtgagcagagatcacgccactgcattccagcctgggtgacaagagtgaaactccgtctcaaaaaaaaaaaaaaaaaagtctgtactaatatatataccaccaagagtggataagaattctttctagttttccaaacctgt

SEQ ID NO: 586803 - DNA, 4001 bp, Homo sapiens
aggtcaggagttcgagaccagcctgggctacatggcgagaccccatctccgcaaaaaatacaaaaattagccaggcatgatggctctcgggcctgtggtcccagctacttggaaggctgaggcaggaggatcacttgaacccaggaggtggggttgcagtgagctgagagtgcaccagtgcactccagcctaggtgacggagtgagtgagactctgtctcaaaaaataagacaaaacaggctgggcgcagtggctcatgcctgtaatcccagcactttgggaggccgaggcaggaggatcacgaggtcaggagatcgagaccatcctggctaacacggtgaaaccctgtttctactaaaaaatacaaaaaattagccgggcgtggtggcaggcacctgtagtcccagctactcaggaggctgaggcaggagaatggtgtgaacccgggaggtggagcttgcagtgagctgagatcatgccactgcactccagcctgggcaacagagtgagactccatctcaaaaaaaaaaagacaaaacaaaacaaaatcagatgcaggatttgaggaatgcagaaaaccaacagggaaaagggcagatagaaaataggcccaacctgccactcagcagtgccaaagctgcctccaaccccctttcccccactgcttctgggcctaagaaggcctggtctcacaaaggagccaatttgctgaccagccaacagcagctctggctgcctccgggattgggcaggctgttccaggaatcctggtggccccactactgggtgcctggttaccagaagaaggtttagaataacaagtcccctctgctggtgccaggcccctgggctgctcacacacaggccttctctgcctgccccatcagcaacttggcggagcccgggactgtctgtttcccataaaaacaagcccatttgctggtaagtcctaagtcctcacaatgggcacctttgcctcatcacctcccaaagctgggtagcgctagctctctcctctcccccagccctccatgagcagaaagtacacttggacccccatatgagatgccagcctaggcgcaagcctccagtccttggcacagccagcttggccaacttgtggctgcactcacctttcctggggggctgaggaggcggttatcttgccccagccccagctctgactggggccaactttgtgcctctgtctactgccccacccacccctcacacctttcccaagacccctgtggacagggtcaccacatgggagtaggtggcccagtcctttttttagacagaatctcgctctgtcgcccaggctggagtgcagtggtgagatctcagctcactgcaacttctgctttccgggttcaagcgattctcttgcctcagcctcctgagtagctaggactacaggcacgagccatcatacccagctaatttttgtatttttagtagatatggggtttcaccatgttggccaggctggtcttgaactcctgacctcaagtgaccctcccaccttggcctcccaaagtgctgggattataggcatgagccatcgcgcctgcctggcctggtactttttggcacataacttccctcccctgaactctgagtccaaaaaccagatcagtcccggggacctcttttctgtagaaaattcctgcagatggaggtttcaagggtcaatgctgccactctccctggtccatccgccttcagaaaagagacatggatggaatggatgtgggggtttctatcttctccacccccagtcctccccgctccctgcctatcacctggcttttgtccatcactgggctagctactcacggttaagtgcttgcaggctcttgaaggagcttgacaagaatcccaaagccccccggggagaggggaccacagagggctgaagccgtgtcccgagcagacacttggaagatatcatctgctgttgttttgggttttgctatttgatgaccggaggctaacgtgccaaaaataaatcacaactgcaaacccgggaggcaggccaaggctccgcagggacagggcatggagcccagtctccgggcggaaggtgggggacctctggtggagggtgagggaagcttgtgtggcctgagaccaggccagacaggatgtaagagtgatcagtctcccctctggagctcccttggcctccaggcccagagaacgtaaatccagccttgtgcggagggcacttgcttctctgggagcaattttgatttccacgtatgctgagagcactgccctggagactttctcaatgcatgactgcagcagctgactgcccgggctgtcgcagggacagtgtgcatgatcaccctacataatgcagacctgtacaggttagggaggccgggtgcagtggctcacacccagcgctttgggagaccgaggcgggaggattgtttaagtccaagagtttgacagcagcctgggcaacaaagtgagaccctggctctacaaaaaaattaaaaaattagccaggtgtagtggcacacacctgtggtcccagctactcaagaggcttagtggggaggatcacttgagcctgggaggtcaaggcttcagtgagctatgatcatgccactgcactccagcctgagcaacagagactcagtctgaatcaatcaatcaatcaataagggaccttcccctgcaggaatccacctctgatctaccctccataatttcatctaaaaagccttcctttaaggccaggcacggtggctcatgcctgtaatcccagcactttgggaggccaaggcgggtggatcacctgaagtcaggagttcgagactagcctggacaacatgatgaaaccctatctctaccaagaatacaaaaattagccagccgtggtagtgcacacctgtaatcccagctactcaggaggctgagacaggagaatcacttaaacctggaaagcggaagttgcagtgagccgaagtcatgccactgcactccagccagggtgacaaagggagaccctgtctcaaaacaaaaaaaccttcctttaatcttacatcagatgtgtgggtttttaaaattatttatgtgttttatttattttattttattgagacggagtcttgctctgttgcctgggctggagggcagtggcatgatctcggctcactgcaacctctgcctcccatgttcaagcggttctcctgcctcagcctcccaagtagctgggattacaggtgcccgccaccacaccgagcaatttttgtatttttagtacagatggggtttcgttcgccatgttggccaggctggtctcgaattcctgacctcaggtgatctgcccgccttggcctcccaaattgctgagactacaggcgtgagccaccacacccggcctattttatttttttgagatggagtcttgctctgttgcccaggctggagtgcagtggtgtgatcttggcacactgcaacctctggctctggggttcaagcgattctcctgcctcagcctcccgagtagctgggattataggcgcaagccaccatgcccggctattttttgtatttctttctttctttttttttttgaaacagagttttgctcttgttgcccaggctggagtgcaatggtgtgatcttggctcactgcaacatccgcctcccgggttcaagcaattcccctgcctcagcctcccaagtagctgggattacaggcatgtgccaccacacctggctaattttgtatttttagtagagacggggtttctccatgttggtcaggctggtctcgaactcctgacctcaggtgatccgcctgcctcgacctcccaaagtgctgggattacaggcgtgagccaccgtgcctggcccttttttttgggggatggagtctcactcttgttgcccaggctggagtgcaatggcacagtctcggctcactgcaacctccgcctcccaggttcaagcgattctcctgcctcagcctcctgagtacc

SEQ ID NO: 586804 - DNA, 4001 bp, Homo sapiens
ttggttgcatgtatccaaagctgtcaggtaaatgacccttggataagagggtcatttcaattacagggctaacttcagttacagggctaactgaatctgagtataatatttcaaaccctctgatcccaagaaaggtcaatcaagtatgttctataaatgatcttcagtaaagtctaaagtgtttaatgtaaaaagccaaacagagaaaatgtttattactcccgtagatagaaattaggaaagagaaaaactttcaaagatatagacaggaaaatttttaaagtttgttttgttttgttttccttaacttacaattttctttagctctttagctaagcagactgatttttaacttgattggaagtttaaaagtttaaaaggaggcactaacaaacacaaaagacaattaatagtatatcaatatcaatacttccaataaagtacctcatatgaaaaatataattgtatacctatggcatgttctacccagaaaacaaataacacatctaaaaacagaccataatcccatgccatctactaagggaggtttaggtaggaggaccacatgagcccaagaggttaaggttgcagtgagccatgagtgtgcaactgcactcaagcctgggcaacagagtgagatcctgtctcaaaaaatatttttaaaaaggccatattcttagtttgtctaacttttaaagtgttttaattatcacttattttcaattgaacaaaacttaaaaatcatctgtttggctgggcgcggtggctcaagcctgtaatcctagcactttgggaggctgaggcgggcggatcacctgaggttaggagttcaagatcagcctgaccaacacggcgaaaccctgtctctactaaatatacaaaaattagccaggcatggtagcatatgcctgtaatcccagctacttgggaggctgagacaagagaatcgcttgaacccaggaggcagaggttgcagtgagccgagatcgcgccactacactccagtctgggtgacagagagagagattccatctcaaaaaaaaaaaaaaaaaaaagtctgttttttctcctatataagaaaagctttaaatgtatcattatattttgttaatagagacctgaagaataaggtataaaaatgttttaaaatgtgaacacaaatataatccactatgtacacaaaagatctaaggtattacacaaaacaacataaattttaaagaatataaacaacactcattaggagcaaacagtttattgtattgtcaaaaaatgcctatattcttttggactttataaagaaaaacattacattggtaaagcttattctgaaatatataagatgatacagctatttaaagtaggtacgacaatcctaaaacatcaaaataaacactttaatatttcagtttgtaaaatagagttcccaaaactttattttactgaaacattcagctattgaattgtaacttacaagaaacaaattaaaaactattgatataagttatgtaacagctctgctaatctttcttttaaaaaattaaactaaggaaagtgttaatgtttttataaaatgctaattttatccactcctggagatttgctttctattataattaatctagctactttgctattgtagagtaaaaagtagagaaaaaatatgtttaagcatcatctttccaatttatttagaagtaaaataagtacaagaaaaataaaaataatcttcctttcccactcaaaatcctaacatctatagcatgaaataaacatgtatttttgaaattcaaacatttagaaagctaaaagttttgactatcaacttaccttcttttgataccagactatagcatctgtgactttggacgccatttattccactgaaatcacacattggtcattttaggctgtgcaagagagaaaaacatacaaatgactttatttcccaccttccaaaaggagactgaacagcatgcagacatagcactctggttacttgcagagcaaggggtgtatgacgagacttatattacactcttcctcattactattttagcaacaggttctcttaagtaaacaaaaatcagttgccacaataatagaaagttctatttgcatgaataaataacacttgttttcttacaaaatagattgaattttttttaatcttttaaagaaatttcagaatttcctaggttataccagaaattgttcatctaaaaatccacatacaagaaaccaattcattcaatcagtaatgtagtttgtttctaaaaaccagtgtcagttaccattgctaaaggatggcttaacagagatgacagaatttataatgatatttaattttccctgacactcagtaaacacaaaactgaattaaaataacccaagagccaaaaagtatttatgttaaatactaagccaatattagagttaatacacaggaataattaacactaaagacttcccagatatcacagtttgctaactgtcatttaagtagttatgacaattaatcctcaaagatcaaaaaaactctttaatatttcagtttataaaatacagtccctaaaagtttattttattgaaaaaaattaagctactgaattgtaacttacaagaaacagattaaaactgctgatatgttctataactctgcaaatctcttttaaaaataatcaaactaagacaaataccaaaaaccatttcataagcatcttttctgtgtttgtctaaaacaggataggtactaaacttaatgattccttaaccctagaggttatttgagactgattcccatcaactccagaatactattttagtcacaagatgacactggcatagaggttacctctggtctagtgttaaggatgagcctaaaacaggttcaaaagcagttattggctgcagaactcattacaaaccaaaatcatccaaggacacacaggatgatctcagggaaatcctgggggtaaagcaccctgctgagccaatcctagcacatacagatctgcaactgtagaaacgctaccactagtttgcctcagtaaacaaagtaccggaggttttatataccactcttgggagcatgcatgatgagtgggagcatgcatgagtgggagcatgcatgctttttgagcatattaagattcagatacaataaaaattatcaacaagttcaaatgtttagacgataaacctctaaaatttaaagcagaatttattcaatgcctgtatttttgactgttataaaccaaattattttataacctttcctaagatattagtgactctaactgatcaaattcaagcaaactatgttttgaaattcctgacaaacagcctaacataatggaaagaaaagaaggttagagtcaaaatacctgaattcaaatattagctctactatctattatgtaatattgaataagtcacggaatttctctcaacctgtttctttcacttataaactagaaataactgtacctccccaccccttataggatctttgtaaccaataaataatatatataagatgcctgccacagtccaggacatacagtaggttttcaattataattatttttaacatcaattttcatataaaaaattccccaatctaggaactagaagtatttatatttccttttttaaacatagcagtttaaggagaaatacatgcaatcagtttttgttcacattgaaaataaaaatagctatccaattatcataaggtcacaatgtcaattctcaattacatacacatggattatttacagatttcaaagttcacctccacttaatttctcagtcaggtgtggctatcttcatttctctcacgagggttttttgaggaagctttcccttactgacttaaaatctcccatttttgtttttctgtcctggaagcctttgagtatgatttattaacttcaaccaccttgtatcccagaggtttgccccactgattttgctaggggactattcaatacacacta

SEQ ID NO: 586805 - DNA, 4001 bp, Homo sapiens
aggactaaaatgattaaataatatacaagtagtccaactattttcgagtttcattttatccacatgacaccctaaattctcttcagtttagtgaaggtttttttcattacatattccttgcaattttgcattaaatggaccagccaaaaaaagttcatggtttaaaaattgggtgggccaccttcttcatttttagggccaactgtccagtgccagtttgggctcaaaaaaagtttactcttggaggcttgactatctatgcaagagtgcccccattgtatactatacttgtttactcaccacattttcatgctccaccagaaagtggtcaaaattggaacacgaaaactctccacctcactaacacctaacttaaaactatcagatgcattcagacagccagtctgtgtgggaggcaggctatttctggggcaaaaatatttcctggaaccactgtttctggccccagacatggctcattctccgcagacctccagattcctctcctctacgttatggaggtggagccactacaactgataacgcatatccatttccttctcttaaaatttgcagtccatacaccatatccaagttaggatttcaaattgttatactgttttgtgactctttaggctaaagtgtgcagtttccagactttcagaattccccttccaatattaaaaatatggtgaaaaaagcccagtttgaaagaaaataaactttacaaaaatacctgaaaacaagatcaaatactaagtctcttgccaaagtcttggagaaaaaaaaaatgaaagaaacgtttaaaaatggcaaaagctaaccaaaaaccttaagattaaagtatcacacctgaaaagtagtctcaaagcaaggaggatatactattaacaaagaaagcaaccgaaaactacaaaatatttaatattcaccatgaatttcaaaattacttggcatgtaaagtacacactgagattaataaattgttccagattctgcactgcccaggttagtataaggcagttccttgttttcgccacgctaaaaataagaagggtgacagattagtgacagaatgatccctgaagttacacaaggaggtgctgagttagaaagccatgactcgaaggacaataccagaatgctggctgtcaacactgggcagataaaaataagaaaagctgaagcatgctgatggagcacggtattgtttccagacgggaactatcccttaaggcccatgccttaagcacccactccgccgtgttgggatcagaaaactcgactgccgcctgctcagagggggcagggcagcgaccctccttccacctcctccagcgcgcgagccgccgccccctcccgagcccgctcctccggccgctagctgacatctccccgccagccgggctagccacccgagacccctgaacgcccttccaggacccgacgacccctcagcacagcgccaagggaaggaagcaaaggacaggggcctggaagcggggcccgaggggcgggtggcgcgctgggcttcggcccgtcaccatcaagacttgaggaccgcgcgagctcgggaggaaggcggctgagcctccgccaccggccgactgatgagaaggggtcgcggctgaccccggccctcaggtacgggagactgccgggaaagtcgccggcgacggagggcgacgcgttggccccggagcccccacctccatcccgacgaccgctctcctccctcgtcccgatccatcctcgaaattctgtcagaactcgacgacctccacactgcccacccgagcgcggaggtgatgccgctcttaccgtaggagcgagcgccgcgccgctaggaggcggctgaggtgcgcgcgggagactccgaagctagcgccgccgccaacagagcccaaggagccacaacgaggctgcccgcgggcgcgctgcctccagagggttgccccaccccctctcccgcaggattttgcgccggagcctgcagtcactgcgcgcgggcagggaggatgggaggaggggcggggcgtcccgagagggcggagctgagcgccggctgctctgattaacatctgtgggcccaatgggagcacggaaactccaggctgatcttggactgacttccctactaacccgtgacagtagagaggcgggaccaatgggtctttttattgccgcctttctgtcgaacccgaaagtaaggaaaggtcggttggtttgcactggcggacaaatggtccaattaccgcggaaaagggacctctgaatccagattggcgtcctctctacctatagggtaggctcaggggcggtgagaaccagccccggatgtgggcgcggcactgaggtagaactgagagatcctctaccgcagtcgtttgaggaggcggaactgaagttttttcttaattatcatgtgacgggttctggatttaatggggggaaaagggcggaaaaggacaaggatccaaactggcgaatttgctgatcttcgcgtccctctccgctttccggccggcagcgctgccaggtgagtctggggctctgccctagcccgcaccgtacgccggcgctggtctcctgatgcttccgtgggctgtgcggccgaccctcaacccatcacacagccagccccaaacgcgcacacgcctgcttggctccagggcttctgtgcgcatccagcaggaaccgtgttaaactccagcatgtgctgggcttacagcccatgaaaggggagcgtcccggtggggcgccgcgagccgactgtcggtgtttgcagaagggcaagtatagtttaggagcgtcctgaagttccaggggcaaataggcccccagatgagctaagttgtaagcagaacgctgttcctttggccaaggctgttgctgcacgggcttttcaaaagcgactcattatgaagaagaataaatatgtgggctcatgaagcaaaattatctttgggatgaggcaggttcacttggtagactactggcagtggcgagagaagggaaatgggggctgatacccagccgtgggctatgtgggtggggctctatatatgtccatacaggggtaactccgaaggttttaaaaatgagtaaggaatcattaacaaatatttaactgtcttcctagtgccagaaataaccaccttaaatgggaaacattttagttgagcacatttttggagtacgcacctccccctttcttgtggagagaatagtaggaaacataacgactgctcaaattgatgaagacgtaaatgtaaaactgggatcgtatgtcatcgttgtagctcagcatacaggcgtacaatccttcaatcgtcatttaagtatcagcagtgcttccccattgagggtatttccgtgcaagaacataacagaattttgttgcatcccacattataaatcttgtaggcacaataagattgttacttgcatcctttcacctccagccctaaagcacctgtggtaagtacagccaaatgtaagaaaaaaatgaagcttgtcttatccgatagcagatggaacagttaggtttaagcaagtgtataatcataaaccgtttttcagaggttcacaaaaacggcctgatagattggaggtggggattgtgcaatttacgggatgaaatccatccatggttattaatcaacacacacccctccaaccctgcttccaaattcagtcccacatcccactctatggcagcctctggccgggaaaggaaaccaacacagaaaaatgcctccttagaagcaaaattactgcagtatgaagcctttgccaattaagtaaacaagtttaagtgccactagatgggtataagggaaaagaggtgagttaggagactaatacttaactgttgaaatagaacagatgtgtcctcttgcactgtgatagccacccactatttaaagtagtagagatgttgcacagtacatcaaagttagttctaaaatataattgagcacgctaatctagggtatttg

SEQ ID NO: 586806 - DNA, 4001 bp, Homo sapiens
atgccccagagggagagttaaataaagtaatacttgttcaatatgggtgacaggtatatgggggcttattggtcgttctacttttgtatactttgaaaattttaaagaggtaggtaaaacactcatccagcacagcgcatgacacattataatggctcagaatggacattgttcttaaacatactgaaacatatagattactaaaatagtacagttaaggttcaagtcccagtttacaaggtgcaacacgagatgccaaaaaatctcactttgaaaacaggcctttaacttacttcctctttgttaagtctcacacttcttggaacccagacacctcacccagccttgcttcacgttgcctgttttcaaactgcctggacctaggatctactccctaataaatttcctgcctcttggtttcattttttctttctaattaggaaagcaagtcatttcatttgtaaagctaaaacatatcggaattagtaaagttacagtcaaaaccatttgcagatatgtaaaattttgaatcatggaatttgtcagcattctggctgtcactgctatattagggcagtatcttagaagagtcacccaaggctgtactctcccaataggaacatttaggtaattttaacattgtttaattaattaattaaaattcatttgatctgtctctacttaataatggaggagctacaggatggaaggcaggatttctggactccagtgaccttctgttaagacccccaatcatttaacttcttttttgctctaatattttcatttttgtaacacaaattcacaaatttattctcattaacctactcactctttccacaaaattcagtaagtacctacccttcacaaagcacttatgtataaataggacatactgcaataggaaatccttcaaataataattgaaatttgaaaggtattaacactgaaagattaggtattttgctttcaatgtttagtatcactacattgtaatacattatattctaaacgaatcaattattgaaacaaaaaattaatgtttcagaaaatatcgtttactctcttaaataactaatgttagacttaaaactacattatttccttaagaaatagtggagcatttgatgtataccaaaaaggagagcttgataagaagataagaaagacaaatttcatttgatccaaacttatgttcaaatcttggcttaacttttaaaaccaatattccctctcttaaaatatgaagttatacttagtaagtgaaaccaactgtcccaaagaactgtctcttgtggcttaaaacattcattttggtcttttgctacattatagaataactaacaaagaagagaactgtaagatacattgatattgacactaacttgaaataaaacatgtccaaatttaggcagcatataaatacacagcaataacttctgcctcagtgataccaaacgatcttataagatgcagaggaaaacaggctgactaatactcactggtttccttcatggttgaggctatgaagctttccccttttatgagaagatgttggaaacactgtaagtacagtaatcttgaagcatgcacttgtaggaatatgaagcctggctgccgtgccctcccttttcctcccaaaacaaaaacaaaaatgtgatgcacctgcaaaactattgccggaacgttgtagatatccacaatacaggttggactagacaatgaaacacagacattcggtggtagtatcatctcaagaaccgacaacagtttcagataatctagccgagaaggaagtgccactattccgagtcagaccccacaaagagcaaaaaatagaaggaagcaatacctgataaagcagcggaggcgatgatgctgaaggatcatttgtttaatttttgaaaacaaaacaaattcaaacctacccagtgtgcgtctaaattcttccgcttttctggggctcccttcatatccagatgcagaggaagtgttgcagttaccaggaaggaagttttaaccaagttgattatacgtgtgattgctcattttaaaagtgtcagaaatgcatttcctgttttagcatagagagggtaggagtatgagactgagcaatgtttaccatggtttttcttttcttttttttttctctttgaactaatttttcaaaaattgtgatactgagacaaaatgacataaatccaaaccaaaattacccattatgagacataaacatatgaaatatctttgtagctagttctaagagccacagtattaggtatcctattaggaagacttttaccagtcaaattaaactcattcccctcctgggaattcaaaagaatccttgttcgcacatgctaactgaggggtgggggaagagaaacctagtcatcttgaggactaagttatcaagctgaaaatttttaaaggcatggtctgcaagctcacttccttagcttggtgagagctttctctattttttcagagcatttggggcctaaaatatcactggctcaaactgaaagcactgcagcatgtgcatgtgtgtatataaatgtgacatactgcagtaagtaacccttcaaataatggttgaaatgctaaaagtattaaaattgaaagatgaataaaaaggtattttgattttaatactaagtaccactacattgtaacacattatattccaaacaaggatcaactattgaaacaaaaattaatgcttcagaaaatatcctgtgttgaggatggagccttactgtcagcaatgactgattaattaactgtagacaaaacagaaggaggttgcctgttatcatggggaaattggggagctgaacactgttacagcatcaggcagattccatcctgggaggtggcccctgattcctatgggagtagagaatgcatagaaaagccatcctgaatcatttttagagtagcgttgtatcttccaggtgacctcagttctttctagaacctccaagcatcctgaaccagcgccccctccctccatctcagaattccctatgctagagttcatcctccaatcggggtgttgagggactccagctgagcttcaagggcagcagatagaatggagttgacctcacaagtctcttggaggtatgtaattaagagttcctctgaattactctgatattgagataaatgattgatttgacttatttccttttacatatgcctcttgggttttaacttttaaatagcactctaatagttgacatcagcaggcaaataatttaattcaaaggctgcctcccaaatatttagaggggtcttatcagcttctcaaagtatattcctatataggaatactcccttaggaggctggcagctttagaagcaccaaggctagctttcttggttggtcctgagggaagatcaacacactgtagccaccaagccatgatgtgagagcttgccaagctgtgttttacccagagtgtgtgggagggttcctgggggtgggtggagtgggaggaggtttgagggtgggagggctgacctcagagggaccatgagcttggccagccctgttccccagaccattcaatagatcccttccctgtcctggctcagtcacttccagggggccaagtcccaatctggcactgcacatacacacacacatgccacattattccagaaacacgagactcagcctcttggccctgcctgcttctgaaggaactattaagctaagtttgattaggcaaaggattttctgttttatgactaaactggcaaatatgtcaggtttattggtggcttgagattaaaagtaccctgctcttccccaaatcttaatatagccactaaaatttgactatctgtagtaaatgttcccagtaagaagtaatggcaaagatttccttcctctgtggatacttcctccgtgtagaggcatcctttacgagtaagaatattttatatccccagaatatttagaagaccttcagtcctcattaatatcccat

SEQ ID NO: 586807 - DNA, 4001 bp, Homo sapiens
gggaagaggaggtataggcggcgtacatgtgcacagggacccagagggaccaagtattttaaactggaagcactacagcccttcagagcgtgggctttggagtcgggccggtgagtcctggcccagccacttactttctgggtgatttgggctgcttaatctctgagcctgtttctcatctctcaaactggttagtaatgaatgccccagagggagagttaaataaagtaatacttgttcaatatgggtgacaggtatatgggggcttattggtcgttctacttttgtatactttgaaaattttaaagaggtaggtaaaacactcatccagcacagcgcatgacacattataatggctcagaatggacattgttcttaaacatactgaaacatatagattactaaaatagtacagttaaggttcaagtcccagtttacaaggtgcaacacgagatgccaaaaaatctcactttgaaaacaggcctttaacttacttcctctttgttaagtctcacacttcttggaacccagacacctcacccagccttgcttcacgttgcctgttttcaaactgcctggacctaggatctactccctaataaatttcctgcctcttggtttcattttttctttctaattaggaaagcaagtcatttcatttgtaaagctaaaacatatcggaattagtaaagttacagtcaaaaccatttgcagatatgtaaaattttgaatcatggaatttgtcagcattctggctgtcactgctatattagggcagtatcttagaagagtcacccaaggctgtactctcccaataggaacatttaggtaattttaacattgtttaattaattaattaaaattcatttgatctgtctctacttaataatggaggagctacaggatggaaggcaggatttctggactccagtgaccttctgttaagacccccaatcatttaacttcttttttgctctaatattttcatttttgtaacacaaattcacaaatttattctcattaacctactcactctttccacaaaattcagtaagtacctacccttcacaaagcacttatgtataaataggacatactgcaataggaaatccttcaaataataattgaaatttgaaaggtattaacactgaaagattaggtattttgctttcaatgtttagtatcactacattgtaatacattatattctaaacgaatcaattattgaaacaaaaaattaatgtttcagaaaatatcgtttactctcttaaataactaatgttagacttaaaactacattatttccttaagaaatagtggagcatttgatgtataccaaaaaggagagcttgataagaagataagaaagacaaatttcatttgatccaaacttatgttcaaatcttggcttaacttttaaaaccaatattccctctcttaaaatatgaagttatacttagtaagtgaaaccaactgtcccaaagaactgtctcttgtggcttaaaacattcattttggtcttttgctacattatagaataactaacaaagaagagaactgtaagatacattgatattgacactaacttgaaataaaacatgtccaaatttaggcagcatataaatacacagcaataacttctgcctcagtgataccaaacgatcttataagatgcagaggaaaacaggctgactaatactcactggtttccttcatggttgaggctatgaagctttccccttttatgagaagatgttggaaacactgtaagtacagtaatcttgaagcatgcacttgtaggaatatgaagcctggctgccgtgccctcccttttcctcccaaaacaaaaacaaaaatgtgatgcacctgcaaaactattgccggaacgttgtagatatccacaatacaggttggactagacaatgaaacacagacattcggtggtagtatcatctcaagaaccgacaacagtttcagataatctagccgagaaggaagtgccactattccgagtcagaccccacaaagagcaaaaaatagaaggaagcaatacctgataaagcagcggaggcgatgatgctgaaggatcatttgtttaatttttgaaaacaaaacaaattcaaacctacccagtgtgcgtctaaattcttccgcttttctggggctcccttcatatccagatgcagaggaagtgttgcagttaccaggaaggaagttttaaccaagttgattatacgtgtgattgctcattttaaaagtgtcagaaatgcatttcctgttttagcatagagagggtaggagtatgagactgagcaatgtttaccatggtttttcttttcttttttttttctctttgaactaatttttcaaaaattgtgatactgagacaaaatgacataaatccaaaccaaaattacccattatgagacataaacatatgaaatatctttgtagctagttctaagagccacagtattaggtatcctattaggaagacttttaccagtcaaattaaactcattcccctcctgggaattcaaaagaatccttgttcgcacatgctaactgaggggtgggggaagagaaacctagtcatcttgaggactaagttatcaagctgaaaatttttaaaggcatggtctgcaagctcacttccttagcttggtgagagctttctctattttttcagagcatttggggcctaaaatatcactggctcaaactgaaagcactgcagcatgtgcatgtgtgtatataaatgtgacatactgcagtaagtaacccttcaaataatggttgaaatgctaaaagtattaaaattgaaagatgaataaaaaggtattttgattttaatactaagtaccactacattgtaacacattatattccaaacaaggatcaactattgaaacaaaaattaatgcttcagaaaatatcctgtgttgaggatggagccttactgtcagcaatgactgattaattaactgtagacaaaacagaaggaggttgcctgttatcatggggaaattggggagctgaacactgttacagcatcaggcagattccatcctgggaggtggcccctgattcctatgggagtagagaatgcatagaaaagccatcctgaatcatttttagagtagcgttgtatcttccaggtgacctcagttctttctagaacctccaagcatcctgaaccagcgccccctccctccatctcagaattccctatgctagagttcatcctccaatcggggtgttgagggactccagctgagcttcaagggcagcagatagaatggagttgacctcacaagtctcttggaggtatgtaattaagagttcctctgaattactctgatattgagataaatgattgatttgacttatttccttttacatatgcctcttgggttttaacttttaaatagcactctaatagttgacatcagcaggcaaataatttaattcaaaggctgcctcccaaatatttagaggggtcttatcagcttctcaaagtatattcctatataggaatactcccttaggaggctggcagctttagaagcaccaaggctagctttcttggttggtcctgagggaagatcaacacactgtagccaccaagccatgatgtgagagcttgccaagctgtgttttacccagagtgtgtgggagggttcctgggggtgggtggagtgggaggaggtttgagggtgggagggctgacctcagagggaccatgagcttggccagccctgttccccagaccattcaatagatcccttccctgtcctggctcagtcacttccagggggccaagtcccaatctggcactgcacatacacacacacatgccacattattccagaaacacgagactcagcctcttggccctgcctgcttctgaaggaactattaagctaagtttgattaggcaaaggattttctgttttatgactaaactggcaaatatgtcaggtttattggtggcttgagat

SEQ ID NO: 586808 - DNA, 4001 bp, Homo sapiens
ccatccctaccaaatcccatctgcaccactagtgtgatgttgggcacagatatataggctctgttagcctcaatttccctgtctgtaaactgaagagaatagcagttcctcttgttattgtggagtcttggtgagggttcactagggcaatgcacacgaagcgatttgccagggccatgccatggtgcctcaatgaatgggggctgctgctcttgcttctgcagacacatcccttagtgttgggaaggacagagtagcaagaccagagtggaggacagggagagcacggctggaagaacccaggggcttgtcagggaaagtgggggctgcaggggccagggagaagtgaggagggtaaaggatggatgcaggaagagagggatatgatacacgagagaagaggcgagacaggtcagggaggagctgaaggacacttctgggaagcagagggggagaaggaagtgggcagatgggaacccaggtgatagggcttgacccagggactgcagggctcccagggccagccactgggcacctgctgggggttcctgaatgagctcctgactgtgagagatgcaaggtatggggcccaccctgaggcactaacggggactccacacagagacacatgacaaagagcgggtgagccacatcctggagagatcgaatcggcctggaggttatggggagaggccaggctggagcctcattttggagaaagaatgaaggataattagagggtccagcagctgctgaggcctgaggagtgggggcggggctggatctggaggggacagtgagggggatggttggggaaagcagatcagttgtggagacaaggggaagagaaaaggggagaggtggcaaaggcctgaggaagtgttaggggccaaagagagaacttaggggtcgtcagaagaagtggggtctgaggtgctggggacgatgtcaccagtgatcataaaagcctcactgcggtgggcaaagcgggtgccagggcagctggactcaccctgggtgatggagagtttggtcccctcgatggactgccactgctgcctccctgagctccgtgtgtccagctcaactcggcagaaatacacagactggtcctgcttctgcaggttggagatcctgaggaagccgctcttctgaccctctgtccagttcagaaagagccggttcacataatccttgtgaatggaaggcggccttgtgctgtagaaggactgcctgtggaagtggccccgtctccaggatattctcacgtcgggagctgtggctaactcccaggggtaatagaaggagaaggggatttccacagagccacccatggaggctgagaggtgttttggttgagtgaccccataaaggtagcttggaccagatcctgtggagccacctagaggagggagggagtgagtaggggagagaccttgaaaccacctcaagacacaaagagggtgaccccagaccctcccgcaccttcacccacaggcagtcgtgtgacaggtggctggactgacctctggcctgggtctcccactcttcaggcatgggggagggaggagggggagaggatggggtcacccgcccctgtgggacccgcccttgtttcctggtggtgggagcctgggccctccccaagatgtcccacctttgtctcgggttggcccctcctgtggtttgggcagagcccacatctgggtggtcctgggtactcactaggctgcagaaatgctggcggcagcagcaagggcagtaggggcagcagcaggggccgacccatggccttgttcttctccaggggacggggagaccagcagagccgtccaggcaggagaggggccctgtggaggggccgcctgggggttgaggtgagtgaggagagccgggctcaggctccgaagagggctgtgggggccaggagccttccccaaaccagtgcacctccagggtgaccagcacttcctttatccatctggcttattttcccctattgcaaaagggcctcccttgtggtcagtgccaagtcagccctgcccaaaggccgcggtccccgtcctcctgccgaggggctgggcctgaccttggggggctgggcctgaccttggctggctgggcccctcccacctggatccctgcagaccccacctcactcagcctcacttctcatccttctctctgcccagggccagcgcaggctctttcagggagaggaaaggcaggcctgaatctctgtccttctgcgccccagattcagtcctcagagaggaggagaaggaagccggtggaggtcacaggtgctcagcccccagcccaagcagaagagcccccagcttgtcctctgtccctctccctccctggcaggggctcccatgcagtccccaggcaccaccacgacccagctggcctcttcctgccccaggccctctctcggtgcaggcaccacgaccttgctcaaggggtgagggggctaatggtcccctacacagagactggtccttctggaagccaccccttgacccccaagacatgagactgggtctgcaggctcccctctgacgtcccgccctacacaggaggggacagggctctgagaagccctgccccaggccacgtgacttgcagtagtgggtacaggactggagccccctcaacccagatgtctgggcctggctgaagggtggaatctctgggcctcaacttctgagtgcaggacaggaggctgtcccttcatacagcccctcaggtcattccctccacacacctgagcccttggctgatccagaagcttccttggacacagaagaaagtgaaggctcagagcaacacccaccccacacacagtcctgggcccatctctaacggggatctgccggcctttgcccgggggtggtcactggagcagggagctttggtggtgcacagggctccctccgtaggaggctctgcccaccctctccagggtgaggtggcatcagttgaggggccgtgggggaagacaggatttcatcagaggaagtgacatcagccttcttgagacagaagcaggcagggacgggcctcccttctcttagtctcttccctggtcctagtaggctcctctgtgcttcccagggccagccaggccggcccgccctccctccctttacaggcctgaggaaacaggttccccatgctcaggaaacccctccgtctgagccaggccctaaacacctcattctctgcttcacaacattctgaggtgacacattatctccattcaacccacagggaaactgagggacgggggctttgggctgaactggtcacagctggaaagatgggctgcagagaggacaagggaccccctggctgtctgggcagggcctcgagagggtggcccgccccacctgaggacctggctgaaaggtcacctgcttaccaggctgtccaatgtgggggccacatagaacttatagccaacagcctctgggtagctctggagggcacatgctgcccaatgctgccacgtgcagtctccttagatgcaacatgcatgtttatgtcactttcaggccctggatccagctgaacccccatgggagattccttctgtgtcaggatttctgctctgggatggtgtgaggtctcctggatttgttcatcctccctcccccaacagcagtgacagaacctgggactgagcctggggctgtggctctctcacagacagggcttctgagaggaggaggagggcctggaggagggcatgattccaatgtgggcagagcctaaatgcagccccttagtgcaggtgctcatgggagaggcgtgggaagtcgtgtgtggggagcaggggcagggagggggtaagtaccctgcaccgcattatgagaaccactgcttggatgtccccacattcccccaacaagtatcctactgtcctcactggccacatccgtccctgcccccagcccctcacctctccttggcacccaccgttcctgctttcctct

SEQ ID NO: 586809 - DNA, 4001 bp, Homo sapiens
gtcaccaggctggagtgcagtggcacgaccttgactcactgcaacctctgcctcccgggttcaagcgattctcctgcctcagcctcctgagtagctgggactataagcgtgtgccaccatgcccagctaatttttgtatttttagtagacatggggtgtcaccatgttggccaggatggtcttgatctcttggccttgtgatccacctgccttgggctcccaaagtgctgggattacaggcatgagccaccgcgcccaggctgggggttctcacatgtgaccctgcaccaccccactgcaggaggcccccgagatgcagacgccccagcacaggccagagtcggccttggtgggcttgaggggagccagcagggtctgcatatttctgaagtcccttagctgcaggtgggctcagagaaacccccagctgggaagcttgaggagacagtgcgttctgggcacttacctttccttctcctccaccacaggaggaggaggcacagcagtcccaaaatgacagttttgagcacagcgacagccaatgcaaccctgatggcagtgtccagacttaggtgccatgattctgagtgccctttgctttctgtgaccctgaggccggctatggtggttgtgctgctgggcctccaggtggtggtggttgtgacagctggaagagatgaggaatgagcagaccctcttctgggggtgtggggcgtctggatgaaaggcatggtgtgctgctttctagattggggacattcaggatgagcaagctgctctcagaagcccagacatggaaggggtagcaaggtgaaatgctaacagctctcaatccagaccactgggtttaaatgtgaagacatcagtggtcaccaaaaccctcactgcggtgggcaaggcaggtgtcagggcagctggactcaccctgggtgatggtgagtttggtccccttgatggactgcaactgctgcctccctgatctccgggtgtccagctcgactcggcagaaatacacagactggtcctccttccgcaggtttgagatcctgaggaagccgctctcctgaccctctgtccagttcagaaagagccggttcacataatccttgtgaatggaaggcggccttgtgctgtagaaggactgcccgtggaagtggccccgtctccaggatattctcacgttgggaactatggctaactcccaggggtaatagaaggagaaggggatttccacagagccacccatggaggctgagaggtgttttggttgagtgaccccataaaggtagcttggaccagatcctgtggagccacctagaggaaggagggagtgagtgggggagagaccttgaaaccacctcaggacacaaagagggtgaccccagaccctcccacaccttcacccacaggcagtcgtgtgacaggtggctggactgacctctggcctgggtctcccactcttcaggcatgggggagggtggagggggaagagatggcggcacccacccctatgggacccgcccttgtttgctggaggtgggagcctggcccctgccccagatgttctgcctttgtcttgggttggcccctcctgtggtttgggcagagaccatacctgggcggtcctgggtactcaccaggctgcagaaatgctggcggctgcagcaggagcagcaggggcagcagcaggggccgacccatggccttgttcttctccaggggacggggagaccagcagagctgtccaggcaggagaggggccctgtggaggggctgcctgagggctgaggtgagtggggagagccagggtgaggctccccagagggctgtgggggccggggaccttccccaaaccagtacacctccagggtgaccagcacttcctttatccatctggcttcttattgcaaaagggccttaggtgcctttttatcccttgcctaattgctccggccaggacttcaaatcctttttttttttttttttttagtagagatggggttttgccatgttggccagggtggtctcacactcataggctcaagtaatctgcccgcctcagcctccaaaagtgctgggattacaggcgtgagccactgtgcccggcctgacttcaaatcctgtgttgaatagaagtagtgagagcgggcatccttctcttgttcctgatcttggaggcaaagatttcagtctttcatctaaaatgactgaaagactttcagccatgggccttgcatgactggcctttattttgttgcagtacattccttctcttcctggtttgtggagtgttttaccaggaaagggtgttcaggctgggcacagtggctcaagtcacacaaaagtgtcaagtcagccctgcccaagggccccagtgcccatcttcctgctgaggggctgggcctcaccttggctggctgggcccctcccacctggatccctgcagaccccaccgcactcagcctcacttctcatccctttctctgtccaaggccagcgcaggctctttcagggagaggaaaggcgggcctgagtctgtgctctgctgcaccccagattcagtcctcagagaggagaaggaggaagccagtggaggtcacaggcgctcagcccccagcccaagcaccagagcccccagcttgtcctctgtccctctccctccctggcaggggctcccatgcagtccccaggcaccaccacagcccagctggcctcttcccaccccaggcctgctcccttggtgcagggaccacagtcttgctcaaggggtgagggggctgacggtcccctacacagagactggtccctctcgaggccaccccttgacccccagacatgagactggatctgcagggtcccctctgacctccctgccctacacaggaggggacagagcttggagaagccctgtcccaggccacatgacttgcagggcagtcccaggactggagccccctctacctggatctctgggcctcaacttctgagttgcaggaactcaggcataggggagccccaggaggttgttccctcatacagcccctcaggtcattccctccacacacctgagcctatggctgaaccaggaaggttccttggtgccagggcagctggactcaccctgggtgatggtgaggtgggtccccttgatggactgccacgacagcctccctgatctgtatgtccagctggacttggcagaagtacacagactggtcctccttccgcaggttcgagatcctgaggaagcctccctgaggaagtgaaggctcagagcaacagtgggcaccccgcacaaagtcctgggcccgtctctaacaggggatctgcaggtctttgcccgggggtggtcactggagctttggtgacccacagggctccctccataggaggctctgcccatcctctccagagtaaggtggcatcagctgaggggccgtggggacaggaaggcaggatttcaccagaggaagtgataacaatcttcttgagacagaagcaggcagggacaggcctcccttctcttgtcagtctcttccctggtcccagtaggctcctctgtgcttcccagggccagtcaggccgatccaccctccttcccttcacaggtctgaggaaacaggctccccatgctcaggaaacccctccgtctgagccaggccctatacacctcattctccttgttcaacccacagggaaactgaggcaccggggctttggactgaactggtcccacctgcaaaggtgggccgaaaagaggacaagggaccccctggctgtttgggcaaggcctcaagagggtggcccaccctgcctgaggactttttgttttttttttttgagatggattctcgctgtgttgcccaggctggagtgcaatggtgtgatcttggctcacggtaacctctgcttcctgggttcaagtaattctcctgcctcagccttccaagtagctgggaattacaggtgtgtgccaccacacccagctaatttttatattt

SEQ ID NO: 586810 - DNA, 4001 bp, Homo sapiens
atggaaaaccaaacatcgtatgttctcactgatatgtgggagctaagctttgaggactcaaaagcataagaatgatacaatggactttggggacttgcggggaagagtgggagaggggtgagggctaaaagactacaaatatggtgcagtgtatactgctcgggtgatgggtgcaccaaaatctcatcaccactaaagaacttactcatgtaaccaaataccacttgtaccccagtaacttatggaaaaataaaataaaataataaaaaattttaaaaacccagcaaacatctcaatgcactggaggtatttgtaggagcatctttgaagatcctccttctgtggtccccaggtagggtttaggaatttgtatttatttagctccttaggaaatttggacatatggccatgtttgggaactttagatactactctacatttagaccatacactgcaatctgaaaaggaaaggaaatggagacaaataaaatggtcaaatgttcttcttcagtcaatgaggactgggttcggggccaggagagttattttctcgtccctagaaactcccggctacggacctttgttattgtgtgggacagaagggaattgagattcttagcccacagtgtctcacagccccattttcttggggcaaagcatcttagagagattctattttttggtgccaactgctgtagtgcccagtgcacaggaaaagggtataaatacctaagcaacttcaaaatctctcccatttgtatatgagtttcagattgataggatgaccagcttagttcgagtgactaaccatctcagtttacccaggactgaggtcttttccagaatgggttgtggaggtggcgggggagggcagagttgcagtgctacaaccaggaaagttctgggcaaatcaggatggatggttgataacctaattagcatagcttatttgaataccttgctgcccttcagggctaagtggactgtcatctggcgggaatggggtgggatctgaacctgtccccatgcagggtttcttgggacacttgcctccattacattagcttgtcaaaaccctgaacagtttcctccaggacaggatatctgaccatgccatagagagtacctccaagatcacaacccagaaacccagcattataaaccctactgctatagagaaaactccctagattgggtatcgctgctttctcccagacccttggctccattttctactttattttacttgctccaatttttctgcttccttcacacatgtgttctcaataagttgacttctgaacctgtgctctcaggtcccagtatacgtgagagcaagaggtcatcatattcatcttcagacttcaggttaggaagaatgtctaagctgccagtctagctcaatctcagaccacagggcagtggccagggcctctggtcctttagccagtcctgccaaagctgccctaagctgccattggaattcacagacctgttatgcttctcttctaggaggcaaggtgtgagaaggtaaagtttactgagcagaaatctgaacaaaggtataaattatgaacaagatgtggatcagcatgttagatgaagactaactactaattacagcctgtaggtacatttggagctttatttccactggcaatgcagaaacacccagcaaaaatgtgagaggagttggtggggcttcctaagaggacaagaagtggaacctggcaggagatccatgggagctcctgggactagagttctgggaagttgaaagaaattctcagaaagagatatgtaatttccagactgggagaggagccctccctgcaattttttttgtggggaggagaagggcatggctcacgtgttgtcctgagctttgttggcccccaactgcaggcagagaaccaggagcagggtggcagggctggccctgaacaggagctggagcaagcgcatgctggagaaaacagaaggcaatgtgtcccagagaagtggtgtcccaggtgcccagcacatttcttatatacagattgatcaaggaagtgcaagagctgccagggagatccatgaggtgaatcacccattcaccctccccactcgtgatctttccttgttgacccaaagtttgtttttctaagaaaaaatcaacactcagctagaatgtcagcgtttgagagaggagtcagattgttcttccttattttttcagcatcagagtttctcaaaatggctgggacctcaaaagatacaccagtttttcccgagtttacagattcagttttcttttccctcctaatttgcctgtctgaagtgctatgtgtagtcttagcttcagtcactgctcccctggtctctgaaagcagagaacacagctgtggtggcaggtttcagaccagagacatagaacatctttgcttgatcaaattatagtgagttcaagatgcaatgctattcaaaacatttcttggagggctaggatgatcaggacttccctagcagtcactacccatcatgaggtggaagagctagagaagacctgagctgctctacatgatggggaagtgagttcaagacactgggtgatgtaaagatgtttattgtcattgagtccttcttaatttcaggtgtggttgcaatatactgcagatgtccaagatccccagctgccccacaatccccaaggcagggtgatattttaattctagacaattcctataaatagctggcacccccaaatcagacttcttggcaccaaagagctggcttattttcttattgacatggccactttcttacacttgtctcatgcgtaagccacacaggaagaaccacagtggaaaggattccttctgtgagaatggagcccacattatgtccagtagatacccaggttgtagaattcctctccttgggatgatggggagacttgctcttgctgacactggcattgtgttatttctccttatgaaattaaatctgctccttaacctatgacttacaatactatgggatttgtttctatcatttgcatggcacacagctgcccaggaagagcctctctggcaacagagtgaaaatcagagttctaggagttaccgcctctgtatgttgctttagccaggattcagagctaaagtgtaagtgtgtgcttctgctttctggatgtatctctcaaaattgctctgtctgtttattcagctcctggatctaccttctcttttctttgaattggacaccattcatgtcattgctcactcagaacttcagctgttctcatgatcacatgctttcttccctgtttatgtcctatccactcaagaacactgcttgtgagggtcacaatgaccttcctttgtaagccttttcccacaattaaattgtctttacacctggtccttctcacttgcataatttccatttgaagcacatcctagctacactgaccaaggcaggcataaggcagaagaatctaggaagtgtctgtgtgggaaaatgcaggaaaagttctttgcttggctctttgaaggcatagccctgtccttgaggatgcaactccagcactcccaaaaggcagtgtccagaggaaggcagatgacgatgggttaagagcatctattgaaggtaatgaggctgttcttctgtgagctagcaggaaactgcaatacctacaatgtacaggacaatcttttttttttgagacagaatctcactcatccaggctggagtgcagtggcatgatctcagctcactgcagcctccacctcccgggttcaggaaattctcatgcctcagccacccgagtagtggggattataggcaggtgccaccatacccggctaatttttgtatttttggtagagatggggtttcaccatgttggccaagctgatcttacattcctgacctcaagtgatccacctgcctcggcctcccaaattgctgggattacaggtgtgagccactgtgcctggcctaggacaagtcttattcag

SEQ ID NO: 586811 - DNA, 4001 bp, Homo sapiens
cacaccacacaccacgcaccacacaaacacaccatacacacaaacaccacacacacaccaacacattacacacacatcacacagcacacaccatgtatcacacacacaccataccccactcataccataccacacatacaccacacactacacacagaccacacaccacaccacccacacacatgtcctataccacacacacacacacagacactacaggcctaactccatgaaatgagggctacaggagagtcaagaaacctcttctgtttctatgaacaagatcagtcactgtcttgctttaggtgactcaggaaaccccaaaaggctatgacttcagaaatggggcctcgacaccaattacaatggctagtgcgtgcatgaactagttggtctgcaagtacaagatgtataaatatacaggggaaaaaacatcaagtcagcgacttccgctcctcagcttttctttcctttctaagggcaaaggggtaattccttgcaattccctgactgataagagtgaaggtcaaattgggccaacatcaaggctctgggagtctgcaggagcatgggcatttggaataaaagaaacatgaggtaaccagaaaaaataagggaaaaaattgtagccaaaatcagacaatgcttggcagcagtgagtgacataaggcaaagaaatttccaagcatgaatgtgaccaaccccgtcaacacgtgcagcctcattttctcatcctggtttgctttgggtttctttgataaaatgatggtgatggcacaaagacagtaagctaacaaaggcagaaatgctgacagcaagcattcatcaaggatactgatttttataacgaccctctggagtttacagatgtgacaacaggggtactcagattttcaggatgagaaatctgggggtgaggaggtaaagtgacctgcagtggcggggtaccccactgggcaagatctgcaggcacaggctcccatcatgccaggccaggggacagcggtgacccacctgggtccttaccacatcccacaggcaggtcaccttgctggcctcacgcccaggaaagggggcatggaggtttgcaccatgtcacactgccatgagacagtcaacagcagagcacacaggctgcccagcctcaacaacacatgggtgctggcgcgcacagagcatggggaagagggtttagaaataagacccatggaggctgggtgcggtggcttatgcctgtaatcccagtactttgggaggccaaggcgggcagatcacaaggtcaggagatcgagaccatcctggctaacacagtgaaaccccgtctctactaaaaatacaaaaaattagtcgggcgtggtggtgggcgcctgtggtcccagctacttgggaggctgaggcaggataaatggcatgaacccaggaggcagagcttgcagtgagccaagatcgcacctctgcactcgagcctgggcaacagagagagactccgtctcaaaaaaaaagaaataagacccctgggccaagaccccatgatctcttcctgtgccaggtttctcctggtctccatgcaagggacctagcagacaagcagatagcttaactttgtctactaccaggcagcagaaagtcctcgaacttggaaggtatcctgcatttgcaggaagagcaatcagcacttctcatggctgaaggcatccgcttggaggagtcttctcaaaagccttcaggaaaaaactccattctcaacaccaactccaacctctgaactgaccccgccggccaaatgcaccctcctggtacagggcctccactcgtgccagagtgagcccacatcctagaggtgatgacttttgaaagaaaatttctgaatgcatactttaaaatcaagcttaccaaaccctctgagaacagtgataactcacctttcctggtcatcagaaatgttctgggctgcctcctcggccatgtcctgtgcaagctggtcacaagtatgacagtcagcagaccagcttcttcctacatcctctggaagacaaagaaatagagcttaatgcttccagcttctgtacttgtgacctcttatcaggacacacatcaaacacagagggaaaaatccaaactccagtaacattttcccaagcagaaacagcttttgttttcctaacactgtcagacaaattccttcctaagaagtgtgcttttgacagacgtggtggctcatgtctgtaatcccagcaatttgggaggccaaggtgggtggatcacttgaggccagaagtttgagaccagcctggccaatatggtgaaaccccgtctctactaaaaatacaaaaatagccaagtgtggtggcacacatctgtaatcccagttacccaggaggctcaggcgagagaattgcttgaacctaggaggtggaggttgcagtgagacgagattgcaccactgtgcaatagagtgagactctgcctcaaaaacaaaatgaaacaaaacaaaacaaaacaaaagtgtgttttaggtagggatctttgtggctgcctgaaacagatcactactcaagggagagactgtacatggaagctgagagaagtctgagaataaaaagctgtaactgttggctgggcgcggtggctcacgcctataatcccaacactttgggaggtcgaggtgggcggatcacgaggtcaggagctcgagaccagcctggccagcatagtgaaaccccgtctctactaaaaatacaaaaattagccaggcatggtggcacgcacctgtagtcccagctactcgggaggctgaggcaggagaattgctcgaaaccgagaggcggaggttgcagtgagccgagatcgtgccaccacactccagcctgggcaacagagcgaggctctgtctcaaaaaaaaaaaaaaaaaaaaaaagctgtaactgtccacaactgcactggggaacaggataccttccacaagagcagaagagcattcctaaggaaggctggcaaggcacacactaggcgcactctgtcttacggcagaacctaggaatgatctggttccgaacctcctgcacctctccttgtttgcaactggcgggtcagactgagttctctccattacgaaacattttctcttatatttttaaagcacttgttagttgtcttagttctttataccaacatttaaaccttcagagattttagaaaacttaatgttttactcagaacactagatattttttctctccactctgaagagagtgataccaagaagagtgggaacgttttcaggcacaagctctttctcagatgggaacacagaccccttgaacaatgatgaaccaagctacgggtgtccggccttggatcctgtgttttctggaactttgctgccaatgaggtgagtaaccagagccctgtggtgggttaaggggcctgctgttgacctaacacacctgtctcctggggcctgctgccacctctgctcttctcacactgccttgtcagtgcctctggctttgtccccactgtgcttgttgtgagtaaatctcagatttgggggaaatgcatactttccaatttcattagcaatacactttcaaatgcgcctgtgaccaagaaaaggataaactgcaaactgcagtttgtaaacgaacaaaatcccttctttctgaagcccctgtgatttgctctgacaccttcctgtcaaatctaaacagagtccactgggtaaagacacctgtgcaaccctgcctgctgggctggcatccatacccacacgcacacctggatgctctgaccttgctgctgcctgttccttccttgtggggctggacatcctgagaacagggcctacatttaaagtttgtgatgtttttgaagccagcagtgctaaccaaagatgccaggaaatgaggaggagcaaagaaagtgacataattgagggaagaaatatgcctgcactgccctacgtgggaggcactctcatagccactctcatagccactctc

SEQ ID NO: 586812 - DNA, 4001 bp, Homo sapiens
actgtatcaagagactaaactttctatatagaaaggagaaggaaaagagggggaaaaaaccccacaaaacaacaaaaaaagttggggatggggaagaatgggaaaaaaagaagaatgttgaagatgaatgaaaaaaagtgtgtgtaatggaaaggagtgaaggatcaggaactaaattttactcaagtatatgcatctgagagcttagagagacctcagaaggaaaactgccaggtcgagcctcctccccttaggttagcagtgttgatcagcctctgtcatccaccaaaccaaagcctagctttgagttattctcatctaatctaattgcagacatcactgaaggtccttgacgcaaacaagaaaaacctcttctcatttagtctctattaatgattacagaaaaaaaataaacaggtgaactcactgctaattacactaagcaaagggaagagattctgggtacgcccaataggggcacctttggctgtgctgtgtgacctcctcgaagttactatgtatgccaactgatcctcccacacacacccattcttaaaacacccggcgcattaccatactacaaccttttaaaaactatcccacaaaagaaagaaaacgtctctcacccactctaagggatactgggaacatttctgctttcaaacacactgcctttaaaattttaaagacctaattcattttctgtgataaaaagtttacttccaaaaaagtggctagcacagtttccagcatatagtaggcttgtattaaatactagttgcacacatgacaaaaatgatcgttctgaataattttcacagctgtagaacagttacaaccttctcaagatatgaagcttttacctccacaaactagaaaaaaagggcggggactattttaaagccaatctgtaaggcacggcaagaaagttgcaaatatttgcattcatttaacggtaatttctgagtctgtaaaacaaaaggaaatgctcaacgagaaaataaaaaaccttgtgcagagctttgaaactgtggagttgggactcttgacaccctggtgtgcacgcagatgactctgaaggtgacaaagggaaagtgtttgcactgaggactttgataaaggatctttccgctgtggaattccaggttactgctggcattcttttgaaaccttccaacctagctgcgagccaagggagtacggttccttcgccaaaattcaagagattcccagagaaccccacggcggggcgtctgcgccttcctcccgctgacatcaagagcaccgtgcctttcaagtcacccaaaatctcagtctttgtagccttccttgaagcgaaagggcagccacagctcttaaccaaccccaagagagggccgtgtcgtcctgcacggcgacacggtcccgtgagagaactgctttgggaaatactcccgctccgcgctggcctcaggaaagggccgtgaccccctccctaagacgggtccagacaccgccctccagccgcgcagacaaaggaccggcccccggcgcgcccccggcccggcacggccactcaccgctcagatagttggtccacttgtacagcaccccctccatggcgcccgcggccactcggcccacgcccgccggccccctcactgccccaggccccaagaggcgaggagcaccagcagcagggccatcgcctggcgctgcccagacgcccactcccggcgcccgggcccggtgtggggacgcccggcccgcctcacatcctcggcccgggggcggggtcactgcggcggcctcggcgcttgaagcccagccagccggtgaacccgtggggcgaagccggcacgctgttcacaaggaggcccgggtccgggccctacgtgggtcggaggggcagccgaagcctccaaagtgcggcgaacgagctgccggtcgcaggcggcgccacggcgcaccacctgaaccctcgactcgccgggcccgggacgcgctcgcgcatgcccagggcgccgctcgcgcgccccttcccaaaatccactccgggatttcgcggcagcggcggcggggcggagtttgcgggaacggcccgcagggaaattgagtcccgagacgcggactgcggactaggcgacgggaggagggaggcccctgagacaagtgtggagcgcagttctgactgtaaatggtgcccgccgtttgagggtctacgtgacctctcacgatacctcctgagttctagtccctattcttgttccaaagctgcctaattgatctcacacacttgaggtaaccaataacagggcgtaaagagattattggaatttcagggtagaatactatgaggccagtgtaaacagatgttgtccagactctaaggtctcactatggaagtgttgatctactgacccggagcactgacatcacctaagagcttgttagaaatgcagaatcttgcacccaccccagacctccagatcaaaatctgcattttaaacaagatcttcagggggattcctatgcacatagagtgcggatatgcactgtgttaaggttattagaccagaaaaaatgttaactacagattaagtggaaagaggaggtgagaaaagactacaatacgatttaaatcgctttaagtatatgtcacagaagcatgcaccaaaatattaagaggattgtttgcggctggtggtggtatcggcgagctttctttttctttaaagttgcctgatttagtaaataaaaatgcaaaaccattattcgttatgtatctgaaattccaacttgattcgactccccaatattatctggaaatcttactttagtgctttccaatttcttccaaaatgacttcaatgaacatgcattacttttgaacttaggcaaaaaatgtaaaactagaaaatgtaaactacgatgaggctgtgtaattcgtaaccatgattaccatttcttctttaaagcggaagtctgcaagtcgaaactcattatttaccctgtaaggtaacttaagggataaattattagcagccataacatgacgtggtgctgtggaatgaatcagacctggtttgaaggcagagctcatttgcttcggggccaaacaaccttaagcaggacagttaatatctcctggtgtaaatttacttctcttttaaatgggaaaaaagaacctgccttactgggtgtagtgaggttcatgcaacgggaacgcgctttgtgaaccctcaagcagtatgtcagtctttacagtttataagcaatagcaaaatcctaggattgtggcatcttggggggccgctctccaacggcgagagtaaacgagtctttcctggaaccccgaagatttcatagggccccgggactcttcctacgtctctcagcagggttcttcacagagataaatcagccggaggagtttccggttggctctgcgccccgcccctctcccaaaatccacgctggttgaatgctgaaatccaccgggctctaggaccacaagggatgatccgccgcttggcagctgcccggctctaccgggctgtaaattccatcgttgcagcgtcattggcttgagagctgcctgaaggacagcaccaatagccaatgggaggctgctattcccaggcggccgcgttataagagccagtcaggccggcatttgggcttaactctttaaaggtaggttcgtgacccttgagaaaagagttggtggtaaatgtgccacgtcttctaagaagggggagtcctgaacttgtctgaagcccttgtccgtaagccttgaactacgttcttaaatctatgaagtcgagggacctttcgctgcttttgtagggacttctttccttgcttcagcaacatgaggcttttcttgtggaacgcggtcttgactctgttcgtcacttctttgattggggctttgatccctgaaccagaagtgaaaattgaagttctccagaagccattcatctgccatcgcaagaccaaaggaggggatttgatgttgg

SEQ ID NO: 586813 - DNA, 4001 bp, Homo sapiens
gactcaagcaatcctcctgcctaagcctcccaaaagtcttggatgacaggcgtgagccaccacgcccaggcacacatttttctctttgcaaccccctttgctccccaaatcccattcagcctgaggcctccactcccacagagctgcgggatgcgcccactcctctgccttccctaccctcagtcctgggtccaggtagagccgtgtgtagaacagctggtcgtcgtcatcatccttgtacttccactggcgcacgatttggtggatggtggtggcaaaaccgatgaatcctggcggggagggggagtgttgacctcgagactcccagggtcccagggcctgtcccccaggctgtctccagccctcaggcgcctttaacactctgtgtcccaccgctcttggcccctctgccttgggcactctgccactcaccaccagaattgaggaagcgcttccccgtgcccacctcagggtactgctccgccagcccccactcgggccagcagaagctctctgcagagaagagcaggcggctgccactctggacgaacttcttcagcagctctgtggggctgccggccagaatcacgtcgtagctgggtgaggaaggggaggatgggcaggggtccactgggaacctcagcatccttaccccgctccctatccccagccccgttacctatccacaaacatgatgatcatatcctcccggtcagcgtatttctccatttccttctttaaccaccggaccttctgtcctccaccaactgttcgagccacatcaccccctcgccactcctctcccaggcccagggtctgtggagaagattgccccgtgccaggcaaggggtggggagttgtggggggaactcctgaccaggcttaccgtggggacctgggcatccagacttcagcccacccctcctgctgggaccccctcccaggggcctttccctctcctcacccgcacagtgtagttgaagaactccgcagagcgcaggaaacgcaggtacccctcggtttcagctgtggccacagtgatcaccagcagcttctctgttaccagagggaaatggcacttgagatccaccgcccagctccgggcctcacgtgctttgctgtcctccctctcactcgacttccctccctttcttccttcccattcttaaactcttctcacccaggaacactctgaccccaaggagggcagggtgggagtggtgcccaggaattccgagtccctttgcatagggaggctggaaaccccagttcagggtagtgatgggcgaggggcttggcgcgactcagcctcaagagcacgctgggcgggggacgggccagacacctcctcgagcctccgaccctctccgggccaggctggcaggcacgccagcctctgccccctcggccgtgccgggcctccccgggatctcacctgggttgaccgggtctcggccccggggccggtcggaggctgaggccgcagggggcagcagcagcggcagcagcagcaggaaccggggtccaggccccgaggaggtcatggtggggagcgggcccagacagcacccaggatcctgggatctccgctacgcgcctggatcccagctccggaggggagctctggaaagggggcgctcgggctgctgtgcggccgccgcggggagcagcttggctggggctacgccctgaaaaaaaggcgtatccggaggctacagaaagctccagatgccggcgccacagacaaggcgaggattgtcccgggcgcacgggaggcgggggaggggcggcggctcgggccggcgggcgggagacagggactctgggctgagccagccgcttgacacatgtggaagctgaaacctggacaggggaagtgacccctggcggagggtcgggcgggacgcgggggcgggtcctggccgcagccctgcccagagagtgcgggcggaagacggggagagcgagaggctggcggcgacagggagggaggaagcctaggagtccgccgcgggacggaggcctgggggaactgggagttcagctttctgcagagggccactaggaacctcggattgcccacggaagccagccactttctttgacagtccagcccacctcctcttctgcccggagaagctccaggggctgcctttgtgatcacagcatcttcacaaggaccaaaggaaaataagatttcttgtaagaacaccgtgaccacatctttaaaatgacccatttcgtggctcccacaagatttacacctccacactgaggccggaagtggttttgcccctataaaacatggcgaaaagctttcttgtctccaaggaaacgccacgtaatgagtcaaagctgtggcgcacgcgcagaagtacaagctaccggaagtgatggcgcccctactaaagccttggggttagtacgcgtgcgcagcagtttcttccgacagttgtgttgtgccaatggtggagaagaaaacttcgggtatgtgagcccccgcggttcgcccccttccccttcccaagtcagtcctagaattttcttacctagtcattcctcttttttggtctcgctctttcgcctaggctggagtgcagtggcatagtcatagctcactgcagcctcgatttcctgggatcaaaccatcctcccacctcagcctccggagtggctggaactgcaagcatgaggccccacgcctggttaatttttaatttgttatgtggtgacgggctctcgctatgttgcccaggttggtctccaactcttggcctcaaagcgatcctcctgcgtgggccttccaaagtgctgggattacaggcgtgagctgccgcgcccggccccagctattcctcgtaaatcccttcctcagccctcgggtcctggcgttgacccttcattcacgttttattggtgcctgctccaagccgggcgctggggatgaagaggagaaagacccctcttatccaagcattggctttttctggaaggggggcagaaacgcagacctaacactgtattttactgtgatttgtgatttgtgctatggcagagggaagcacagcgcctgggaacagggagacgtggcatctagcccaggttctgggaggcaggggactgtgaaagcttgaaggaaaaatgaaaaagcttgaattgagtcttgaaagtctagttagggtttctctcagtgggaacctcacgtgcaaaggcagtgaagcaagaaaaagcaagtcgcttaggaagccaagttcacagtttggatcttacagagtaataagaaaggatcgaaggctggggaaaggttacattttgaaaggcattatacacactgcccaggagtttgaactctgtagggaaacactggagagccagcaaagactttttttttttagacagagtcttgctctgtcacccaggctggaatgcagtggttctatataactcactgcagcctcaacctcccatgctcaagtgattcttccacctcagccacctgagtaggtggaactacaggtgggtgcaggccaccatgctgggctagtttttatattttttgttgagatgggtgtctcactatgttgcccaggctggtcttgaactcctgagctcatgtgatcctcctgcctcggccttccaaaatgctaggattacaagtatgagccactgcgcttggcccttttagtttttctttctttctttttttttctttttgagacggagtcttgctctgtcccccaggctggagtgcagtggcgcaatctcggttcactgcaagctctgcctcccgggttcacaccattctctggcctcagcttctggagtagctgggactacaggcgcccgccaccacacccagcttatcttttgtatttttagtagagacagggtttcaccatgttagccaggatggtcttgatctcctgacctcgtgatccacccgcctcggccccccaaaatgctagaattacaggcatgagccactgcgcttggccctctca

SEQ ID NO: 586814 - DNA, 4001 bp, Homo sapiens
tgtgtgtgcacacgcccaccattcttaaaaagcaaataaggtttcttccccctactggggtctctccattgtgagagatttgctttattccatctatgcttttcaatcaatcaaagggcagctcacacagcacacagcgggaatacaatctccctcccggggtgtctgcgcttctccccagcctagccagagacctttgcaggagctgaaaaaagtttggaaatagcggagtcagggtgctgaaaaagccctttcattcagcccctatcttcaggatttacaaaaacaacccaaattctgagcctagcactgaggcctccttgttcaaaagaatgtttgctcctcttccatcatgttctgtaaggctcctaacatattttttccactggtgggtctgtgggatactctgaacacatgatcttggacagagggtacaagcttattcagttttgtgggaaaatgatatgatcatgttgcctagaaagctacctcaaagtgacagcaccagaaacacaggagcttgtacatatatattcaattccgaatttgatttggatctcatgttcttctccctatgacaactgagaccctaaattagttgctcttagaccccaagaagggaactatggaaaagcctcttagaaccccagccacttcctacctcctccagaaaaagttaaaatgagcagcctgtgaaattccagccagagagaacaagaatgaaaatgctttcgggaaataggaccttaaagcacgggcgtctggggagtgattctacaatcggagcaggcttgggctctgggggacgctggcagacccacgaatgccttgccttctccggtgggcagtgccgccacggtcgtgagggaggggagcctcctcttttggaggactatatccctcgtgcttcccccttctagttctctttctcagacacacaccacgaaaggcatgtgacaggtgttcgccagccggaggcaccggggaaggcagccccatgtgcccagggagggtagggaggtgagaggggacccaagtcctgtgtctccaagtcctgtctgcttgctgctaagcaggcactgaggctgtgaataaggtcttaccttttaaggaggatctgacccccgtaccttccctagacaagcaacatacgcggcgatgctttaagccgctttctgcctgaaatctcggcgcattcccggggaagcagtgccacgcttcagaaaggcgtttgtgctgcctcttactggggaaacgcagtgtctgtttcatatgcgccgccctacagaactgcagccccaaccgcctatctggcctcctccccgggcgctgggccaccactctctccaaatatgcgtccgaatatctgtgggtctgtctcccgttgaaatcccagggtgtccaaaggccacggggccgcgatgacactgggtaggtctccggaaacctctcaggacttctcccattttaaagcccagctagggacgaaaggggctgggagctgaaaaattgctccctcaacctccccgggtgggaggcagagccgggaatacacagaatcccaccccgaaagtcccgggaaagagaagtctgagtccaggagcgtgagaggagaacacacccgggaaatccctgctccggccgctgcacctccgcgggcgtccaggtgggacgtgggcaggtgcgcgagcgccgtgtgtgccggtgtggatctgtgtgtgtgcctgcgtgtgtgcgtgtgcgtgtgccgcgggctggctccgggacactgaggactcccgggtcggcccaggtctgtccgaccttgctgccctcgccgcccgcccggccccactccccggcgggccggctccttacctggacgcgccgcgtttccctccttcagcgggagcgccgcattgacactgcagatggagcctatgccgctgcctctcgccctcctctgaacgtgtgcgtgtgcgcgcgtgtggctgcctcctccagccccagccccgaacgcaaatactccaccgaggcacagggaagccgggagcagccgaggaacgcggagggcgccgaatcagagcctgcggggcttgacagcttctcttgcggcgtccaaggtgggcgtaatgtccaacaaaaaggtcggaaaatggggatcgattccgaacacccctttcctccacccagccccggagcccgagcagcggcggcggctctcgggggctgcggtggcgacgccgggctgccccccttcgtccccacccccgcgggctgaatgtccttgatgccaagcgggcacagcggcgtcactccgcgccgcccatgctcgcccggtcgggccgctgcccgggcgcggcgagtgcgcgggggacccgccggggagcgctctcggcgcctctgcgcgcctctctgggtagcggcggccgccccccggcagcccgcggccggccgcgccgcggcagcccccacccttgccgagacactcgccgggcagtgccctggggccggggctggggggccgcgggagccgccggctgctccccggggaggcgcggggctgcggcggtggtggctgcggcggctggcgctgcggcggcggagagctcggccgcgggccgagccgggcctcccgggcgcgcccccggccccccgggcgggctgctcgcaaagtttgcagggggcagggagcggggccgccgctggctcggccgccgccggagctcccgggctgcctgctgccgccgcggctcgctgctgctgtgcattgaagcccggccaagcgctgcaaaaactccagctgcctggcgctctctgggtcctcctctcctccctcccgccctccctgcttcccttcctccctccctcgcctcgcctcctctcctccctgccgcccgccgcccgccgccgctccctctctggctcgctctcgctggctcggagctcgcggctgacatctagagcgagggagagcggccggcagagggggcagggggcgcctccctacatgctcccacccgccgccgcccggcttgccggctctcctccgcaccaacgtttgccgacacccccctgggtcccctcggcccgcacggagctaccctggcggtggcgatgtggggcggagagaggggcatacatgggtgaccggagcgcacggcgcgcgctcagagggaggcgctcagccgcctcggaatttgcagctctgggcgctggccgtcggagggaccctcaggtgctcagagctgacacaagcgcacactgactctgaggcatacacccattgctagtcagaacccctcccaacaccccaccaagtcacccccacatggcacccaaggaggccgaggacactgagggcacaaggcccgcacgagagaacatgagtggccagtgccccagagctggcttggtaacctgacttttccattcatgtttatactgagcggctctcctggctcctctcttctctgaaaccctagatcctagactacatccagaacagaccatgccaacatcagggtggtttctgaagcccaaagaaagaaatcaccatgtagctctggtttaggcagtgaagatggggagtgggtggcactacctcccaaacctctgcctagatccccctaggaatgggcccacccaccaagagaaaccgaagggattcccacacctgttaactcaactctgtgcatgccaccctcatcctcatacccgctcccaccatagtctgagggaagtggcaccttcagcagagtccagtaagcattccctgggataggcaaccagcaaggacgaccctctaaaggagcccatggctcttggcctcctctctcctgtcccttctttagttttcactgtcctcacacccagaaactcccgcccattactgtccctcccatcgaaacatctcagagcctccttattaggtggacatgactgataatggcttaaatgcctatacctccctataggggttatattctcacagaaatcgaagttgtgtgaattggggagcc

SEQ ID NO: 586815 - DNA, 4001 bp, Homo sapiens
aggccactcagtctgagccctactggtgggctcatcttatgaaagaggatatttgagatgtagagttgttgaatgcatgaaactaggctggaactaggacccaattcccaagccactgccagttccacagtctcacagacacacggccacacatacgaacacacactgtcatacactcacaaacacatgctatcatatacacacacatgcattcacacgtacaccaacatacacacacatgcagtcacacacatatacaaacacacgctgtcatacactcacaaatacccacatgctatcatatacacacatacactcacacatacaccaacatacacacatacacgcagtcacacacatatacattcacaaacacatgctgtcatacattcacaaacacccacatgctatcatatacacgcatatacactcacacatacactgacttacacacatgcagtcacacatatatatacattcacaaacccacagtcatacattcacaaacacccacatgctatcatatacacacatatacactcacacatacactgacatacacacagacatgcagtcacacatatatatacattcacaaacccacactgtcatacattcacaaacacccacatgctatcatatacacacatatacactcacacatacactgacatacacacacacatgcagtcatgcacatatacactctcaagcacacactgtcatacaatcacactatcatacacatatgcactcacacacttacatacacagtcacacatatactcacatgtatattcatgaacacacacttccatacactcaaaaacacatgctatcatatacacacgtacactcacatactcacacatatgcagtcacacacatgcatatacattcacaaacacatgctgttatccactcacaaacacccacatgctatcatacacacatacacactcatacactcacatacacacagtcacacatatactcacatacacactcacaaacacacacagtcacaatatactcacatacattcacacaagcaattacacacatacatatacactcacaaacactatcatatacacacatatacacacacagtcacacacatacacatacactcaaaatatacactcataaacacacactatcatatacacacatacactcacacacatccacattcttccatatatactcacgaacacacactgtcatacactcacactcatacacttacatacacattcacacacagtcacatatatactcacataaacactcatgaacacacagtcatatacccacaaacacacatatactcacacacacacagtcatatatatactcacatatacactcatgcacacacacaaactcacaaactcagtgtcatatacacatatacacacatatgcactcacacatacactcacgtacacacacacttatgcatacattcagtcacacatatactcatgtacactgtgtcacacacacatatgcatacacttacacactcacacatcgtgtatgtccttctaagcacagaaacgctttccatttccaacagtatcaataattcctgattactgagactagtgacttacagaaccttccctttttccaactcttaccaatttttcagtgacataaaatatagaatttggccatttcccatggggcttcagccaagggacatcactaagagctgtatctcagctttcctctgccttcacactctcaacagtaatgctgctcagtatccccagtgatccctaatgagggggctcctccgcccaatgctttttaccttttcggggtaattaaagcagaagcattcaaggtttcagtccccatgttccctcctcaatccagctccagaggggaaatactggtctgattgggctgtgtcccaaaacgctgggccacgctactagtgggcaagatctccatgcattaaggtctccatgtggtctgcatctcatgattagactggggttctggaatgcattgaaactcatctcacaattagactggggttctggaatgcataaccccagtctaatcatgagaatccaccagacagacccaaattgagggggattctacaaaatacacgacccgcactcttctaaggtgtcaaggtcatgaaaaacaagactggaaaaccaacacagactggaggagactaagaagacctgacaactaaatgccatgtgggaccctggaggggacccgggaacagtagtagaagagctggtgacatctgaatgaagtctgtaatttgggtaacagtactgtaccaatgttaatttccctgctctgccaatgcgatgaggggtatgtaaaaggttaacattaggggaggctggtgaagaatacataggaactgtctactgtcttgacaacttttctgtatatctaaagttccttccaactaaaacatttaactacaaaaaaaaaaaaaaaaaaaaaaaaaaaaaaaaaaagccaggcctagcctatattacaatgttcactgagaacatgctgctagcacagacctggtggtgagttgctcagggaacgtatgcactgtagtcatgcacttgctggtactgtttattaggtgcagacatcccagataagagctgagttacaagcatccaaatcaatgacattttaataaatagtttacatatatatatatgcacacatgcacacacacagatggcaataagagatttagtctaagatctgtgcaaaaacgagtttgcctagcaaaacaaattaacatgttgggttttaaactgttgatatttggcatataaaccattggagttttgttttttctattacaaccataaaaatagtttttggataaaattcgaatcacttctgcagagagaaaagacctgggtcccacagaacagttagagaatcactaatgcagtccttttattttatagatgggagtccagacaggcttaaccaaggtcacatagcaagttaggatgagaacctaggtctcctggtttctggttctgagctctctgaacctgatgagtgaaggacagctccagcaatggagcctgaatccccagacagcctggtacatcactgcaaaacaggcaaggccaggttggctggggcagccgagagcacacggtcccatagctcatgcagatagggctggtcaggaagaacacaatggcaactctgaagagcgagtgtcaggcagcagctctctaaggaggccaccacagtccgcaggagggattggatgggggatagggtgtgaggcagctggtgagtgaaagaccacctccaagagcatggaagaaaactccaggtctctgcaagagaagggaacagaagtgccaacacctgggtccagctgctctattgagctgcctttgttgaaggactgagttgaacagcagatcttgccgaggctgccgcttcctgccattcacactgtcccagagaaaccttccctgagcatcatgcagttttcctttctagataactgttattcataggtaagattatctggctcatttgtttagctgtttagtgtctgctttcccccattcaaacgtcagcaacttgtctgttttgttcaaggctgaatcccagcccatagaatagtgcttggcacatagtaggcactcaataaatagctattgtatagatgagtaaatggactcttcccatacccgatgtgtctctgaccttgtatttttctacatcagagctattcctagatgcatctcagagtctgtttgtcaagaagcagaggctttgatggaaaagcactttgctgagaacatctcaggcagcgtttttcttctgcttcattttctcttcctaatgtgtgacaggacggcaccactggctgcaagccatcctgagaccatgctgcttccctcccaggactgtcacatccaccgcatctggtttacaagccaaacactgatatcctgtccttgggtaaaccccaacat

SEQ ID NO: 586816 - DNA, 4001 bp, Homo sapiens
aacaattaaataaattcattttatttatttgaggttggggggaacagtctccttcctttttctgacaaatgctttctggtcttaacactaagattttcttgacctgagtgaattgatagttcattcctgtgaactatgagatttaaaaatttcgatcaggatactgctgggtgctacaagtatctacctgccaccttcaatgaggattctttgcccaactcattaatccagccaattaataactgtagtatcaagaacatcagagactgtcagaaaacttcggttgaaatcctggctctgtcatgtattagctgagttacctgaacaaaaccatttaacttctctcacttccttaactataaaacaggtgtgaggatgcccactacaaacaattgctttttatcaaataagacatcagtaaaaacacttggcagagtagccctgcaaacatatttctttcattattatcaatactactgaaaataaataatcaataataagctacaagaacaagatgcagacaatgcaacaggatacatatgcaccctgtaactaagtaccactggaagaaaaggttcacaactcatggaaatctgtcaaggcaaaataactgtcaccctttttgaaccaccagccaacgaaaaagctaaagattaaaatcaacaatttgctacgctaaatgaagggtcacttagagaaggttgcctgagtcacttactgtgcatgttgagagcccagagtcttccgaagctactctgagtccactttctaaacatgttactcttgtttcaggaacattcagaacaacttgggtagcagcctgtgtacttcttaatctgttctctccaaaatataatgactggttgggggtaggaagtggaagagacaaagcaaaacacattactaatctgatattaaatgttgcttttaaaaccaaatctattttaaataggctgtctctataaaagaatctttcttcttgaattttggttccactgagatctctgcctggcctagaaacatctgtcaccagccactgtcctaaagccagcaacgtgtttataaacatgcccttccctcagggaagatgagcaattattatcattacccagagagaaattgactttatttcactacctctcctagaaatgttttatattcattatggagaaaacaagcaggaaaaaaaaaaagagagggaaactatgtaaaactacctacacacaagacaaaactgacactcgggttttcattgttcaagaaaagcaacagggtttggaaatggttaaaaaaaaaaagagagagaggataggaagatgggtcgatgttcaaaatgcaaatgactggcttttcggccagaaactattcgcctttcagcagtttttctttgcccttatacaaaagtctcacatccctttgcttaaagtcagaggctctctcatgagaaaaatgcaaatacataaaaaattttacttcattgatgtccaggttcgcgggaagcccagctgaggacgaagttcagtcttaggcaaaaatagaactctggagcggtacccatttcactttttagttttccccaatttgcaagcactacgtttttagtggtcaaacatgcactcctcagtagctggcgggaggagccgaaaaccagggtcatcccacacgtcactagcaggtctcctggcgggtggccacaagccagtcacccccggccagttcagcagccccaggccgcctggcgcccggcgggtccgggtcgaggaggccctgcccgacccactgttcggatctgtggcgccgactctcaggtgcgctgcgccgggtctggcgagatctcgaggacaggaccggcctggagggaagctcacccgtcccgcagcgcctcggattagaagactctcgctgaaaccccagagccgccgccgcgccgcggatgacaacaccactcgagccgccgcagccgccatttctgctagaaggaaggtagaggatgaaggatgtgcttccggggtcgcgacctgaggtcccagagcagggaggtgggctccaccttgtggccgtgatgggaatgacactcctcgaagcggttgtgaaagcaatcagggcccgaccatgatgctgagcggtctttaccaaatgaattggggagtctgcagaagcccctttatcatcagttattttatcgatcgcctactaagtgcaaggcacaaatgcggtggaatgaaaggtaacctgatgcaatatatctcactggtggatggaattgattgaaaacagtggaataatattcataagtcactgcctttaaaggaaaagtctagtgggagagacagatgccgtgaggggaggaaacgatgtatccgtgttgaccactatccactcttcgaacctctacaatatggctcatctcattccatagaaattgcccttggtaaggtcactaattgctaaaagttggacactttacagacttatgttacagtcctgttggaggatttgacattgttggcttctttgaaattctcttttctcaatatattctagagctccacctcctcatagttccctctgcaccttcttggactcctctttattcacagatctgttttttgtttttgtttttgtttttgagatggagtttcactcttgttgcccaggctggagtgcagtggtgcaatctcagctcactgcaacctctgcctcctgggttcaagcaattctcctgcctcagcctcccaggtagctgggattacaggcatgtgccaccacgcctggctactttgtatttttagtagagatggggtttcaccatattggtcaggctggttttgaactcctaacctcaggtaatccacccacctccacctcccaaagtgctaggattacaggcgtgagccactgcgcccagcccacagatctctcaaggaactaaaaattgcaaatgcttttctaactcaggtagatggtatagtgcttattttgcaattaagacactgaagtcaaataacttgccccaggttaccctgctagtaataggttaacgccaaagactgtgctgtgaaacactacattttgccctaaaagttggtgtttgccaggactctaagcctcttctactgaacattctccctctgggtttttccctccacttcaagacctgtctgcccaacccaggcctttctcttgagctccagcccacttaaccatcaactactaggaaactacacttgaataccccattggaaactcaatatcaacttgtccaaaagggaattcactgtgtcccctgaatctcttcccatatttgcaatgccaaacagccaatcatacctacatttgcccaaaactccaaaccacccagaagctcctctctttttccatcttccacattcaattgatacacccctttcctgcctcttcaatctactccaggcccattgtcagttttttcacattactacctataggatcttttacaaatgaaactgttacggcagtcccattatgaagaatccatcagggagcccttggtcacaataaagtaaagggtccttagcatggcaggtggggcccttcatgatctgactcccatttatctttccagactcatctccctccacctacccggctgctatgcttcgcaggttcagtccacaagactcatgatgtaatgtaataaaggacgaccaaggttattctctcatgtttctaaaacaaatgtgtgttaaccaaaaataaatacaaacatgcatacatatatacaaaaacatgtaggtataatcacaggaagcacctaggaagttttagcaagaatttgtattcaattctaatatacttcatggtattaatttattagtcattatttacagtcaatatcttagaacataaagcctacagaaattaagtgcaccagagtagagccaagaaatcaaagaatttgactactcccaaaatagccctacacccacaacagtatccataactttttttctttttttttt

SEQ ID NO: 586817 - DNA, 4001 bp, Homo sapiens
ttattattgttattattgttattatttgagacagagtctcaccccgttgcctatgctagagggcaatggcatgagctcagctcactgcaacctccgcctcccaggttcaagcgattctcctatctcagcctcccaagtagctgggattacaggcgcccaccatcacacccagctaatttttgtgtttttagaagagatagggtttcaccatgttggccaggctggtctcgaactcctgacctcaggtgatccgcctgcctcggcctcccaaagtgctaggattacaggggaccgcaaccagccatcccctatattgtagcacagtgaacaactgtcctgaacatcacaagctctttgagacactacagtgtataagcaggtctctgtctaaaccgctctcctcttcctcctctgcccaaacaatgtctgctcaaagaatgtatcccgtgtgttcattaacttagcaatttccagcaaacagtttaattgataacttgttaagagaaggcaggaaacctccatgaaagagaaatcactgggtatttcctacagcatttaacacatcgtaggcctttaataaacccttctgaaataaacaaacctctttactcttcattccaccttgctaagaatctcacctaagtctgtctaccatgtgaaactgcagatgacctcacagaaaatggaaagaagtatctctaaaaataagtttatttggcagcacactataggctacaggtccacttctgatttttttttttttttttttttgagaccgagtcttgctgcgttgcccaggccggactgcagtggcacgatctcagctcactgcaacctccgcctcctgggttccagcgattctcctgcctcagcctccaaagtagctaggattacaggctcccgccatcatgcccagttaatttttgtatttttagtagaaacggatttcaccatgttggccaggctggtcatgaactcctgacttcatgatccacccgccttggcctcccaaagtgctgggattataggcgtgagtcaccgctctcggcccacttcagatatttattttgaggagggagcgcatttagacacagaccccaaatttatttaaatgtctcaatacatttaaatgtagttacctaaatatatctaatatatttaaatgcagagagcaaatttgcgtttacaaatctgacatggaatgcaaatgtgctagccaagattcggtgtagcttaccagccagaaatcacacatcctaacaggtagaaacgtattgcatttttaaaaactgcgcagctatgcaaataaggatgtgtctggacgctctaccgtccccaaaataaccttaattttttaaaaaggccaggcacggtgcatcatgcctttaattccagcactttgaggggccaaggcgggcggattgcttgagctcaggcgttcgagaccagcctgggcaacgcagcgaaatccccgtctctacaaaaaaaaattaaaaataaaatactataaaaataaaaataaaaggggagagagaacaggtagaaaggaaatgcattcagtctatggggatttcacgctcccgcttcaagtccacggccctgtgatgggatgtgggcaaggcctgtctgggacaggccgaacccaactcctcacagggccgaatcctttgcccgcagcccaggaccccgaaggagcttgcctcggcctcaaggcgcacccaaggggcacgagatcgctgcaacactgaggtcgccactccggggcctccagggggctgcctcgccacgcgcctcggccatgttccccccatttccagggaggttggaatgccgtgggtctcaaagagggcgcgcgagaggggacaccggaagactgcgagccccgctcacctcgagctctcagctcgctccatggatgcaacacccgatccgcctcggggactgggaaagttccctccagggctcccacaggcgctccgcctcctgaactcccattggctgctttcgacgttgtgctccaccctttccgggcggggcggcaaaaatacttcccgtctctccttttcgcctattggctctgtcaaaggtcgacttcgtgacgtcaaagagcctgggccaatcagagcacaccggactgcgttttcccgaacgcccgcagcagggtcagaagggaggtggccggtctccgtcgtgacctctgacggtttctgagcgttggcctttggcacgcgctacccccttttgctttggttctgccatgccgatgtaccaggtaaagccctatcacgggggcggcgcgcctctccgtgtggagcttcccacctgcatgtaccggctccccaacgtgcacggcaggagctacggcccagcgccgggcgctggccacgtgcaggtaggagcgcggggccccccgcccagtgcgcacgcgcggcgaccggctgctggcccgggtccccccaggccggagcgagcgcgtcccaaccggttcacggccccaccccggcatctgtgccggccggccagggactcactcagacttttatgttttaaaagatttatccaggccgggcgccgtggctcacgcctgtaatcccagcactttgggaggccgaggcgggcggatcacctgaggtcaggagttcgagactagcctggccaacatggtaaaacctcgtctctactaaaaatacagaaattggccgggtgtggtgaggcgcctgtaatcccagctactcgggaggctgaggcaggagaatcgtttgaaccctggaggcggagtttgcagtgagctgagatcgagccattgcactcgagcctgggcaacaagagctaaactctatctcaaaaaaaaaaaaaaaaaaaaaaaaaatatatatatatatatatgtatgtatctttccaggtcgggcgcggtggttcacgcctggagtctcagcgctttgggagactgaggcgggaggatcaattgaatcccaagagtttgagaccactctcagcaacatagcgagacccttgtctctattttttaaatgttttaattaaaatacaaatctgtccatattttttctttttttaatatatggttgcttaaacattttggttcagagattctaccctctgaaaagtgaatagcacataaatgctcattttgaggaattacaaagcgaaccccagggtcaccatggcccaggttgacacacattgtcaccactccattctttccacttaaaccttccctctccacccccaaccccaggtcctgatttttatggtaattatgtcttgcttgtctctattattttgtcaactatttatccctaaacaatatagtctggttttttgtttttttttttgtttttttcagatggagtctcactctatcacccaggctggagtgcagtggtgtgattttagctcactgcaacctctgcctcccaggttgaagcaattctctgcctcagcctcctgagtagctgagattacaggcgctgtccactggacccggctaatttttctatttttggtagagacggggtttcaccatgttggccaggctgatctcgaactcctgacctcaagagatccacccgcctcgacctcccaaagtgttgggattacaggtgtgagccaccgtgcccggcccctaaacaatagtcttcatataggtaagcatacagcgtatagtctgatgtgtctgggtgtttttttttttttaatgtagagatgaggtcttaccacatctctacataaaaggtggttatggagacccaaggtggtctcaatctcctggccacaggcgatcctctaaccccagcctcccaaagtgctgggattacaaacatgagccactgggtcccagccctggcttctttttcgtagatattattttaggagtcattttattgtaatatcagaagtattcatcatctctgtactataccgttctattgcatgactctccaccatatacttatccatcctgcttgctcagggacactgga

SEQ ID NO: 586818 - DNA, 4001 bp, Homo sapiens
cgaaactctggtttagggagagcgacaggggtagagccttgagtgccacccagagctaggaagaggaagaaaagactctaaaggaaacaaaacaggagaaaagccaccctgaaaaaatcaggacactgaaaaccaagacaggaccaaattttttcaagtaatggataatgaacagaataaaatacttgagtactgcagagaaagataagaactaagaaatgactggccaggtgcggtggctcaggcctgaaatcccagcactttgggaggccgaggcgggcggatcacctgaggccaggagtttgagagcagcctggccaacatggggaaacccgtctctacttaaaaaaattagccgggtgtggttgcgcacgcctgtaaatcccagctactcgggaggctgaagcaagagaatcgtttgaaccttgcagtgagtcgagatcgcaccaaggcactccagcctgggcgacagagagagactcccaacaacaacaaaaaatggcaggacaggaaggtgtctatggctcagcattctaactctgacctttttacaaatatatattccatgagtgaagcaatatgcagcttcagcacaacccctctaactggggtaaaaaaaaacaactcaaagtacaggctgttcttgtaacaactttgcatgtgaaacaagtgaatagctaaactagtgaaactggccctttcattcaacatcactcattaaaagggcgtttacaagattttaatttagtcctgatatagaaataaaaaaagagatcaacattaagaaaaagttgattataattacgaaataaaaacatgttcttatattgaaaggacaactaatttgcataagcaatttaacaaaatagctaaaatgggcttgatacaactgcctcacaaggcataagctcttaatgtttcactgtttaacagcattttcttaatacactgaaacatttgtcatttttgaactctcagaaattaggactgcagaaccaggatacaactgttttggaattgaaaacagtattttaagcaggattatatgatagtcccttatgtcacaactctcctgagtttttcctatgagtcaccattttaaagttatcattgtattaggcgtggaaagcaggttccttccagcacaatgatagaaatgacacagggataggaagcactgcaacacagtgattcatacaccttatccacttaagcaacagcggtcaaggatagaatcaaatgtggatggggtcagaaagagattactgacaaaaaatatcaggcagtagaatcaccaggtgcacactgacagtcgagaatgatgtagactagggaaaccctcctgagagtgaccagttaactactggagaacactacagtccaggggaaggcagacagactctggaaaattgaggagggagtcgtggggatgggacagggggagcagggcgggacctgcgaaaccaaatacggtttgcgcttctggggcagcaaagcccacgggggcggagggcgccgagtaccaatgagctccaggacctgcgggctccttccagcgccagctcctccccaaagcctggcgtgtccccaccctctcgctcgggaagtgccctccaaagaaagaaaggacgacccggagcgccggacaagggtccagaacgatcaaccagcctcctatcgtcccgcccctgtcccctcgcggctacttaccgggatgcaggccgcagtcactagggctgcagcggcgactcgctcgttcccggcaatgacgtccactccaaccggcctgcatcagctgagcttccaacacaaacactggcgcagcagctaggtcgccacccactcagccccgccccgctccgcccccagcggaagtgacgcgctagaagtttgggtctacccgcgggccggggtgaggattttccgcctcgctcaggcctctgcctccttgtcaatctccgttcctcccccgccccgagatatgcgcaatagagcatgacggagcgcaaggcgggaagccgcgacagacgtgtgtgcgtgcgtgcgtgcgtgcgtgatgcgcgaggcgtggcttgctggtggggcgtgctgtgccttggttggttgccgggtgtgagagcggtgggacttcgttttgccttcctgggcgggacctcggagcagtgtcctggtttgcttgtttgcgggccgctattccctttcagcagagataagcctccctctccgcgtccctgaagcccctgcctgcgctgagttccttggagctgggggctgcgataccagtctcttggagggtggtgcccggcgcggccgcgcccctttctctatatccattcctgggcatggccacccagactaaatgtcactcaaaagcgagttgacatatattactgtattggaagttagcataaaccgccccacaaatggtcccacacgtaacacatctttttaaaattgtggcatttcatacgtaccacaggggcaaactacagccctcagggcaaatccagcccaccgcaggttctgctgtactaggagctaaaaatgggtttcacatttttcaaaggttaaaaaaaaagttttgcgacagatgacaattatatgacattcatatttgtgtctgctttttaaagtttcattagaacatagctttgcattcctatacatgctgttaattaaagcttttatactacaatagcgaatttgggtagttgcaatagccccttaccctcttgaagtgaccttgcaattacgttgaggtcgggaaaacagatcagtttcaactagttatcaacctcaaaatgttatcaagacttatactgtactctcaaggcttacccactacccatgggtatgtatgctttagccccctgtaaggttattgtaaagtccttaaggaaggggattctttgacctgtcaaatgtagtggatgttaccctgatagttgtgttgttttgatttttttaaatcaaggagggaaagccagcttgctatgttcttgggacacagtgtctggattatgtacatcataatgcctggtaaaccccagcagtggataagccagacatgttatttagctacaggagagttaaaagatgtatgcaccaattaagccttacaggcgtgtggaaggagctttagtttttgagacagattcctccttgttgctaaagaaaaattattctgacacttgttaaaatgtcaaggaagacatttagaactattgcaataggtgccatgactatcaccatgggggagagagattggcctcaagttttaatacaacaaaaacagctaggatttataaccagcaagcagactgaggggtcagttcatggaaaattactaagaagtgatatcaagggtcggggatattcttgttaaagtgacttacaagattcttgctgaagacaggcggagatgatcaattatcaaggctaggagatactctctaaactgactttgcaagattcttgctaaaactggactcagcaggcctaagacaggggcccaaggatgaggcctagttgggaagagggctcagaggagcctaactaaagtatggtcaaggagagagcaccaccattccctctccgcttatgctctttcatcccctaatttagtcagatgttattaaatatccagattttcctcccatgtcagaaattttcaaataacgcccaattcctgcttctccattcttatccttcctctccctcccttgtctaccaccatacctttaatcagtcatgaagtctgatgagttttaccgcagaatttcttgaatcgttcctctgctccacattcgcatttccactgctctagttcaggctttcatccttgctcttcagtttcatctaaactggttttccagcctgtaactaacctctgacccagtcagtctcttctgtgcaaccacggtaatcttttgaaagtgcaagtccaatcgtgttttcccgaattaaaaagcttttgctggctgtacatcttcacagaatat

SEQ ID NO: 586819 - DNA, 4001 bp, Homo sapiens
tcagccccgccccgctccgcccccagcggaagtgacgcgctagaagtttgggtctacccgcgggccggggtgaggattttccgcctcgctcaggcctctgcctccttgtcaatctccgttcctcccccgccccgagatatgcgcaatagagcatgacggagcgcaaggcgggaagccgcgacagacgtgtgtgcgtgcgtgcgtgcgtgcgtgatgcgcgaggcgtggcttgctggtggggcgtgctgtgccttggttggttgccgggtgtgagagcggtgggacttcgttttgccttcctgggcgggacctcggagcagtgtcctggtttgcttgtttgcgggccgctattccctttcagcagagataagcctccctctccgcgtccctgaagcccctgcctgcgctgagttccttggagctgggggctgcgataccagtctcttggagggtggtgcccggcgcggccgcgcccctttctctatatccattcctgggcatggccacccagactaaatgtcactcaaaagcgagttgacatatattactgtattggaagttagcataaaccgccccacaaatggtcccacacgtaacacatctttttaaaattgtggcatttcatacgtaccacaggggcaaactacagccctcagggcaaatccagcccaccgcaggttctgctgtactaggagctaaaaatgggtttcacatttttcaaaggttaaaaaaaaagttttgcgacagatgacaattatatgacattcatatttgtgtctgctttttaaagtttcattagaacatagctttgcattcctatacatgctgttaattaaagcttttatactacaatagcgaatttgggtagttgcaatagccccttaccctcttgaagtgaccttgcaattacgttgaggtcgggaaaacagatcagtttcaactagttatcaacctcaaaatgttatcaagacttatactgtactctcaaggcttacccactacccatgggtatgtatgctttagccccctgtaaggttattgtaaagtccttaaggaaggggattctttgacctgtcaaatgtagtggatgttaccctgatagttgtgttgttttgatttttttaaatcaaggagggaaagccagcttgctatgttcttgggacacagtgtctggattatgtacatcataatgcctggtaaaccccagcagtggataagccagacatgttatttagctacaggagagttaaaagatgtatgcaccaattaagccttacaggcgtgtggaaggagctttagtttttgagacagattcctccttgttgctaaagaaaaattattctgacacttgttaaaatgtcaaggaagacatttagaactattgcaataggtgccatgactatcaccatgggggagagagattggcctcaagttttaatacaacaaaaacagctaggatttataaccagcaagcagactgaggggtcagttcatggaaaattactaagaagtgatatcaagggtcggggatattcttgttaaagtgacttacaagattcttgctgaagacaggcggagatgatcaattatcaaggctaggagatactctctaaactgactttgcaagattcttgctaaaactggactcagcaggcctaagacaggggcccaaggatgaggcctagttgggaagagggctcagaggagcctaactaaagtatggtcaaggagagagcaccaccattccctctccgcttatgctctttcatcccctaatttagtcagatgttattaaatatccagattttcctcccatgtcagaaattttcaaataacgcccaattcctgcttctccattcttatccttcctctccctcccttgtctaccaccatacctttaatcagtcatgaagtctgatgagttttaccgcagaatttcttgaatcgttcctctgctccacattcgcatttccactgctctagttcaggctttcatccttgctcttcagtttcatctaaactggttttccagcctgtaactaacctctgacccagtcagtctcttctgtgcaaccacggtaatcttttgaaagtgcaagtccaatcgtgttttcccgaattaaaaagcttttgctggctgtacatcttcacagaatataccgaatgaaattataggttctgaccctgctgaccttccagcctttactttcaccacttgcctctcactctctatcctccagccacacctgtacttccccagatactcttgttccttttcatacttagtgccttggtcatgctgttggcttagctccccttccaccttgtcctcctaaagatttgtttgtccttcagccaggaaaatcttacctcactactcatagaatgaatcattccttccacctgtgctcacttctcttattgcccttgctgcacagtattataatttatttgtttatatgcctgccagtttcctgcagtcaaggagcgtaaggtaaactgtattgtctggatctagcgtaacatccaacaaatagtagactctctaaaattctgtattattgaattgatttttagtttcatttagattactagtttgataagttaaaaatggaaaataaaacccatttatgattcttttgatgttgggcagttttgagacaaaagagaattatatttaatttcaaacaaattcagtagtatgcaaaattggagattatcttgtgtataatagcagactaatgccttcaggaaatcatctatacttgaaataatgctaaatacagtaattgttcaacgctatattctttggaagctgggtaaaagagacatcacattgccctgtatcagttacttgctatgctcattctatttataaggtttattattgatttatctattttagctcttctacatccatagtcactcctttctggtctggttcatagctttttaaaagagctgctaatatctttattgttcaaataaaacttaacattataaccaaaataaattaagccatattggtgcaagatatctctccagatcacctaagggagggatatgccagaaaataattctagaagaataatcaccatggtaggctgaagaatggccttctaaaaaatgcccatgcccaaatccttagaacctgtgaatatgctactttacatggcaaaggggactttttgcagatgtaattaagggtacagattttaagaaaggaaaataatcctggattatctctgtgggcccaatctaatcacataaatccttaaaatcagtacagatgtggcaaagcgaaagtcagagagatcaagataatgagaggaacaatttgacaaggaatgcaggttgccatagggaaccaagagcggctcctgactgacagccagcaaggaaatggagacctcagccacacagccgcaaggagttgaattctgtcaacaacctaaataaaactgaaagcacactcttccccagaggtaccagacaaaagctcaggtaagctgacaccttgatttcacccttatgagacctggaacagaggaaccagtcaactcttgctggacttctgacctacagaactgtgacataataaacttgagttgttttaagccactaaatttgaagtgttttgtttcagcagcaataggaaattaatataattatctttatatagtttgaaaacatgaaagcaaggattttctgttttgatccttagcaccaaggcacagcaattattaataaagtgtggcccggagcgttggctcatgcctgtaatcccagcactgtgggaggcagaggcgggtggatcacctgaggtcaggcgttggagaccagtctggccaacatggtgaaaccccatctctgctaaaaatacaaaaattagctgggcgtggtggcgggcacctataatcccagctactcaggaggctgaggcaggagaatggtttgaacccgggaggaggaggttgcagtgagccgagatcgcgccaatg

SEQ ID NO: 586820 - DNA, 4001 bp, Homo sapiens
ccactggtgacttatgaacatttccttttagggcagacagggagggtcttgtcccacagtgcctcccactcctcaaaggaagggtggctcagcttccttaagctcagaagcactagggactaacccctctttcctgacacagcccaacgcccttctgggtggttctaagaggcttcccaacaaaaggttcgtatgaaggcccaccctgaagtccagctgtccccagagtagggctaaggagccaccatactctcgtgtcatctcaaccctgcatgtcgtgtggctcttcagtgattgccactctgaaagctgttctgactgttcctcacactgcagcccctcttccagggacacacattcttccccccgccgggaccttccctttctagtcaggctggtggagtctcccgccggccacaggaggatgcccacgcctgcctgctccctgagtgccagcgcctgcccactaccaaaggtttcctgcggtgcagaggagagactgtactgcccttccatctcccctggccccttagagtccagtcccaaactgccggcacctgctcacagcagaatccctaccctgtctgtgctgtccccgcagtcctcctggccctagggtgatcacaccacctcagctcttcctgcagacatgtgctcaggtgggcaaaagagaatgagaaatgcacctctcccgtggggctgagctgactctggctgttccctaggggcttaagaacacctgttctggttgagtttgcagccatcgcctgtcccccaaaagggaaagagtaacatttcaccttgaaaagaaacagggaggggatgtttctgaggtgcaggtgtttcatgagagacaggtacattttctaaggtgtgtctaaaatgcagcccaatcctattctacgagagagaagttcccgtttgaacaagttcccgtttgaacaagaggattcgaggggggtctcaccatcgtagccacgcactaagaagcgattgttttagggacacggaggtaggacccccactcagccaggtgactctgggactgtggaaggtccacttacgactctgtacctgccccagcacgggctcaaggagttgagcctgcacacattacttagaaaaaacctctgcaaacgggtaagtacatcgcccgcgtgggccgtggctggaggcttgtcacctgcttcagggacttcctcgggagcctctcgcctgcctctttgcctggaattaacgaatacacactacagcccctcattccctccaacacgaaggaaaggtgtaatcagatcccgagagtcccgcagaagcgtggagcctcgcggtgcggtctcccttttctttcccatgcaaacccacttagcaccggcgcgcccctgtttgcccgggcagaatccaccgcccactcctcccgagtggagagtggagacgaatctacgcccaggccctgcacctgccgcgctgcggagtttggagggggcgtggatggtgcaaggtcagggctccgtgtgtgaccccggcggtgatagggctgctcggggtcggaccacgcggcgcgccgggcttccctgcagctcggccgggcagggggcacatgggcacggtgggagtcccggcggaacccaggccggccactcaccattctgggagggcgacggcgacggcgacggcgacgacggcagcagcggcggcgttgacaacagtagcagcagcgccgagagcgccagcgcgcagcgcatcgtgtcgtcgcctctgggccgggagcaggtggctgcggtgccggcggaggatccgcgcgtccgggcggtaggagcgtgggcgccgcccggggaggcctgtgggtggctccggaggccaggctgtggcccggggctcccgagtcgcgctgcggcggctcttcctccctgccgctgcagcagagccgggctggggcgcagagccagtggcagaggagcggcggcggcggcggctgcgtcctgggcggcgtctgcgcggctgcggccccactggcggctgcggctactcctggcccgtcccgtcagcgccggcccccgcccccgcccccgcccctccccctcccccaggagcccgccagcggcggcggccgggccgggcggggccggggccggggctgggcgggcgctgggccgtgaacaatgagcagaggaggaaactccgccctggagcgcgacgggcgggagggccggcggcctccgcgccttggggggctgtgtgtgcgcgggggccagggcggggggctcctgcggtgcagccgggccccgtccacaggtgtcccgaacaggtgtgtccccccgagtgcttctaagtgggcccggcgggatcccccagcacaccgccggggccctcgcactacgagcaaatccggagcgggcggacccccagccttgcgtggtaactgataaccattcacggcctcccgggctgctgcgcgttctgcagcgaccccggagaagctcatctcccacctgccaagtgcaattcacctgcctgtggggcccccatcccgcacggcttctgagcggggtctctctgcagctaggtgtgcagcgggcaagctggactaattcactccttcacctctccaagggtaggttccttacctgtgaaatggagatgatggttaaaaaacaacagcaacaacaatttcagggatgaatgtgtgccaggctttacatatattaattcttttactcttcatgacaaccatatttttagcctcattttgcagacagggcaattgagtcaaaaagaggttaagaaacttcctgaggccacataacgggtaagtggcaaacctgcctctgagagaagtttggagaaataccgtgcaccgtgcctggaatatagtaattgctctgcaaggagtggttattactcttattcctgctatataaagaacagctataaagattagggcttttgggtcaaaacaggctggggctcaaaacctaactgtgccaatctattaattgtaaaaccctaggcaagctattctcagtacctcatttctttttatctgtaaaatagggataataacacctacctcagggggttgttgggaaacttaaatgtgatcttacaagataatacttagcctagggccaggaacacaaaagtctcaatgaatgaagtagttcgccctccaagtgaggatcagagatatttgcacactgggggtgggagtgggtgttggagaattccgtaaactgagtttatccggtgaaagaacaaagaagttcctttcccctcccccgctcccctccttttttccacccccaaagctgcctgggagacgcagaccccaggcccgcctgaagaggaggcacatcggcggagccgggaagcggagggggcgaggggtgattaaccttggaacccgggtacggcgtaaatttggctcacgtgactccggggttgctaatctggagtctatctgccagatggggctgggtggaggggttttctccaggatctagccgcgtcccgggcacaggggactccgtgagcccctcaagtcggctgcaagcaggcgatgcctgcagggcactgcgtccctggagccgcgaaggaagcgctggagccctggctggggttccgtggcagccggcctcaagcttgggaagggctgacggggttgttttcatcaggaagtttctgcaggatcgttctggccccgttttccacaccgcatatgggaaagacagagggtgttccctatgaatactctgggatatttgtgtgtgtgactatctttgatgtttttttagtactgttcccctgatatcatgtcaacaaaaggcttgtttctcttctgaaaccaagcaatatatatatatatttttttttacactgggattttaaaaaatgtgtatcgcactctgatttaaacagtgtttttgcactcaatcattcaatttatctaaaaactcagaagcaatcatgttaactttataaagagagagcgtatattttgaagc

SEQ ID NO: 586821 - DNA, 4001 bp, Homo sapiens
tctgccagtgaagtaatcgccatcaccgccagaactaagtcctcatctccaaccagcctctgaactaaaactaactccaaacccacaaattacttaatttaatccttgttactatcttaagaagaaactgagggaaaaagaggttaattttcccaaggtaacaggaagtgggatcaattagataaactgttcccattctcttgcagaacacttctaagttcagggatgctgtgggggaagcaccttcccaaactctcacttaccccagtgctgctgggcccggttctccaggaagggtctcatttggatgaggcgggtggcataaatgtgggcatactgccggctaaagctgcgctctcctagccggaagggttgtgaggagttggtgtaggttgccactggcacccgggcaaaggtggcattgttggctgatggtggggacagtagagtgtgggccctctgggcagcctgctcagaaaacatggccacactcctgacttgcttggtccacacagcttcgcccaggccaaggaggttcactgcgaaaacacaaaggcattcctgctgcccctgtccatcccccaaagcagcagctctcctggtgtctcactgcacccaaaggatactgggaaaagaaggagaacagctgtagttgacaccagacattgtgtccacttggaaatttatcgtgcctggataccgatgtctcaccctgtagcggtcatccaaaaagagaaaaggaaagctaggagtgtttgtcccatctggagttcttcccgaaccctagactcaggtgtcctgttccatctggacaactaccagggtctcaatcaagttcagtttgccccaaatggaattcccgatctgcctccatccagctctccggcacctgtctcatttccagacaagaggtctgccttattaaataaaacttctgtgaaataataagcctattattaaataataatagaactaaaccaaaaccaaaacataaatcagtcactgctctgttcaaaactctccaaagtgtcctcatttcattgaataaggccccaagtccttacaactgcctatgagatctgctccactggtcctctcccctcctggttcccactcctccaccttggatccctccccacagcaaggggcctctgaactcttgcttgcccctctcccgtatacttatagagctcacttgcccatctccttcaagttcttacatctttactcaaatgttaccttgtgccctgcccatctgatttacaactgcaactctccccagtacttcaactgttattgttgtttacaacatttaccttctaacaaactgtatattttaaatgtattgtctgcctgctccaactagaccataagctccaggagagctgagatttttgtgtcttatgccactagccacctagggctacgaagtacaggagatgtggtgagtccaactgtgatgtttgggttggacacacaatggatttctaagaatagtacaaagaatatcccaataattttttcacatacaattgaaataatagtttgaatatatttatggatttactccaattgatttgtttcgttttacttttttcgtacacctactagaaagttaaaaaattccctagcggcttgcaatctatctccacgggacagcactggcctgggacacaggctccgcacacgtgtctaacgagtgactcgttaggagcttttggctcgaacgtgcttgatggcggcagcagccaggccgcgctactcgggatggggccgagagcgccctgggggctgtcccagtcacggcgggtgccccggctcggatccacgcggcagctgcgggacgtccgccaagacaccagcccaccgacccaggagcccggcctcgcggcctggaactgccacccccagctgaccccgtttccctggaccccactcaccgcgcggcgcgccgcatcccgccaatccccgcgcgcctgccccgcccatcgccgcaactcgctaatccccgcgcggcttccccgcccatcgcctaatctcaccaatcgctgccctcctcgccccgtccgtcaccaggcgcctcatcccgccgaccactgtgcgcccagtccctgggacgcccagagaacgcggagccacaccctcggtttcctgggcaacgcggggcgggggctcgcaggccggcgccgcgggtctttggttggcggccgcgcgtgcaggggttgggctgacggggggtgtcggcctccagtgggctgaccgcgtcaccccgtcaggccctgcccaaacctcccagtggtcgtcaccccgccagacctcccagtggtcggccgccagcctccttggtgaagcccccagcgtcccagctttccccgcagagctgcccacttgtagcgatggcgacacgcgaggaggatcccaacagaaagaaggcccaaggcccactaacttggccggggagaagtaactcttcctgaagggatggcgcggggtctcggggttcctcccgtcctgccagcgtctgcgtccgggaaacgcattggcggtttcggggtcctccctagcttgcccacagctgcacaccagcttccagcccaacactccccaatctccagtgtcctcgttgtccccgttactcatactcgttcttaccaccacgtctttctgagtgctgtctcccactttgggaatacttttttttttttttttccatctccactaatttatagaattcctcaccccatcaagagacgcttccccactaagcttcccgggctcttcccgccgcgcgctgattctcccaggcgtcctctagcgctactgttctgctacttccctgggcctgtttcctaagtccaggtcttgtctccacaacgagtggatattaacactcgttaattattacttaatattttaatttttgtttttgtttgtttgtttgaggcagcgtcttgctctgtggcccaggctggagtgcagtggtgcgatctcggctcactgcagcctcgaactcccaggctccagtgattctcccgcctcagcctcccgagtagctgggacaacaggcgcgcagcaccacgcctggctactttaagtttgtgtgtgtgtgtgtgtgtgtgcgtgtgtgtgtagagacagggtctcccaatggtgcccaggctagtgtggaactcctgggctcaagtgatcctcccacctcagcctcccaaagtgctgggattacaggcatgagccaccacgcccagccttatattttaatttaaaatgtgatattttaattattaaacgcctttgcaactgctttgaggttatgacacattaattcatctgctcctcaaataatcctttgggtcagacacagtggttcacgcctgtatcccaacactttgggaggccgaggtgggaggatcgcttaagcccaggaggctgaggttgcagtgacctaagattgcaccactgcacttcagcctgagcgacagagccagacgctgtctcaaagcaagcaaacaaacaaaaaacctttgaagcatgaactattatttttctcccactttacacatgaggaaattgaggcagggagggcaagagagatcatgtagctagtgagtaatagctgggattcacacagagacagcaggactcttgctggtaaggttgtactgttctgagccttcacctgaaacattgtacatgtattgggcaaacaaataattttactttttcctttccaattcagatgctttttatttcttttttcttacctgattactctggctagaacttcccatactatgttgagtagaagtggtgaaagtgggcatctttgtcttattccggatcttaaaggggaagctttcagtctttagcattaaatatgttgctagctgtgagtttggggatttggcctatggattttattatttgaggtagtttcctcctattcttagtttgttgagctttttcttctttcaaaagagtgttgaattttgtcaaatactttt

SEQ ID NO: 586822 - DNA, 4001 bp, Homo sapiens
tctggctacagcacaggcaaatacctgaataatctgcactgaagataggaaaaccattttcctctgccagtgaagtaatcgccatcaccgccagaactaagtcctcatctccaaccagcctctgaactaaaactaactccaaacccacaaattacttaatttaatccttgttactatcttaagaagaaactgagggaaaaagaggttaattttcccaaggtaacaggaagtgggatcaattagataaactgttcccattctcttgcagaacacttctaagttcagggatgctgtgggggaagcaccttcccaaactctcacttaccccagtgctgctgggcccggttctccaggaagggtctcatttggatgaggcgggtggcataaatgtgggcatactgccggctaaagctgcgctctcctagccggaagggttgtgaggagttggtgtaggttgccactggcacccgggcaaaggtggcattgttggctgatggtggggacagtagagtgtgggccctctgggcagcctgctcagaaaacatggccacactcctgacttgcttggtccacacagcttcgcccaggccaaggaggttcactgcgaaaacacaaaggcattcctgctgcccctgtccatcccccaaagcagcagctctcctggtgtctcactgcacccaaaggatactgggaaaagaaggagaacagctgtagttgacaccagacattgtgtccacttggaaatttatcgtgcctggataccgatgtctcaccctgtagcggtcatccaaaaagagaaaaggaaagctaggagtgtttgtcccatctggagttcttcccgaaccctagactcaggtgtcctgttccatctggacaactaccagggtctcaatcaagttcagtttgccccaaatggaattcccgatctgcctccatccagctctccggcacctgtctcatttccagacaagaggtctgccttattaaataaaacttctgtgaaataataagcctattattaaataataatagaactaaaccaaaaccaaaacataaatcagtcactgctctgttcaaaactctccaaagtgtcctcatttcattgaataaggccccaagtccttacaactgcctatgagatctgctccactggtcctctcccctcctggttcccactcctccaccttggatccctccccacagcaaggggcctctgaactcttgcttgcccctctcccgtatacttatagagctcacttgcccatctccttcaagttcttacatctttactcaaatgttaccttgtgccctgcccatctgatttacaactgcaactctccccagtacttcaactgttattgttgtttacaacatttaccttctaacaaactgtatattttaaatgtattgtctgcctgctccaactagaccataagctccaggagagctgagatttttgtgtcttatgccactagccacctagggctacgaagtacaggagatgtggtgagtccaactgtgatgtttgggttggacacacaatggatttctaagaatagtacaaagaatatcccaataattttttcacatacaattgaaataatagtttgaatatatttatggatttactccaattgatttgtttcgttttacttttttcgtacacctactagaaagttaaaaaattccctagcggcttgcaatctatctccacgggacagcactggcctgggacacaggctccgcacacgtgtctaacgagtgactcgttaggagcttttggctcgaacgtgcttgatggcggcagcagccaggccgcgctactcgggatggggccgagagcgccctgggggctgtcccagtcacggcgggtgccccggctcggatccacgcggcagctgcgggacgtccgccaagacaccagcccaccgacccaggagcccggcctcgcggcctggaactgccacccccagctgaccccgtttccctggaccccactcaccgcgcggcgcgccgcatcccgccaatccccgcgcgcctgccccgcccatcgccgcaactcgctaatccccgcgcggcttccccgcccatcgcctaatctcaccaatcgctgccctcctcgccccgtccgtcaccaggcgcctcatcccgccgaccactgtgcgcccagtccctgggacgcccagagaacgcggagccacaccctcggtttcctgggcaacgcggggcgggggctcgcaggccggcgccgcgggtctttggttggcggccgcgcgtgcaggggttgggctgacggggggtgtcggcctccagtgggctgaccgcgtcaccccgtcaggccctgcccaaacctcccagtggtcgtcaccccgccagacctcccagtggtcggccgccagcctccttggtgaagcccccagcgtcccagctttccccgcagagctgcccacttgtagcgatggcgacacgcgaggaggatcccaacagaaagaaggcccaaggcccactaacttggccggggagaagtaactcttcctgaagggatggcgcggggtctcggggttcctcccgtcctgccagcgtctgcgtccgggaaacgcattggcggtttcggggtcctccctagcttgcccacagctgcacaccagcttccagcccaacactccccaatctccagtgtcctcgttgtccccgttactcatactcgttcttaccaccacgtctttctgagtgctgtctcccactttgggaatacttttttttttttttttccatctccactaatttatagaattcctcaccccatcaagagacgcttccccactaagcttcccgggctcttcccgccgcgcgctgattctcccaggcgtcctctagcgctactgttctgctacttccctgggcctgtttcctaagtccaggtcttgtctccacaacgagtggatattaacactcgttaattattacttaatattttaatttttgtttttgtttgtttgtttgaggcagcgtcttgctctgtggcccaggctggagtgcagtggtgcgatctcggctcactgcagcctcgaactcccaggctccagtgattctcccgcctcagcctcccgagtagctgggacaacaggcgcgcagcaccacgcctggctactttaagtttgtgtgtgtgtgtgtgtgtgtgcgtgtgtgtgtagagacagggtctcccaatggtgcccaggctagtgtggaactcctgggctcaagtgatcctcccacctcagcctcccaaagtgctgggattacaggcatgagccaccacgcccagccttatattttaatttaaaatgtgatattttaattattaaacgcctttgcaactgctttgaggttatgacacattaattcatctgctcctcaaataatcctttgggtcagacacagtggttcacgcctgtatcccaacactttgggaggccgaggtgggaggatcgcttaagcccaggaggctgaggttgcagtgacctaagattgcaccactgcacttcagcctgagcgacagagccagacgctgtctcaaagcaagcaaacaaacaaaaaacctttgaagcatgaactattatttttctcccactttacacatgaggaaattgaggcagggagggcaagagagatcatgtagctagtgagtaatagctgggattcacacagagacagcaggactcttgctggtaaggttgtactgttctgagccttcacctgaaacattgtacatgtattgggcaaacaaataattttactttttcctttccaattcagatgctttttatttcttttttcttacctgattactctggctagaacttcccatactatgttgagtagaagtggtgaaagtgggcatctttgtcttattccggatcttaaaggggaagctttcagtctttagcattaaatatgttgctagctgtgagtttggggatttggcctatggattttattatttgaggtagtttcctcct

SEQ ID NO: 586823 - DNA, 4001 bp, Homo sapiens
ggccccctcagccccttctgtggttcctctactggtttatagggggcccctggtgatctgggtagagtcttcactgcccacctcctctgaaggacattgaggcattgctgccatgtcacctgtcccagctgagcaatggcctacactggggctttcactgtagcccccactttagtcttccacccagctcacctccaggcggtgccggcactccacaggtacaggctgcccagctcccaggctctctgttaaccagcttatgtccagcagagctgggggggtgcaacccgggggagcagctgccatcctgcgctcctgccagctgacggcctcctctgctgaggtctcttccatcacaacatgtgtcgcttcggagctggtggagggagttgggagagaaggaggagggtgaggcccagagcccgtcctggttggctccaagccttcactcttgccgtcccttctgcatggtaagtgaccattcatcctgcaaacgtcacctcctccagaaagccttcccagcccctcctcctggtagatgaacacctccaccactcagccctcagaaccgtagttctctgccctggctatgttcacaagcacagcccagtcttgtgctctctccctccctcttcacctcaaagaaaggaattccttagggtcaggaccaggtggtcttcatctaagagcaagggtttcagcagagatggaggagcctgtttgggtctgaaccccagctctgcctgccacatacttgtttggctcttgggcaagccacgtgtctatactttgatttcctcttctgtaaagcagagataacatatccaccctgtggggttgttgtacaaagatagtgccttgtacactctaagctgctatcatcctctcctgagtgggtctggcgcactactgatccctggtaatgttaaaaaatcaaacacaactgtgggggaatactagccccaggttcgtttgctctctcaacctccaaactagggggcacccccagctcccttactctgggtgttgtctctgtagccgccattttttcttctcttggttcccttcctacaagagcttctcagtcgtgttatttactcaggcctgaggacagaggagcctgcgggctccgggcctcttgagaagtcagtctcgctcacaggtgggacatagcccaggcagaagggctgttagcaaatacgactttttttttttttttttttgagacagagtctcactctgtcgcccaggctggagtgcagtggcgcgatctcggctcactgcaagctccgcctcccaggttcatgccattctcctgcctcagcctcccgagtagctgggactacaggtgcccgccaccacctccggttaattttttgtatttttagtagagacggggtttcaccgtgttagccaggatggtctcgatctcctgacctcgtgatctgcccgcctcggcctcccaaagtgctgggattacaggcgtgagccaccgcgcccggcctactgcttattaattacccctgacctctggttttgattctcgcagtgatcctttaaaacacgcctcgccctaattaatagcaccctttacagaagaggagatggaggctcagggaaaggtcacaagaccacgaagtgccactgcaaacttagaatccaaaaccagaagtgccatggaagccctcgccgcgccgcgccgccccgcacctgcaggcgtcaaggacgcggaagcctttggagcgcgccaggcctgtgaggaaggcccggcggctgcgacccatgcgaggctcgaccaggtagatggcgactcccgggaagcgcgtcgagggcggcgtggaggaagcggcatcgccgctaggggacccgacccgcgctcgccgccgtttggggagcattgggacgacagcctccagcagcgcggagcgaacgcagagggaaactccgagcgagacggaaggaagccccagtgaggctgacggaagcgggtgggcgggcgggcggccgccggctggaagaggacgtggccccgccctatgcaaatgaggcctctccgtggggctcgctacttgggccagtcggagcgctggggagggtccgggctcctacaggattgggtgtcccggccgctccggaagacccgcctccatgcaaataacggcagaggacccgccttttatttaaattaatgtctcggaaagcgctgttcggccccattggcctccgggaggagaggctgggctggagcggggcggggagggtgttggagggggtggaggaggcggggtcaagggggcgtccccggctagggagggtgaactgggacctaggcccgggcggagcggggtgggctgtgtccttggcgccggggctgggtctagggttgagccggcggctcggggcggacgcgtgcgggctgtgcccgatccctctgcgctcgggactgtcacacggaagccggcgggcgcaggaccgacacgcgggtttccaatgcgctggtggggcggtcgcttcaaacacgcgggaagatttttcagtcgaatggcattaggacaactggcaggccatttggaaaaatagaagttggtgcccttcctcattccttaacaccaaaataaattccagatgggtcaaacatttccatctaaaaaggaaaccaacaacgtactggaaaaaagtcggtgaatgtttttatgatctaaatatcacaataaacttggaaacactaaaggaaaagaatgataaactggactacagacaaattttaaatctgattaaaaattagagtcagaagataaactgggataaagtgtgagatattttggaattaagattatctcatgataatcttatcaaattgtccatagataaaaagacaataatttaatagaaaaattagcaaaaaaactcacgtagatgattcttagaagaaatcctggtcaataaatttatgaccagagtgcccaacctgtccagtcgttacagaatacctaaatgagaatatcttcagttgtgggtttatcaaacattcaaaaaaattgaccacacatgttgaaggtgcgaggtaattggcaatccataggaaggactgtggaagccaatgtggcaaccacatccaacaaaatgaaaacaaaataatacacattgatccagcaattcctttcccaagattgggattgcattgaatctatagatcaagctggggaaatctgatgtcttgataatatcaagtcttctgtctatcttatttagatatactccatttgtaacctctgttacggtagtgtggcactgctcagcctaactgatgggacaccagatcagatgcaacccccttccacatgcctctcctcatcactgccccatcgtcctcagtcttgagccccagactccttgagcacctatcctttttctttggctcctctctgacatctttagtgggctggctcttccccatctctgcactcagagcacagggctgaggggagtgggggagatggctcagcccaggcatcctcttgacctcctacaccatctcccagcctcctaattcatctacctcttcagggctgtagagcttcctgggcctcaggacccacatacagaagccaggaggcctgcgtatggtccctctctccccatcctccccttgtgccagcagggatgggcaggctctaagggtcttcgtctgtggatctggctcctacccttctcaaggaggaggctctgcccaaatatcccctgagcagatccctctagctgtctaaaaccatttctgttccttttaatgtcctctgtctggccagagcacctgggctccccttggagcccttgttctctcctgggaaggcagaggcagtttttaagactatgagacctgaatacttaaaacactgggcaactgtgcaaaaatgtttgtgcaaggaatctcatccaaatgacagtggaagaaactgcctagcttagaaatcagccaggccctctgagtggttgctgcaaag

SEQ ID NO: 586824 - DNA, 4001 bp, Homo sapiens
gatcctcccgccttagcctcctgagtagctgggaccacaggcgcacgtcatcatgcctggcctgttccttttttcttacgccaacataatgaaacaaccaaaaggtgaagaagagaggccctgaagttacacggtgaggctggtcctgaccctgtgagttccgaaagcaaccatccccctggctggagtgtgcagtccttccatccattccccaaaacaagtcatgctctggcatttactatgattttagtgaacgcttagatggacaaagacaggaaacttccattggattttccaagacaaggggttttcagagtgcagttcccagataagcagcatcagaatcccctgggaacttgttaagagtctcccacctcccacttactggacccagaactctggaggtggggcacagggatctatggtttaagaagcccttcaggtgattctaatgcacactcaatttgagggcaactatgctgacagtaaaatctcacacaggtgagaggtatcaagttgaatatccttttttctaaggtggtttctccaggctgacaccacacacattttagggtgcatcattctttcctgtggggtgctgtcttgtggacattgtaggacatcagcagcatccctgacctctacccagtagattccagtcataaccccctttgacaaccaataatgttctgttattgccacatgtcccttgtggggccaaatggtccccagttgagagtctgctctaaaggaggccgaagtggctggcaagggccagaccaagacctctgcacgccaacctgggaacaataagagccaatggttacgaggttttccaggggctgagctttggaccaagagttttacacaaattacctcatccaattctttttattttgacacaggattgcgctcagtcgcccaggctggagtgcagtgatgcgatcaaagctcactgcagcctggaactcctgtgctcaagcaatcctcccacctgagcctcccaaagtgccgggattaaaagcgtgaaccagcgcacctggccagatccctttttttgttttttgaaacggagtttcgctcttgttgctcaggctggagtgcaatggcgtgatctccgctcacctcaacctccacttcccaggttcaagtgattctcctgcctcagccttctgagtagctgggattacaggcatctgccaccacgcccggctaattttgtatttttagtagagacagggtttctccatgttggtcaggctggtcttgaactcccgacctcaggtgatccgcccgcctcgggctcccaaagtgctgggattacaggtgtcagccaccgcacccggcctgaatcccacgtttaagtacagtaataaactcattttccagatgaggaaacagggcctccgacagatcaagccactcgcccacagatacagagtgagcccaagctctctcccctggactccttcaacccgcaggcagcgaggagccactgcggcttttacgcaggccgctgacagatcggaggggatgaaggatggaggtggcgggcgagagacaaaagaggaagctgccagatcccagaggaaaagggctatggagaaccagacactctgggttcgaatacaagcgccgccacttcctgtgtccggggcaacttgctcgcctccaagcctcagtgtcctcatctgcaacatggacacactcgcgactgcctcgcggaacggccttaaatttggctgacacaggccgagcagacgatcaagcaaaagctgtttccctcccggggcaagagatgggcaggagacaccccagaatgcgacagccgcaggcccgcgcacctcggcccgccgcagccggcgtcacttacttcttctcgccctcgaagagcaagaacgactcgaaggctggaggggcgttcatgctcccgccgccgttgcgtccagaccccaagggtccgccgccgccgccaccagagccctaataagaggcctcttccggattactccggcggggcaaacccgctcaaggatcggctcatcgccccctgttgggctggaggatcttgcgcaggcgcgagaaaaccccgagagagaccagtgcctctgcgcatgcgtcagtggcgagcgcaccgcccccccccccgcccccgccaccccgcaccccgccccccggcatggctttccccgtgggcgcttttcggcgcatgctcagagcgccggcagggctgttctgcccctacagaggcctcctagtcctggctgagcgggaacctcaagctgtacctttctcctttccccatgtcccttgatctttctttggaaacgtgcacccccttggagtgcgcagcaggaggcccctgaatagagagaataaagctaaggggtagtggacagctgcggctagcagccgtagggggagcagaagatctcgtggccagaggcagatctatgacaagccccctgcccaggctgcctataccgactgctgcaggacctctgcctggggggtgcagctggcttgttagccgggagggacaattgggtgagggatgcagaaggaggcaggtgtatacagcagtgagaggggagcccgtagggttacgtatatctttttatatattattattattatttagagacagcgtctccctctgtcgcccaggctgaagtacagtggcgccatcatgcagcctccaactcctgggctccagagatcctcctgcctcagcctcccgatagttaggactgcagccatgtgccatcacacctagctattttttttttttatttttggagatggtgggggggggggtctccctatgttgcccaggctggtattgaactcctggcctccagcagtcctccagcctcagcctcccaaagtgcacttggtggatgtgggcagcaagccacccaggtgccgaggcaagagaccgagggcacgagctgttccagtataataaaatatataaaataagaatagttatactagatatagatcttagatatgattatatatgaatcattaatcattagtttgtagtaattattctttattccaatattataataatcctcgctctacaatcataacctaggaaacaccaggccatacagagataggagctgaggggacaatgaggagtgaccagaagacaagagtgcgagctttctgttatgcccggacagggccaccagagggctccttggtctagcggtaacgccagcatctgggaagacacctgttgccaagcccaccgtggtctagctgtagcgttagtgtcaaggaaaaacacccgctacttagcagaccaggaaagggagtgtacagtgagatcaggatgagggtggtgaggtggtgatcagggggacccatgcttctgctcagggggttggcagaagccagcaaggcttggggtttccctgtttggagctctccaagttgagagtgcagaggagtgtgagatgcgtgtgaaaatgcaaacttggctctccctggctggaggctggcattgggtgagtctctggtaggaccaggccatgtatactttttaagcttttttattcttgaaaagttcaaagatatacaaagatagactatgcaggataatgagcccccacatactccgcatctcttgtctgtaattatcagctcgtggctacctctacctctcccctctacctcttgtctcatctctacctctccccctgacccctgcctctgggtcattttgcagcaaatcccaaatgcctatatcatttatcctaaatattccataaacattccactatgtagctctgaaagataaggacgcttacaacacaactgcaatatcttttttgtttgtttgtttgtttttgtaaagacggggatttcgccacgttgcccaggctggtctcgaactcctgagctcaagcgattctcccacctcagcctgccaagtagctgggattacaggcatgtgccactgtgcccagccaagtgcagtatcttat

SEQ ID NO: 586825 - DNA, 4001 bp, Homo sapiens
gcctgttcctttcttcttacgccaacataatgaagcaaccaaaaggtgaagaagagaggccctgaagttacacggtgaggctggtcctgaccctgtgagttccgaaagcaaccatccccctggctggagtgtgcagtccttccatccattccccaaaacaagtcatgctctggcatttactatgattttagtgaacgcttagatggacaaagacaggaaacttccattggattttccaagacaaggggttttcagagtgcagttcccagataagcagcatcagaatcccctgggaacttgttaagagtctcccacctcccacttactggacccagaactctggaggtggggcgcagggatctatggtttaagaagcccttcaggtgattctaatgcacactcaatttgagggcaactatgctgacagtaaaatctcacacaggtgagaggtatcaagttgaatatccttttttctaaggtggtttctccaggctgacaccacacacattttagggtgcatcattctttcctgtggggtgctgtcttgtggacattgtaggacatcagcagcatccctgacctctacccagtagattccagtcataaccccctttgacaaccaataatgttctcagttattgccacatgtcccttgtggggccaaatggtccccagttgagagtctgctctaaaggaggccgaagtggctggcaagggccagaccaagacctctgcacgccaacctgggaacaataagagccaatggttatgaggttttccaggggctgagctttggaccaagagttttacacaaattacctcatccaattctttttattttgagacaggattgcgctcagtcgcccaggctggagtgcagtgatgcgatcaaagctcactgcagcctggaactcctgtgctcagctcaagcaatcctcccacctgagcctcccaaagtgccgggattaaaagcgtgaaccagcgcacctggccagatccctttttttgttttttgaaacggagtttcgctcttgttgctcaggctggagtgcaatggcgtgatctccgctcacctcaacctccacttcccaggttcaagtgattctcctgcctcagccttctgagtagctgggattacaggcatctgccaccacgcccggctaattttgtatttttagtagagacagggtttctccatgttggtcaggctggtcttgaactcccgacctcaggtgatccgcccgcctcgggctcccaaagtgctgggattacaggtgtcagccaccgcacccggcctgaatcccacgtttaagtacagtaataaactcattttccagatgaggaaacagggcctccgacagatcaagccactcgcccacagatacagagtgagcccaagctctctcccctggactccttcaacccgcaggcagcgaggagccactgcggcttttacgcaggccgctgacagatcggaggggatgaaggatggaggtggcgggcgagagacaaaaagaggaagctgccagatcccagaggaaaagggctatggagaaccagacactctgggttcgaatacaagcgccgccacttcctgtgtccggggcaacttgctcgcctccaagcctcagtgtcctcatctgcaacatggacacactcgcgactgcctcgcggaacggccttaaatttggctgacacaggccgagcagacgatcaagcaaaagctgtttccctcccggggcaagagatgggcaggagacaccccagaatgcgacagccgcaggcccgcgcacctaggccctccgcagccggcgtcacttacttctcgccctcgaagagcaagaacgactcgaaggctggaggggcgttcatgctcccgccgccgttgcgtccagaccccaagtgtccgccaccgccgccaccagagccctaataagaggcctcttccggattactccggcggggcaaacccgcccaaggatcggctcatcgccccccgttgggctggaggatcttgcgcaggcgcgagaaaaccccgagagagaccagtgcctctgcgcatgcgtcagtggcgagcgcaccgctcccccccaccccgcaccccgcaccccggcatggctttccccgtgggcgcttttcggcgcatgctcagagcgccagcagggctgttctgcccctacagaggcctcctagtcctggctgagcgggaacctcaagctgtacctttctcctttccccatgtcccttgatctctctttggaaacgtgcacccccttggagtgcgcagcaggaggcccctgaatagagagaataaagctaaggggtagtggacagctgcggctagcagccgtagggggagcagaagatctcgtggccagaggcagatctatgacaagccccctgcccaggctgcctataccgactgctgcaggacctctgcctggggggtgcagctggcttgttagccgggagggacaattgggtgagggatgcagaaggaggcaggtgtatacagcagtgagaggggagcccgtagggttacgtatatctttttatatattattattattatttagagacagcgtctccctctgtcgcccaggctgaagtacagtggcgccatcatgcagcctccaactcctgggctccagagatcctcctgcctcagcctcccgatagttaggactgcaggcatgtgccatcacacttagctatttttttttttatttttggagatggtggggggggggtctccctatgttgcccaggctggtattgaactcctggcctccagcagtcctccagcctcagcctcccaaagtgcacttggtggatgtgggcagcaagccacccaggtgccgaggcaagagaccgagggcacgagctgttccagtataataaaatatataaaataagaatagttatactagatatagatcttagatatgattatatatgaatcattaatcattagtttgtagtaattattctttattccagtattataataatcctcgctctacaatcataacctaggaaaaaccaggccatacagagatgggagctgaggggacagtgaggagtgaccagaagacaagagtgcaagctttctgttatgcccggacagggccaccagagggctccttggtctagcggtaacgccagcatctgggaagacacctgttgccaagcccaccgtggtctagcggtagcgttagtgtcaaggaaaaacacccgctacttagcagaccgggaaagggagtctccctttccccgggggagtttagagaagactctactcctccacaggcccgcccacagttacccggaggcataaccgtctccctgtgatgctgtgcttcagtggtcacgctcctagtccaccttcatgttccatcctgtacacctggctctgccttctagatagcagtagcaaattagtgaaagtactaaaagtctctgataagcagaaataatggtgtaagctgtctctctctctttctcctctctctctctgcctcggctgccaggcagggaagggcccctgtccagtggacacgtgacccatgtggccttacctatcattggagatggctcactctccttatcctgcccctttgtcttgtatccaataaatatcagcgcagcctggcattcagggccactactggtctctgcgtcttggtggtagtggtccccccagcccagctgtcttttatctctttgtcttgtgtctttatttctgcgctctctcgtctctgcacatggagagaaacccaccgaccctgtggggctggaccctacaggtggataagtgtatcttaccctttttggtttggttgctttgcagactacagtttagcataaaggccctccttaagctgtttgaagcaacagggactggggtctcagaggagctaccagagccctaacagtttggcagctgtttctccaaggctgggcagcagctacagtgctgaggaaatctggagcatctaccc

SEQ ID NO: 586826 - DNA, 4001 bp, Homo sapiens
ggaccacaggcgcacgtcatcatgcctggcctgttccttttttcttacgccaacataatgaagcaaccaaaaggtgaagaagagaggccctgaagttacacggtgaggctggtcctgaccctgtgagttccgaaagcaaccatccccctggctggagtgtgcagtccttccatccattccccaaaacaagtcatgctctggcatttactatgattttagtgaacgcttagatggacaaagacaggaaacttccattggattttccaagacaaggggttttcagagtgcagttcccagataagcagcatcagaatcccctgggaacttgttaagagtctcccacctcccacttactggacccagaactctggaggtggggcgcagggatctatggtttaagaagcccttcaggtgattctaatgcacactcaatttgagggcaactatgctgacagtaaaatctcacacaggtgagaggtatcaagttgaatatccttttttctaaggtggtttctccaggctgacaccacacacattttagggtgcatcattctttcctgtggggtgctgtcttgtggacattgtaggacatcagcagcatccctgacctctacccagtagattccagtcataaccccctttgacaaccaataatgttctcagttattgccacatgtcccttgtggggccaaatggtccccagttgagagtctgctctaaaggaggccgaagtggctggcaagggccagaccaagacctctgcacgccaacctgggaacaataagagccaatggttatgaggttttccaggggctgagctttggaccaagagttttacacaaattacctcatccaattctttttattttgagacaggattgcgctcagtcgcccaggctggagtgcagtgatgcgatcaaagctcactgcagcctggaactcctgtgctcagctcaagcaatcctcccacctgagcctcccaaagtgccgggattaaaagcgtgaaccagcgcacctggccagatccctttttttgttttttgaaacggagtttcgctcttgttgctcaggctggagtgcaatggcgtgatctccgctcacctcaacctccacttcccaggttcaagtgattctcctgcctcagccttctgagtagctgggattacaggcatctgccaccacgcccggctaattttgtatttttagtagagacagggtttctccatgttggtcaggctggtcttgaactcccgacctcaggtgatccgcccgcctcgggctcccaaagtgctgggattacaggtgtcagccaccgcacccggcctgaatcccacgtttaagtacagtaataaactcattttccagatgaggaaacagggcctccgacagatcaagccactcgcccacagatacagagtgagcccaagctctctcccctggactccttcaacccgcaggcagcgaggagccactgcggcttttacgcaggccgctgacagatcggaggggatgaaggatggaggtggcgggcgagagacaaaaagaggaagctgccagatcccagaggaaaagggctatggagaaccagacactctgggttcgaatacaagcgccgccacttcctgtgtccggggcaacttgctcgcctccaagcctcagtgtcctcatctgcaaaatgaacacactcgcgactgcctcgcggaacggccttaaatttggctgacacaggccgagcagacgatcaagcaaaagctgtttccctcccggggcaagagatgggcaggagacaccccagaatgcgacagccgcaggcccgcgcacctcggccctccgcagccggcgtcacttacttctcgccctcgaagagcaagaacgactcgaaggctggaggggcgttcatgctcccgccgccgttgcgtccagaccccaagtgtccgccaccgccgccaccagagccctaataagaggcctcttccggattactccggcggggcaaacccgcgcaaggatcggctcatcgccccctgttgggctggaggatcttgcgcaggcgcgagaaaaccccgagcgagaccagtgtctctgcgcatgcgtcagtggcgagcgcaccgcccccccccccccccacccccccaccccgcaccccggcatggctttccccgtgggcgcttttcggcgcatgctcagagcgccggcagggctgttctgcccctacagaggcctcctagtcctggctgagcgggaacctcaagctgtacctttctcctttccccatgtcccttgatctctctttggaaacgtgcacccccttggagtgcgcagcaggaggcccctgaatagagagaataaagctaaggggtagtggacagctgcggctagcagccgtagggggagcagaagatctcgtggccagaggcagatctatgacaagccccctgcccaggctgcctataccgactgctgcaggacctctgcctggggggtgcagctggcttgttagccgggagggacaattgggtgagggatgcagaaggaggcaggtgtatacagcagtgagaggggagcccgtagggttacgtatatctttttatatattattattattatttagagacagcgtctccctctgtcgcccaggctgaagtacagtggcgccatcatgcagcctccaactcctgggctccagagatcctcctgcctcagcctcccgatagttaggactgcaggcatgtgccatcacacttagctatttttttttttatttttggagatggtgggggggggggtctccctatgttgcccaggctggtattgaactcctggcctccagcagtcctccagcctcagcctcccaaagtgcacttggtggatgtgggcagcaagccacccaggtgccgaggcaagagaccgagggcacgagctgttccagtataataaaatatataaaataagaatagttatactagatatagatctgagatatgattatatatgaatcattaatcattagtttgtagtaattattctttattccaatattataataatcctcgctctacaatcataacctaggaaaaaccaggccatacagagatgggagctgaggggacagtgaggagtgaccagaagacaagagtgcaagctttctgttatgcccggacagggccaccagagggctccttggtctagcggtaacgccagcatctgggaagacacctgttgccaagcccaccgtggtctagctgtagcgttagtgtcaaggaaaaacacccgctacttagcagaccgggaaagggagtctccctttccccgggggagtttagagaagactctactcctccacaggcccgcccacagttacccggaggcataaccgtctccctgtgatgctgtgcttcagtggtcacgctcctagtccaccttcatgttccatcctgtacacctggctctgccttctagatagcagtagcaaattagtgaaagtactaaaagtctctgataagcagaaataatggtgtaagctgtctctctctctttctcctctctctctctgcctcggctgccaggcagggaagggcccctgtccagtggacacgtgacccatgtggccttacctatcattggagatggctcactctccttatcctgcccctttgtcttgtatccaataaatatcagcgcagcctggcattcagggccactactggtctctgcgtcttggtggtagtggtccccccagcccagctgtcttttatctctttgtcttgtgtctttatttctgcgctctctcgtctctgcacatggagagaaacccaccgaccctgtggggctggaccctacaggtggataagtgtatcttaccctttttggtttggttgctttgcagactacagtttagcataaaggccctccttaagctgtttgaagcaacagggactggggtctcagaggagctaccagggccctaacagtttggcagctgtttctccaaggctgggcag

SEQ ID NO: 586827 - DNA, 4001 bp, Homo sapiens
tttcgccatgttggccaggctggtctcaaattctggcctcaagtgatccgcctgcctgggccaacatggcaaaaccccgtctctacttaaaaataacaaaaaaattagccaggcatagtgtcacatgcctgtagtcccagctactcaggaggctgaggcacaagaatcctttgaacctgggaggtggaagttgcagtgagccgagaccacgctgttgcattccagactgggtgagagacactgtctcaaaaaaaaaaaaaaaaaaaaaagagtgataggggaagcatgcgcctgtaactctaagataatcaggtagtaattagatgagttagactctcatgggtagcacgactccttttacaaatagtctgccatcatcatcaaatacaaggtgcaaaaagaaaaaaaaattcccattatacggctcatgttttttgtggtttgttggttgagacagggtctcaatctgccacccaggctggagtgcagtggtgcattcacggctctctgcagcctcgacctcctgggctccatccatcctcccacttcagcctcctgagtagctgggaccacagatgcatcccagcatgcctggcgacttttgtattttttgtagtcagggtctccccatgttgtctaggctggtctctaactcctggtctcaagagatactcttgccctagccccgcaaagtgctcggattacaggtgtgagccactgcatcccgcccgcattttcttattgtctctttaaactgcttaaaataaaataagccataggaattgagtatgtgagctctcagaaatgaaatgaatgtgtataaaatatggttttgtttctaaattatctaactgaagttggttattgctgcacctaataatcttctattaagaaaactaggatacgggagaaagaacactggcctggaagataagtctcctgggttctactatgagcagctctacccacaaagccggtgacctggtcaagtcacccacctgctaaggcccagtctcttcccctagcaactgaggcagcagcagagaatccctgcagactgttcctgcattactacgattctcccagggcagatataagggggtgatcagcagacacttaagtgagagaatagaagtgctgacggacgtttagaggcggtcgaaatctggagcacagagaggaggaggaaggactgttaggggttagcggggagtggagatgacgtccgcagctgagggtggtgacaccctccacgcttccgtaagccttgtcctcccagatcttcccatgcagcgcctgttcggtgcagccggaccttgccctcaaacccaacacatgtctctccggcaagcaatcgggacgctccctctgccccacactctaaggtccccaacacacggtgacttcactcaggcccttctcgctccgggcccgaaaacccaagacttaccctcctggggctctgcagcctctgccccacggctcccgagaggccggggcgggctgctgtcgctggcgcgcgcgtctgctcgcgaagtcccctcccgtccacctcaccaaggctgttctgctcccgaggggcccgggccgggcctacggggcaaatccaggcgggtgtccttctcggggcccagatccgcctccctggggctcaccgtacagcgacggccggcgccaggccgccgaggacacacacgggccaggcccaggtcccgtcgccccttcgcctccgccaccacctcccgcctggcccctctggccccagcgccgctggctccggggttcacgctcgggggtcccggctcgagcctctacccggcccgcgcgaaccctgggccgcacagctcccgcccgcctaggtgctggcccgggcggtcagcgtccagccccgcagactcggtgattctcatccactagaggccaaagcctgggaactagagcaagcggtgacctgaagaggcgcaggaagcgagggcagtgcggaggtggcgcgcatgtgcgagcacgcacgcgcgaacacgcacgcagggagaggtgcacacgcgcaggagtgcaccggaagtccgcctcctgggacacccaccgccgttcccaggacaagtaacggactctatttcctatgagcctacgcgctccccaagtttaggggccgtcttaaatgtctctaccccgcctaaaggttaagaagctccaggctatgagctttggcagccctgaaccccagactgaacttcacctttgtctttactcccttttagggtcaagtccagggctgcgttactgggtcctggagcccaagtcctctgggttagaaccaagtttcccataaggagaaggaaaggaaagggtgtatcatggtcactgctctgaaatgctgagaagtttcactcaaatactgggacaggataaatgcccagcgatgctttccaaggaacaaaaagaaaatagaatttgtagctgggtgtggtggctcaagcctgtaatcccagcactttgggaggccgaggcgggcagatcgcgaggtcaagagatagagatcatcctggccaacatgatgaaaccctgtctctactaaaaatacaaaaattagctgggcgtggtggcgtgtgcctgtaatcccagctactcgggaggctaaggcaggagaatcacttgaacctgggaggtggaggttgcagtgagccgagatcacaccactgcattccatcctggcgacaaagcgagactccatagcttttctagatcacacagcgaatgcctaaaaactgtagagaaataaggacatacacacacaaactgaacgaagaagagatacctgtgatcttaccttccccaggaggattatgtttagggttaggttatgttgaccaaaaagagtcaaagtctgtaaagagttttattctgggcctcctatttgagtgaccatggctggtgacacagcctcagggggtcctcagaacgtgagcccaaagtgattgggttacagcttggttttatgcatcttagggagacagtagttacaggcaaagacataaatcaatacacgggaagtatatgttgggtcagccaggaaaggctttcaggtcactagtagattgaaagattggcagttggttcagagttaagtgttggctgaacagctggaagactacataaagaaatgggctattgcggtggctcatgcctataatcccagcattttgggagggtgagctgggaggatcccttgaggccaggagttcaaggacagcctgggcaacacagtgagaccccccacttctacaaaaaaaaataattaaccaggtgtggtggtgcatgcctgtagactcagctactcagaaggctgaggtgggaggatcgcttgagcctgggaagttgaggctacagtgagccatgatggcaccactgcattccagcttgggcaacagagaagaaagagagagagagaaaaagagagagaggaaggaaggaaggaaaagaaagagggagggaaaaaaaagaaagaaaagtttgagttaagataagggggattgtggaaaccaaggttcttgttatgtaggtgaagcctcagaacaggcttcagagagaatagatgataaatatctcttattggatcttaaaaggtgtcagactctccagaaaagacctggagtcttttctgtaagggaaagagattctctacagaatgcaaatttcccccaaagagatggctttgcaggactattttaaaatttgtcaaagaaaatatgttatggggtaaaatactgtgatttacttcagggactgctatctgtcatgtgatgctatgtcagagtctggttggagatgggtatcttactgataaaaagagcctgttttgtcagtcctatgatctctattctaatagagatcataatgttggtcagctgtgcctaaactctgacgggaggagaattatgacaaggcatgtccaaccccctccttcccatcatgacctaaattagttttccatgtttattttg

SEQ ID NO: 586828 - DNA, 4001 bp, Homo sapiens
gaagaaaggaagggaaaatatgtattatctcggcaagtgaaatgcagatgaaggaaaaggacaatgatcatttgaatggaagatggatccactgtaatccaggtatgggagaatactgaacactaatgtcaaaagaaacagaatgtgctgacgatctgcaaggcatttcacagaagacaaagaacacaaaccatggagagaagactagcacaatcaaatactgggaggtgaggaaggtagacagaattcatgattttggaacatgcacagtttatcatcagacattctgagaaagaaggaagtgaactatctcactggtactgctatattgtcaagtaaaatattcaactaggttaaaagtgtcagacatatcaatttggaggcaagctgcaaaaatacacaagaaaaaaggtcttagaagttgagattagataaactcttttacgggatacaaagaaaaccaaaaaagtggaaaatgggttctaagaggacactcctgaaaaggcaagaaaaggaaccgacattcacttatgaaattcacacttcctgaatgtctactatggacagagcatgattccagttatggggaaggggaaatgaacacacagacaggtcataaatgagcattggggaaagaggggaaagctgagggagcgctacatcatcacatcaactgagcatggacttggggaaataacgtacaccacaagctgtgactcaattcacaagcacaggtggaggacaaggttttggtatctgaatgcctaaagaaataaataaaatcgagggcagaaaataagtccaaggtatttttaaagcaaggaaggaaagaaactggaagataaaaagaatgaacataaaagtctcaagttaatttttatgtcagacttctgaatgccccagaatgaaacaattctgtaaggctgggagcagtggctcaggactgtaatctcagcacttggggaagctgaggtgggcggatcacttgagaccaggagttcaagaccagcatggccaacatggtgaaaccctgtctctactaaaaatacaaaaattagccaggcttggtggcatgtgcctgaaatcccagctactcaggaggctgaggaaggagaatcgcttgaacctgggaggtgatggttgcagtgagctgagatcataccagtgcacaccagcctgggtgacagaacaagactccgtctccaaaaaccaaacaaaaaaacaaacaaacagcccacaacaattctctaatggtgagggagtaaataagtgaccgataatgctggaggaagaggaagtgaatgggtccccagtataggttagaatgaaaaaatccctaccaatgtaaatcaaatataaaataaacaaaagagttcatgtatgtgtgcaggaaggaaagtgatatttgggggttgggaggtgttactgagggtaccgaatacatataaacaactctttagtcactcccaaaggtctgggatgagcattttttaacatttgatactctactaacttacctggactatgttgacatggaaattcacctcccgttatccacagctcctctccctgctccaacttaatgatgacgtttggcttggtgatatcatatcttgttaatgggaaaagaagaaggacttgggcaagttgctcggcttcagatctccgaagtacaagatgttgccacctcataagctgcataacagaaatgctccattttttaccttatcaaagttagaacctttcaatgaagaataatataaacactgcagctagtgcccacaaggaattaaatggtgttgtcacttatttcttcaaactcaagcataaaaccccattcaactgagagcattcagaaagcaagctatcctcacccagggaaactagatggctgtagttctccaacatcacatccccgtatgttatcttctcatcagggtccagttgccaccactcctcctgggtgaaatccacagccacatctttgaatgacactggcccctgtaatggcaacatgatcagaattgggagatatggaaaagggatagggggataacattttacaaagctcactggtgaagttaaccatgaacattgtataccttattttatgttacagattatggaagggaaatcatattggaaacacatatcctttggggtcctttatatatatacaaaaataaaaacccaaaacacaactgagctcctattttgcaactgaactgtgttttggggatatgagatgagtgaaacaccatgcctgctctcagaaagcagacaacctaataaggagataaacatgtaaacaaacacaagcattttactccttgtcacttcttttagtcttctttgctgccaggcgctccccttctccgggacctcctcatgttggagtgcccaccactcagttcctggtcttcttcttcctaactcactgctctggggctctcacctagtttcagctccttgttcttttggctcttttattctcatagccagtggcctctggctatctgcatgactgattttatctcaaacatctcaatctcacagcaataaatattcgttaaatgaatgaatgcccaaagctgttattagagtaatgcagacaaggtgcagaatgatttaacaaaagaggatcaaattagtttaactttatgccatcagattaggcttcacagactcagttaacttgaagtccttaaagatgaattgtgtattctatgggatgaaggggaggaagaatatgatgaggtgtaaaagtaccaatggcaaacatgaagcagcttcaatttttaagaggttggggctgggcatggtggctcatgcctataatcctagcactttgggaggccgagatgggaagatcgtttgagctcaggagttcgagaccaggttgggcaacatagtaagaaccttatctctgctaaaaataaaaatttttttaaaaattggctgggcatcatggcacatgcctgtagttccagctacttgggaagctaaggcaggaggatggcttgagcctgggaggtcaaggctacagtgagctgtgaatgcaacactgcactccagcctaggcaacagagcgagaccttgtctcaaaaaaaaaaaaaagaaaaatgcaaagctcctgggctccagcaatccacctgccttggcctcccaaagtattgggattacaggcttgagccagcatgccccgcccaaacttgtagtttagaaaaaggaagtgcccaataagcatgttgcattatcctgttatttataaagaacatatcaacaaggggttcaaacccagtgatacagctaggaccatgtagatcccaagagatagcagaggcagagccgctaggctggtgggctgagaaactaaagcagaacatccaagcttatccacaggcaggccaaaggagctgataaaatcaccaagagagagtaataactttctgggttaagttagtccagaaagcaaggaggtggtaggggttagaagactgatggaccaataaataacataaaattacatgtcaataccacttacatcaatacaaatacccaaaatgaaacataaccaaacaaaatccagtaccagattaaaaacataatatacaacagacaaataggacttattccaataatatagactagtttaatacttggaaatctattaatatgataagccactataacacagcaaagaagaaaaatcttgtatccatgaagatacttgaaaaagcttgacagaaaaagctgatttaaaaaaacaaactaaagaaaatagaaactgatggatacttcattaacatcaatattattatatacacaaatataaatattacaccctaatatgccatagtacgtatgatatgtgacatatgtatttcaattacacacaagcacatatatacagtttgtgtgtatacacacacacacacacacacacacacactcttatgcctcagtcttctcggtccgaaagtcaggattttacttaacag

SEQ ID NO: 586829 - DNA, 4001 bp, Homo sapiens
gagggctccggcctgcaaaggcagaaatcacctgcataagaaccgcaaaagaaagctcaataggctaacaccctgtgaacactcaacctgcaaacactcagaagggtctaaaagagtgatacagggtttcaccatgttggccaggctggtctcaaattctggcctcaagtgatccgcctgcctgggccaacatggcaaaaccccgtctctacttaaaaataacaaaaaaaattagccaggcatagagtcacatgcctgtagtcccagctactcaggaggctgaggcacgagaatcctttgaacctgggaggtggaagttgcagtgagccgagaccacgctgttgcattccagactgggtgagagacactgtctcaaaaaaaaaaaaaaaaaaaaaaagagtgataggggaagcatgcgcctgtaactctaagataatcaggtagtaattagatgagttagactctcatgggtaacatgactccttttacaaatagtctgccatcatcatcaaatacaaggcgcaaaaagaaaaaaaattcccattatacggctcatgttttttgtggtttgttggttgagacagggtctcaatctgccacccaggctggagtgcagtggtgcattcacggctctctgcagcctcgacctcctgggctccatccatcctcccacttcagcctcctgagtagctgggaccacagatgcatcccagcatgcctggcgacttttgtattttttgtagtcagggtgtccccatgttgtctaggctggtctctaactcctggtctcaagggatactcttgccctagccccgcaaaatgctcggattacaggtgtgagccactgcatcccgcccgcattttcttattgtctctttaaactgcttaaaataaaataagccataggaattgagtatgtgagctctcagaaatgaaatgaatgtgtataaaatatggttttgtttctaaattatctaactgaacttggttattgctgcacctaataatcttctattaagaaaactaggatacgggagaaagaacactggcctgggagataagtctcctgggttctactatgagcagctctacccacaaagccggtgacctggtcaagtcacccacctaaggcccagtctcttcccctagcaactgaggcagcagcagagaatccctgcagactgttcctgcattactacgattctcccagggcaggtctaaggggggggatcagcagacacttaagtgagagaatagaagtgctgacggacgtttagaggcggtcgaaatctggagcacggagaggaggaggaaggactgttaggggttagcggggagtggagacgacgtccgcagctgagggtggtgacaccctccacgcctccgtaagcctcgtcctcccagatcttcccatgcagcacctgttcggtgcagccggaccctgccctcaaacccaacacatgtctctccggcaagcaatcgggaccctccctctgccccacactcaaaggtccccaacacaaggtgacttcacccaggcccttctcgctccgggcccaaaaacccaagacttaccctcctggggctccgcagcctctgccccacggctcccgagaggccggggcgggctgctgtcgctggcgcgcgcgtctgctcgcgaggtcccctcctgtccacctcaccaaggctgttctgctcccgaggggcccgggccgggcctacggggcaaatccaggcgggtgtccttctcggggcccagatccgcctccctggggctcccggcccctctggccccagcgccgccggctccggggttcacgctcgggggtcccagctcgagcctctacccggcccgcgcgaaccctgggccgcacagctcccgcccgcctaggtgctggtccgggcggtcagcatccagccccgcagactcggtgattctcgtccactagaagccaaagcctgggaacgagagcaagcgatgacctgaagaggcacaggaagcgagggcagtgcggaggtggcgcgcatgtgcgaacacgcacgcagggagaggtgcacaagcgcaggagtgcaccggaagtccgcctcccgggacacccaccgcgggtcccaggacaagtaacggactctatttcccaggagcctacgcgctcccccagttttggggccgtcttaaatgtctctaccctgcctaaaggttaagaagctccaggctatgagctttggcagccctgaaccccggactgaacttcacctttgtctttactcccttttagggtcaaatccagggctccgttactgggtcctggagcccaagtcctctgggttagaacggagtttcccataaggagaaggaaaggaaagggtgtatcatggtcactgctctgaaatgctgagaagtttcactcaaatactgggacaggataaatgcccagcgatgctttccaaggaacaaaaagaaaatagaatttgtagctgggcgcagtggctcaagcctgtaatcccagcactttgggaggccgaggcgggcagatcgcgaggtcaagagatagagatcatcctggccaacatgatgaaaccctgtctctactaaaaatacaaaaattagctgggcgtggtggcgcgtgcctgtaatcccagctactcgggaggctaaggcaggagaatcacttgaacctgggaggtggaggttgcagtgagccgagatcacgccactgcactccatcctggcgacaaagcgagactccatagcttttctagatcacacagcgaatgcctaaaaaccgtagagaaataaggacatacacacacaaactgaacgaggaagagatacctgtgatcctaccttccccaggaggattatgtttagggttaggttatgttgaccaaaaagagtcaaagtctataaagagttttattctgggcctcctatttgagtgaccatggctggtgacacagcctcagggggtcctgagaacgtgagcccaaagtagttgggttacagcttggttttatgcatcttagggagacagtagttacaggcaaagacataaatcaatacatgggaagtatatgttgggtcagccaggaaaggctttcaggtcactagtagattgaaagactggcagttggttcagagttaagtgttggctgaacagctggaagactacataaagaaatgggccattgcggtggctcatgcctgtattcccagcattttgggagggtgagctgggaggatcccttgaggccaggagttcaaggacagcctgggcaacacagcgagacccccacttctacaaaaaaaaaaataattatccaggtgtggtggtgcatgcctgtagactcagctactcaggaggctgagatgggaggatcgcttgagcctgggaagttgaggctacagtgagccatgatggcaccactgcattccagcttgggcaacagagaagaaaagaaagagagagagagaaaaagagagagaggaaggaaggaaaaagagggagggaaaaaaaagaaggaaaagtttgagttaagataagggggattgtggaaaccaaggttcttgttatgtaggtgaagcctcagaacaggcttcagagagaatagatgataaatatctcttattggatcttaaaaggtgtcagactctccagaaaagacctggagtcttttctgtaaggcaaagagattctctacagaatgcaaatttcccccaaagagatggctttgcaggactattttaaagtttgtcaaagaaaatatgttatggggtaaaatactgtgatttacttcagggactgctatctgtcatgtgatgctatatcagagtctggttggagatgggtatcttactgataaaaagagcctgttttgtcagtcctatgatgtctattctaatagagatcataatgttggtcagctgtgcctaaactctgacgggaggagaattatgacaaggcatatccaaccccctccttcccatcatgacctaaattagt

SEQ ID NO: 586830 - DNA, 4001 bp, Homo sapiens
atgttcatgattcccagatttattttgccaggttcaaaccctccaatgagtttcaggattatttttttctatagcacagttaacaggaccagcagcatagcaagtgtttttgttgttgtagagaacacgccctgaacaaaactcctgatttcttcaaatattttctcctattggtagtgtccatcccgataaatgacactatcatcatccagtttcttaagcccataagctaaaactgttggacccttcccctttcccagtgctaacatctagggcactagcaggtcccacactatcttttagttcaacctcaaacttgtctgtatccttccagatgtagcatttgcctctcagaccaaaccatccccatggattgcttgaaatactgtattgatctcctatggtttccatttccattgctgtagccagaatcgtgtttttaaaaatatcaaccagatcatagactgtcctctgcttaacactcatggttttagaataaaccctgtactctggtcccaatgccttatagtacttcatcacagtctatttctctaacctcatatcttctctctcactagtctccaactctactggacttatatttggacttcaaataaataggaattattccccatacagaatctttgcccttgcccctgcctggaacacactttgccctttcttttggcataaaaagcttttttgattgttattattataaatagattttctgcagacaaatgtttttaataagatcaaatatttaactatacaactggacaatttaactatacaaactgggagacatggagaaaaagcaagccttcccgaaatgcctcttttcagaggaagggcaggaagaagggcagggaggagagggccagcagggcgaaggcaagggttctgaaatcaacagctgctggggtggcagggagcacagagggaagatctgggggcgggcagacgaggggtgtgggggctgcatgtttgataacgtggtgtcagggccccacgttgaggtagagcaaggatgagcaagtgaaagtagatacgtgggcttgtgtctccggaggtgggtagcagagcccagattcttaggagccaaaggggccagcagactgggtgacctcgagggcgaaggagaccctactgcagctgccgcaggaaggcgttgtcgcctcccagaagtcccagatggcggatggggcgggctggaccagcacggaaggccaagcatcatcacaaaaactgaggctccaggggccgaggctcggcttcagaggccctggcctgggcacgaaggaagcaaccgctccatttttgctcaggggcttgaaggcagagggccggggctgcaggttccgcctgccacccttgctgtctgagacctcgaaccacaacggcccgtcgaacctagcgcttcccttggggcactggctgagcgcccccagcagagtctcccgggtgcaggggtccaggagctcctgggcggcggggcggcctgcggggcgggctctctgtccaggggatctccaggggctctcctgacgctcagggggcgcgatcccgatggtcaccgggctccaggtccgtcctgggttccaggcacgacacagcccccctttcatgcaaccctcccaggcacaggagaggtctcgccccagagcggtctccccgggaagggcagggcgcctccagccctcggagaccacccgctgcggcttggcggggtcctgggtgggccgcacctcgatgaggtgggtgctgggcaccgggcgcccccactggaagtactgaatatggctctgagtcagggacctcaggggccagggactctggcgaccctggggagatggcgtggtctggggcgtgctgggtgacctgctcatgggagccgccagggcgtcggggccttgcagcaggggttctcccgccttccagaagttcccgaggtctgcggactcggccggagctgcagcgcccatggctgggggaccgttggcctctgggcgcttggaaggcacgaaggacatgggcgcgggacactccacaatggcgccacgcgcaggccacgtgcccagaaacccagactgcaggaggacactggaggcacaagcctccttccaggtgctgccggcaagtttgcctctggagagaggggcctaggagctaccatggtctcctgtcctctcctcctccctccctctcccctttctctctgctccccctcccgctccctctcctcttagctcctctacccctcactctccctcccctcgtctgctccccttcctccccctcttgtgatgtcgttcatataccaaataattcagcaacttgaagtgtagaattcaatgggttttatggtacaaccacacatgtgcacccaccaccacattaaattagaaaaaaattttcatcacctcaggaagaagctttgtaccctgtagctgtcaccttcctatccacctatccacccgtccccgcaagccgcaacaaccaggaatccactttctgtctctgtagacttccctcctgtgggctctcctatggcatcacttagcatgatgatttctaggttcatccttgtggggacctgttcatccttctttttcatgtccaaaaaacgattccattgcatggatataacacatcggtttggcctttcatcagctgatggatatttggattgtttgcatgtttgggctatcatgaagaatattgtcatagacattagtgaacaagattttgtgcagacaaatattttcatgtctatgtagtatgcagctgggagtagaatttctgggtctgtggttagtccatgtttaagaggaaccaccaaaatgttctcctcagcctgtaccatgttgtgtcctcaccagcatgttgctctattttatacttgacatttagaaagagaatgtataataatacctgcagaaaactgcagatagactactgacagaagggccttccctttcattaccataaaaatgaacataactcactgaaatgcttttaagaaaaacagctagttctgttctagtaaacaagatacatgttttattcttctagaatggttattaatgttacatcttgcaatttaccttttaaggaaatggtgtttgtacaccacaacttatgtttgagaactgacaatgatgattttatgtagactcctgtaattttaagctttcatacattcatatatagattttcttcccttcagacattaatgcagtttttcttttttccattttttgcttgtaatatgtgtatatggagtagaatgattcacttttgtagccaccaggtgaaaagatctgcctacaaaaacattatttgaaggctattgggcaattgattacagccatcacatttggaggtctgttcagggtgttgtaagacagactgctctggagagcctctcaacagcattgcagaaggcaacacttgagtgggtccaatcacaggggcaaaaaatagagactgacaaaataccaaagccaataatccacaacaggttttcttttgggatttgagagacaaacaagtgaatggtgaggacactgaaaaaagcttaataagaaatcttcacgaaagttctgtacttcagaaaggggctgattatcagctgaaaaaaggcactttcagccaaggggagcagcaggatgaaagccccaggactttccactcagtcagtcattcattttcatttccccagattccttaagaatcctccagtataagattttaaaaacaaatttcctatgccataactgtcttcttaaaaagtcatttcttgataaagatgacaataatttttatagctaaaaagcctctttagatggtattatcattggagtggacagttaatgcagtgggggtctagattttttttaatgtatgttttcttagtttctacacagttctccatgtcctatttgaagtacaacccaatgggtgccattttggtttgtttttggttaaagatccttcaa

SEQ ID NO: 586831 - DNA, 4001 bp, Homo sapiens
ctcacagaaaaggtaaattatgacatcgatctaacctgtgccttgaaatgatcagcattaaaacccctgttattaggttctttcatgaaagccaaagaaggaggcctatgaaggctcacaaactggaggtggcctctgtatctttacgggaatgtctacatctcatcccataggagtccaagcgggaaactggcttagtactctcctgagcctgttaccttcttttattttcctggccatcaaggaatatttggtcttcttcctccactgtccttttcttcttcttctctttgagggcactcagtacagtctcctttgcacatgggtctggggcattacttgatggtgaggacagtgttgagctgattatctgctctggtctataatgaaagacaggattctagcagtaagatattttaattcccatgccatatcagaaatggaaatcagaagctaaccaacaagccaaagtataatttatacactcacaacagttccccttagcaagtaaagctactttttcgttaacggcaaaaagtgaaaaacaaacggttttactagaatttggtatttctcattcaaacaagcagattcgtcctttcttttttgcgttgtagtcatgttgtcataggaacaactggagaagaataaagtggacacgaaaagggagagtattcttccaacgataatactcacatcgcagaacgcgaaaatcttctgtcaggaggggcgatcctcagagtcactgggctacacaccatcctggagttgcgaggggacagcacagccttcttgtgataaccattccagcacactgtgggaagtacccccggacaggaatactgggcctgatggatcggatagcgtcttcgaggtgttattacaaaccgatctggtaaagtcccacgatccctgcagagaatgcgagacaaatcatggaaacaaagtataaaagaatgtcaaaattttagacggttaaaaacccaccagttaagacattttccaaagaacttaagtctctttctacgcaacacagaacacgttgtttttatggcaactttcccctattccatctaagagcagagagtgacagctgcttaacagctgtctcaacaatggattgcaacaatttgagagggaaaatctaaatctagactaaatctagactgcactaaaattcggggagtttttagaactggaaagaagggaatcgttttggcaacacatctcacaccaagcaagagtcagaggccaggagacggctggcacacaccaaggtgttaaggagggcaaaaccacacacaattcccttcggatttgatgaaaaagcaaatcggatttaaaagtcctcgatttcaagccagccgagccaaaggatgatctgggaaaatcagcgcatctcaccgtggggaaggcctcccggagggtcggagaagaggagtggggagagaggggtaaaagtggtgaacgcgatgggtcggcggggagggcggtgtggagcgcggcgccgggcgggcgggcggcggccaggcctattccgcaggtcctggccctccggagcgggggcgggctgcggcggcccgggcttgcccaggtaactgcccatgaggagcagttcggcagggtcaggtccttcgagcagggtccgcggctctaggaggtttccgttggctgtcgacttggccggaggcgaagcgaacagtgttcgccgatgtcgcgccttctgaacgaaggaggacaaggggcgcgaacctcggggctcgcggctcagtccccaccaggccgcggtagtccccacggccagccaggccagcgcagccgcagcaggcacgaggtacagtaggaggccgaccagcgacaggccgagaagcgccgccccggccggccctgacactcgctatcggccgccgccgctcgcctgctccagccgccgcagccgccggagacatcgcggctccgcgccgcggaggagacttaaatatcccagcgtgcaccgcgccacgcgtcgcgtcatcgcgcgcccgccacgtcatgcgcgcgcgactcggggagacgctacagcccggcagctcccgagacacagctgttttggaaaatgctgcctgccttcaacgcctgtttctgactcttgcggtttcccgcatggctcccagcgagacgatcccgtccgggatcccatccggctcccatccggaggcgatcccgtgaaaggatcgcgtccaaaataaaagggcccgagacctatgcttatgtaattcctaatccgtgatcttttctaggggctgaactcccctccagcacagcctgttaccaggtgcttttcacaaacgccactggcggctgagttttcccccccacttccatttctactttacaagttgataacgtgggacgattacctaccaaatttcacatcatggcccagacatcgggtggattttgaggctctgtgatcgatttatacctatgctaaagttatcggtctgagaaagtagattagtggttgcctagggctaaggagtgggtttgggggtggggaatagaaaatgactgcttatgggtataggctttctcgtagcagcataaacatagtttaaaattagatcgtgttggcggttgcaccaccctatgaactgtatggtttgtgaattatatcttcataaagctgtttaaaaagtctggtagtctgccaatacactttggtgtagttaagtttcctcagacattcattcattgatttattcattccattgtttatatacattaaagagattaagggggaaaatagaggatctctgatctttataagctctgtttagtaaggaagatgtgtaagtaaaagattgcaattcaatgttatcagtgtgataacgggaacaaaaaaagaggccagacgcagtggctcatgcctgtattcccagcacttcgaaggcggaggcgggcggatcacctgaggtcaggagttcaagaccggcctgaccaatatggtgaaaccccgtctctactaaaaatacaaaaattagctgggcatggtggcgcgtgcctgtagtcccagctactcgggaggctgagacaggagaattgcttgagtccgggaggtggaggttgcagtgagccgagatcatgccactgcacactccagcctggacgacagagcgagtccatctcaaaaaaaaaaaaaaaaaaaaaaaagttgtgataaaggggaaggaaggcagggaagtgctcctggagctgagaggtctggcaggttcaaggaagatgaaggagcactgtgcagaagtccagagatggaattgttcagtatcgctggagattagggtgttttggggatagaaaagttggaaaggtatagatgcctctggggcaactcagagagatgagaagaaggtgcagtttgggttccagatcctccccaacccagtgccaaagtaattcttctatttaatatactgtgatttcacataagacttaatttgaaaaaaaaggggggggggcggaggggggactgtgttgcttaagaaaaaaatctcagtatcagtagactagtgggacaaaagccaggctgccctgggttgaacagtgactggaaggtgaagaaatggaggcagtgactgcagactccctactcaagaaacctgggtaataggggaagaagaaacatagtgtctaggtcagtaggggctctttgaactattgtgtgtggctggagttaagtggaggagctacacataaaagccgtcagggtacagatgtcctgaaaccaagcaagatgactgagaattaatgtaaatagagaggtccatagcctgagccctcggggcactcctgtgtttagaggtaaagagatgaatacacaaagggcacaagtcatgtaggaaatatagataaatatgactacattaaaagttagtacttctgggccgggagtgatggcttacacataatctagcacatttggaggcgaggctggtggattgctttgagctcaggagttcgag

SEQ ID NO: 586832 - DNA, 4001 bp, Homo sapiens
agctttgtggtttccttctgagaagggaaactcagtggactcacgtattgcaattagcaatgtagggacaaggaagttgccatacagatgctgcaacattccatagcccaagttggggtaggggaggggagctgtttctaccatcatccaaggcattccctggacttgtgcggcacatacagccgactacaaaggtgggagactcgtgggtgggagactcgtggtctaggggaactctctcagttcttttctctgtactgctcccacctgggaaactcagaaatctcttgaggcatcccttgtgtgcttccttaagttccctccagcccaggcatatatagcttcctgtgagccgcacacacatacactccaagtctgaagaaaaaaggatgcatctatcctggggatttggcttgctcctgatgcaggcctcatgatatcatctcttgccttctctccctggggcagattcatgatctctaatcccccagggagtttgttccatgacgctggttctgattcaatagtgtggggtagggcttgagattctgcctgtacagggagcccctaggtgatgctcaggcatctggtccccagacccagttgagtagctaggttttaggggtttccaacagtgggtaaaatttcccttccttcctctgtctgggtcactccaggaggctcagcaacccatcctttatctatatatttttatctatacctataatctcctttggcagccaccagcactgtgattaataaaaactcacaaactgtaatttttacatgatttaaaagccaagaataccaactgcttcttactttttttctgcactctgtaacttaaaaaaattagaaaaacatccacaataaatagtaaaaacccattctgaatgtaagcttctaattagtccataagctcatataatttttttatatttaatttttattaggttttactttaaagtaaataaggcattgttgactaagccttagagactaggatgatctgtagactttgaactcctgttaaaagttatgaaacttttgatacattcttaaaatatccccaccccccttgtatagcacttaaccctttattaaatactttaaagggaagcagggaactaacatttattgaatagctactctgtcgcaggcagtgtgtattactatttccagtttactgaagcagctaaggttagagatgtaaagtgatttgcccaaatcgcatactcatggggcagagctaaaccccaggacatcagatgctggctccagggttccctcttccccgcctgcccccactgaagcgaaccatcacagcacacgttagctccacctgctcgggtccacacgcagttttgctgtggccctcagtagcctcaatttgagaatcttcaagcctggaaggtttgccatggccaggcagtcaaggcgcagaagcgacaggggctcctttctctaatacacaaaatatcaggagaacccccagccaggttagtttgtttctttccaggttgagaagtgaatctgtagccagggcacacaaatcttcatgaaaaattaattcgtgtatgctgacaacctgggcactcacacccctggcaattgcctccttatcccatgtctcaggccatgagcaagagtttgttttcaagtgacacatgacggctggacaaacatttatgaaacccccgcagagtgtgcatctagcacctgcttgtaaatgttctgttaacagcctggacccaactttctgggggctcgtggagctggcagggagtgaggaggacgaaggctgcagccctcaccacaacccaacttactggtaagaagactggtggttcctgaagagtgccagtcccatccccaagagggtgagcgcaatcagcttcgccatggtcggggatagacaaagggatcgatgggcgcagacaccgacgggctaggaggctctgcctgcctgcagccgcagccctgctggggcagcgccgattggcccgccccgcccctccccgccgggtcggcagctagctgggccgaccaggtgcacagaaggcgtggcttgcggtcagcccccaccgcaggagctcagcactttcagccaaaagtcccattttgctccttccaactgtaaagagagaagacagagaataggtgcctagtccagtcggggaggggaaatcaaacaagctgaagtaaattgccatgggaaaggacagtcaagctttggtgagcactcactttgtgccatcccggtccttgcgtctcagagagattcagtagcttgatcatggtgacagccaaaaaggtgcggaagggagggctgtagtaggaacccctaagatctaactgttctcaccaggctactactctgtgtcaccttccaacatctggatttcaagcatttttctctcaacaccactctgactttagagttcactcaagtacatcccccacacagctcattcatttcctcatgcagctggcatttattgagtacctactatgtgccaggcgctgttctagatgctacagaacaggacaaaacgtcttcctcaagcttacgttcattccaatggggggagtcaattgagaaatcagcaaaacatgtcactgtggcatatataatgctctaggtgatgcatgtgtgtgttatggatatgcacatatgttatggagaaaacacataaagcaagaaaggggataaggaataccctctgctgaagaatagcagtcagagaagttctcactgataatggggcatttgagtaaagacccaaaggaggtgcctctgtacaaccatgtctctcttctctgctgtctgctgttactgtgaatgatttgctccatgtctctttccttctcaaggcttttggtcccagttataccttctctcttctgcaatatctgtcctttcatctcttgtggaatattgccagccaataccaacatgctttacttatcacctttagctttctggggggaagcttctttggcctcacattgtaactactgccctctctctctgctccttctgaacacttgctcttaagccttgagctactatgtaaaaaacctgaccactccactggagcattcacatgaaaggccatgaacatatggagagggaaagtggtcagctgaagccaacctcttaaccatcggcaccaaggaagcagaaatgaatgaagtgggctattagacaagcccagccaccacagcctggccaccaactgaataccactggctaagccaccctggttaacaccaggtggagcagaagaatctacctaagaagtagaaccaatgaatccaaaagagaagagtattcgaaaagagggggaatgatgatctgtgtccaatgtggctatgagttgagtatgcttatggcagagaagtaactactgaattagataacatggatacaataggtggtttaataagaacaaattctacacgagtcaaaagaacacaaaccatattagaatgggttaaggtgagaatggaagattggagatatttcacaaggttagctgctaaaccaaacaatcattttcttatgctcataaacagtgcataaggaatttgggcagggcccagcaggctacctggttgacatgcccactggggtgtttaacagtcttttcaaaatgtgtccaaaggaaaactcttaatcccccctgcccaaactcacacttcaataaatggcatcactaccatccagttgctcaagtccaaaatctacatatcttctttcatccatctcttttcctcacaccctcttgcaccaaacagatcagtcagtcctataggctctattttgtattagttatcgtatgctgcataacaaattatactaaagtctcaccattaaaaacaacaaacatttattatctcatcatttctgtgggtcaggaattcaggcatggcacagctagatacctctggctcaaggtctctcatgagttagcagctgagctgtcagtgtgaattgc

SEQ ID NO: 586833 - DNA, 4001 bp, Homo sapiens
ctgctactgtcagccactgttcttacattatgcacttccttatttatctatttacctgggaaccctgaagccagcttgccaaacaatacattattccatatcacattttaattataacgaaaaatctctggtaggtagacaccatagtttataaattaccaactcaaattttgttttttatttatttatttatttatttattcattttgtagaggtgggatcttgctatgttgcccaggcctgtcactaactcctgggctcaagcaatcttctggcttaggcctccaacagtgctgggattacaggtgtgagctgtagattctgatccagaacagctgaatcagaatctttggtggtgccactcagacaccagccctccaggagattctaatgtacagagaaccattgctctcctccaatccccccttccaggcttatctctataaaacacaactagttatattaagttcttgttgaaaagcaaaacccaccaatatttcccttttgaagcactattgggcctatgaaagtggggccccatttttcaacttatatttaatggcctcaaaacctatccttcccaccaccctactattctcatctcctgactttatgctcccttcaaattggcccatttgctagtcttccaacttcccaccttagcccctttgctcctgctgcactatacatttggcatgggccccttcatgctcatatgtgttgcacccacccttcaaggtcaggtcgaatgtctcttcctccctctagaactccaccctcaggggatggaatctttcctctttaagcctatgcggttcatttgtgtctgtccttagaacatcctaatttatacatttactgtattttaattctctcttcccctgtatcaaactccataagggtcgtactctactatagaagcctaagagagaacattacacatagcaggtgctcagtctttctggaactcttttgcatgaggcctataaaattttggttgaggcagggcagaacagctcacacctgtaatcccagcactgtggggaggcctaggctggaggattgcttgagtgcaagagttagggaacagcctgggcaatacagcaagaccccatctctacaaaaaataaaataaacaaaaaacaaacgttgagttggtaatttataaacgatgatgtctacctaccagagattttcattaaaactaaaatgcgagatggaatagtgtctgcgctgtctggcattctggcttcaggcttccctggtgaataaataggaagtaagaacagtagctgaatatttcaagtgtctttgatctacagctgaagagtttctcaaactatgcagaaatgggtggagaacaactttattaaagacgggtctggtttgggcaacaaggagaaacagcaccaatgacctgaaataaatcttcatagttaaggtttcaatgcatgagtagtcattttgttttcaatttaaaccactagtttggcccttgggtaattgcaaagcattctcttgtcagcctaagcagaagagaactttgttagcagcaagggcttataaactttcaagaaagtgtcgcgattcactccaaactttgctagttttttcactagaagcggagagtcggggtgatgggggttcaactagctgggggagggacagcattcaaaaattctccacccccggccgcagggccaggtcccgcaggaatccctcccccagcctgcgccctccccgcaccacgcggccaccccgagcctggggaccgccgaggaggggcgcgcgggagtcccacctacctgagtgccagaagcctctcgcccaggagcgccagcgcgatccccagcaagcccacagccaccagccgccccatggcgcgggagccgggcgcgctgcctcgctccggcctggccagcagctccgtgggcggtgccatcttcccggctcgatggtgccggccgcgctccgccccgtcctccgcctaggccgagtccctgcgtcggggccgcggaggctccgccctgggcctggccctggtctttgtcctcacaaacctatttccccagataccttcgggacggcccggacacgccttacattaggctcatgatgtgaaactttgaattccttcacttcctttttcaaacaacccacccgaaaccctctagcagcccgcatacctttctcgtttccctagtcttcaaacacatttctcactcgctattccagtgagaaacttacatagaaagcagcttttggggatgggggtcggtggccaagggagggaaagtaacgggatgcgtcgtgtaaatatttcacgttggaatcactactttttataacaggacgtagttgcgaataaataaacatcctgtgcctcgtaatactttttttttttttttttaacagggtctcgctgtgttgcctaggctggagtacattggcacaatcatagctcactgcagtctggacctcccggactcaagggaccctccagcctcagcctcctgagtagctgggaccgcaggcacgtaccgttacacctagctaagtgtgtgtaagttgtgtgtgtgtctgtgtgtgtgtgtgtggagaccgagtcttgctgtgttgcccaggttggtctcaaactcctggactcaagccatcctcctgcctcagcctcccaaagtgctagaattacaggaatgagccaccatgcccagcctctattaatacttccagactacagacttaaggacttagacacgtctttttcatccaaactcaaagggaagaagtgtagtttttttcttttccgtttttactctaacaaccgtaacatgaaggaataatttaaaatacaattttaaaagtaaaatgaaatttacccatcaagattgataccattacaataaatgagtacatctgaaataagcttctaatggttttcggtatttaattgccaccctacaatatgtaggcagaaatggtcacacttgacaattttcaacaaatatcagttttataaagaaccagtaaataaaagtggatgccaatttcccacctgcctctcaccaaaaaaaaaaaaaaaaaaaaaaagcacaaacacctctctccctgtgtgtgtgtgtatctctgcttcagtcctaaggatattggattatactggatggtagaaagagaagtaaaaagttgtcctttgaaagcccatgaggcattaccttttttgtgtcgtggacccttctggcagtggtgagcctgtggataacttcttagaataatgtttataaatgcttacaataaaatgcataaattttctctgtgcggttcatgaaaaaaagaaagaagaaaaaaaaattttaaataaatgaataaaatgtatagattgcaaagaaaatcaattacattgtaaggaaaaaaaatagctgagagcagtctgagctttgtgaggtatgcaaaatttatcaggcccagagcgacatgagtatgggacttcagtcacgccccaatacccatgcctggggacagttgtttaaagacattttgttcccgagtagctgtcccacccattatcttcatattcctggaatttatgatacaaagaacaaagtataaccaatccacagcttatgttattttaacgcaaggaatttaggaactgcctcttccttccccttaaaaatctatgtgtaactgctgctaatcagagtgtatatttagggaaacttgaatctatactcctgggttgcagtactcaaacttggcccaaataaactctctacttacattaattttgccttagctttaaaattaaaggtcaacaattgaaatgtaattgttaaaatatctaaaacataattttttgctatagtaatgtggtaatgtaatgtgtgcaacattatttaacatattaaataacaagatctagcaacattcttttaaataaagaggagtgcaaatgttctttcatgatactgaaaacaactataatgaaataatgaaaataactgtta

SEQ ID NO: 586834 - DNA, 4001 bp, Homo sapiens
ttcagtgaggggaaaaccagggagtggtcaatgacattctttaggtaatgtggagagatgtcagtaaggaaatgtgctgagaaaaacccacaaagaatgtcatttagtacacccctgaagaccttgcatggggcagagtggacggggcagatgtcccactgggagggcttaagtagtgacaggtaattaaatgagctggtagggctcagtcaggtggatgacgaccaagaagctgtgctggctcctcttggtactgtcacatacataccaagttcctcaataaggtggcagttttcaggttctactggctccacttctcgagaggcattcaccctttctctgtagaagataaaacccaaccctggaagtcaaggcacagcattcaaaatgtatgtttaaatgtggacttcaatcatcttcgtgttggttaactatctttatcataatttatgaatgacataacaagtaagtaggtacttcctttcatgtttatttacataatgtagacattatgtgggtattttacctatatcagctaaccttacccagttattgctgaaaaactgtataatatgattcaacatggaaaattctgctgcccaaataaaagacactatttaatagtatgagtaattgaacaatattattaatttaaatgcacgaaatagccctaattttctaaagtatcgtctgttataaatctgcacttaatcccctacagtcttgccctttgaacttttccttccaaactgctttcccaaaattcaacagggtctcctaatagtcaaactctatcacttttgctttaatttttaaattttatgctgacttactccgcaagtatgtaaattcattaaaccaaccacaatttaaacaattggccgatttatttttcaacacaattttcttgtttccagagtgaaaaggaatgtttccacattcttctaatatcagggataatttaaaatttttattaaagtatattcagaaagactcaatacttatcttacagtcatttatttaaaaaaatacccttagatctactttattattattactattattttatgattctccatgtggttgcactgggagcaaatgtaacaataaaactctcaaactggaagtattactaataggcaccaggcacctcaacagattctagacgtgatcctctaagaagaccagcttcaactaagagaaatacataaacactcaaagacaactgaaagcaagcagaggctttcgatccactcatgaatgtgtattatcacttaaaggttcttctttctagcccagtattgacttttcctgagacatttctaggctggctatcaccattgtatcttccacttcaaaaggtcaaatgcctacaaaatgccagttaccgcctgcaggtttcagctggtttgccctgctgtctggccagctctttaaatctaggataggttccataacccagtacttctgcatggttagccagacctgggcaatgtctcagtcagccgtaaacatccaactggtagcctgatcctctctcccaagtccggcgtttccaatggacgtccttttttcccaagcagaatgttgagggcgagctgggaaaggggtcatcacgttcagaaagtaaaagggggtcatgaccttcagaaagcaaagtgggggatcataaccttcaaaaaataaatgggactaattcggctcggcagtctttggaaacgcaagtagctcactttccccataagcgagtctcaaggggcggtttgctgggtgagatggaggagtgaggttccaaagctgctctttcctacccgctaggaagggggcgccaggcagcccctgacctcacttggaagaggagagaaagagagtcgaagacgccctgtcaagatgccactcacctaaacgccaggaacatctccccgactaaggacaggccgacccccagcaggaccagcgccacgagcttccccatggtctcggggtgcccagcggcgactgcgcggcgccgagagctctcgggggcgcggcgggcggttcctgcctcgcgtacggattggggcccgctcggccccgcccgcacacgcctcctacttacctgagcggcccgggtgccgcagcagggcgctgacgagtcccgccgagccccgccgcccgggttcaaggccgccttcacgcccacgattccttgttttttgggcagaggtcaaggctcaacggagagggagcccgggaccgagttgtggtgggagtttgctcctaacacccgcgaaatcctacctcaattcctcagatggcctgagggagaaaccggagggcccgggaatggcggggagctccagttcagagccggaactccggacttctgcaaggccagacgtgaggcgacactgaattgctcccgagacgcgggaagggcgaaggcaatcgaagcgaagagctttaactcatcttctccaggatttggggcacgggaacctgtctcctgaccttcgtgccttacctcggagtgtgctgcccagacggacttgtgaatagctgcgtctgtccccatagttaacgggagaaggaaacaccaggagaaaagaaggaaaagacaggaaacgggaagaggagcagaggcgaggaaggggaaggtcatttccttggcagggtaggccctctttcttctaggtcttgagttcctgccaggcaagaaatgctctttcccctctcctgatgaacaccaggttggagggggaggaactgaagatgcgggaagacttggggagttcgggcaaagtagcacattcaagcatgatctatttttatttacggacagaaagaaatattagttctgttaggttccaccgagtaaactatttgttgagagagcaagatttgccaatcctgggggtattaaggaaagaaaaggtggtccctgacctatgggatacatgattctagtatgaatacgtaattacaggatgaataatgaagcccaccgcttatgcagtactgactgtgtgctttgcctgtgctgacacctatgttaacgcatttaattatcaacacaatctctggagtgtgggtagccttaccccaattttacaggtgagacctgcagcacagattgcttatgtggcttgctgtaggtcaggcagctgtcaagcagcagactccaaaatctgggcccttaactgagctgcctctaccatgctgcctctagaaaatctatggaagaagggttgtattaaaaggacagtgtaacgtcttgaattgtatagattagagttcttgttaagatgactaatgttaaaagagtgcaagcagaggaggaatcgaagtcaggagggctcacagagctgaggggcctggggtgtgatgtagacatgcatgcagggtttgggagtcaggctgcctgggtttggatccagcctagataaagtactcagctttattgagctacagattcctcttctgtaaaagaacgtccacctcataggtagcttaaaattaaatgtgataatgagtgtcaagtgctctgcactgtgcttgatacgttttatgaagtcagtaaagattaaccactaattaattctgaactttgcttgagattgtaggctcctgtgggaaggactccatcgcattgatcactgggttttcccgtgccatccatagaactttgtgcttaataatgactcaataaatatgattagatggatggatgtaaaatatggacttgggagaaagaaaaattagaagaataaaaaataaatggaatgaataatgaaataataatagtcatattattatttcactcagcgtttgcatgccttgtcacattacttcttattaaccttacctacaaagaagtaaagtgaattgcttgctgcaagtttgatgggactaaaaagaaggaaagtgaggctttgaggcttagagaggtaaagtaataattcacttaaggttacataactaagtgtcagtgcctccatctggactcagatcaggtgactcta

SEQ ID NO: 586835 - DNA, 4001 bp, Homo sapiens
agtagctcagactacaggctggagccactgcacccaactagaagacgaaaatctttaaaacaaacattggggctgggcacggtggctcacgcctgtaatcctagcactttgggaggccgagatgggtggatcacaaggtcaggagatcgagaacatccctgctaacacgctgaaaccctgtctctactaaaaatacaaaaaaattagccagggtgtggtggcaggcacctgtagtcccagctactcaggaggctgaggcaggagaatggcgtgaactcaggaggtggagcttgcagtgagccaagattgcaccactgcactccagcctgggtgacagagtgagactctgtctcaaaaaacaaacaaacaaacaaacattgggatgactgggtttctgcactgtactgttttgttacactgctcatagcataatctatgctctctatagaggcaagaaacacttgggttcccctttcacctagatacctgtagcgtttcctaccatccctattcaggcacacacagaatttacacaggaaagaatcagtggcagtgggatggcaggacactagtgcaacaggattttttatttatatggcaatagttacagaccgcatacacacactcaggaaggcccactaactgggcccaccaagagacaattacccccaccctcaatgcagagtcctttgggcttccagggaacaggccttttcttacatggctctggtccgaggtccagtactcagcatgcgaagagccatatcacggaggggataagtggaggagtgtcttttcaattacttgggtgtgaccctgaagactcggatgtggatggctgagttgttgcggatccgagtcagtggctcccgtgtgtcggtctctggctccagctcatcaacaagctccacggtggaggtattggcagccacctgcaaggacccgaagctgcccgcctgcagctgcagcgcgatgttgatggcgcggttgatggccaggcccaagccgtgaatgtagatctcagagcacgcgttctgaccccgggcccctccgtccagcagcttctggcagcgggccagctgggccttaaagtccgtcttcatgttgacataaatgtcattgggtctccggggcaggcggctgggaagccttttcctaagggtgtattccactggatccagttcagcctccacagcaccgcggggctctcggttttctgccatgctgtgtgccctggcgtgggaaagggacgcgatcagagggctcagagggacctcgaagcctttcctaccccttttcctgtacaaagggtgcacctggccgggcagtggctcacgcctgtaacctcagcactttggaaggtcgaggcgggaggatcactggagcccgggtgtttgagatcagcctgggcaacatagcaagaccctgtcttaagaaaaatttttttaattacccgggccgaggggggaggatcgcttgagatcgggagttcgaggctacagtgagccgtgatcgcgcccgccactgcactctagcttgggaaacagagcaagcctctgtctcaaacaaaaacaaaaacaaaaataaagggtgcacccgagaagggacacactcgatgtccctgtttccttccggcccctcgtcctctcccactcacctccagatcccgcgtctccccaccccccgttccgattcattcatcgcgtcgccctcaaactcgcgcccctccgccgcccctcccgtgcttactctcttcgttccacagggccctccaggcgcgcgaggcccgctccccgccaggccactcaagggttcgccggccagcccaagtaaccgcgaccccaggtcccagagaaagaaggatgtgggtgcaagcagccagccagctcgtgggcgccctgcccgcgccggggtcctgaacgggctgcggagtgcgcacgcgcgcccgtaccccgcgagctatgaatcgccttcccggcttccgttcgccccgccccttccctgagcgcaagggcgactgcgcgaggcgtttgagaaacgcgagacttccgggcgtgacgggatctacacgtgtacgcctcgggaactggcgggcggccgagggcgggaaccaggtccgagccggggaggagctagaaagggccgggtcggcgtctctaggcctggcggagttcccggccggcggaggggtagcgtagggaagacacctggaggggaggctgttctaggggcagggttcttccccatgggagcagggaaggggccgagttcaggagaccgcggtcgccaaggggcctgaactccgcgtccgtcgcagctcctctggtcagaagaggcctgggcagggctggcagaactgaccccctagtctaatgtccctgtggcccgaggaccgagggggaactgagggacatagccggtccccacctcgctggaggacagcgtcccgggactcccctgcagttcacgggaagctgtccgcctcctgtctgtgctggggacccacgctgtgagccctaagcccaggcttcacgggtccccaaggaacgctgacccacccacgcccctcaaccatctcccaccagctctgcagcaggcgaccccggatcagggacttgccgccccctggcgggcaaggtggggaggacgcgcgccggattcgtggctctcaggccagtggagtgggggctctgcccagatgggcatagtttctgcagagttcccttctgaaatgagtaggacctgctgcactggggaccttgaactactctgtttgcccagcattcaaatggggatgttcacaacagctccaccatattgcacatgcattttattgaatggctagctgtatagcttctgtctacaaacttgcatgcatttatttttgagacagggtctctgtggcccaggctggactgcagtggtgtgatctcagctcactacaacctctgcctaccgggttcaaacgattcttgtgcctcagcctcttgagtagctggaattacaggcgcacgccaccgcacccggccagtttatttcatttttttgagacagggccttactctgtcacccaggctggagtgcagtggcgttaacacggctcactgcagccctgaactcctgggctcaagcaattctcccgccccagccacctgaacagcttggactacgggcatgcactagcatataaagttgtattttagaagttaatccttggtattgaaattttcgatatgttggccgggcgcggtggctcacgcctgtaatcccagcactttgggaggctgagacgagcggatcacgaggtcaggagatcgagaccatcctggctaacacggtgaaaccccgcctctactaaaaatacaaaaaattagccgggcatggtggcaggcgcctgtagtcccagctactcgggaggctgaggcaggagaatggcgtgaacccacgaggcggagcttgcagagagccaagatcgcgccactgcactccagcctgggggacagagccagactccatctcaaaaaaaaaaaaaaagaaattttcgaaatgttcacataattgttgggagcgattcattcctcctcacatgatgtgcctcctctctcccatatcctgttaattgtagcagttgcgggcatttgcgatgacaggatatacggatggtgccacacttgaccttgagtactggaatgctctgaggtcaagcatatgccacagtgcttgagactgtgggcatcacctgtagtgtctttttctccaactcctgtctccttggtcctagggaggtctggctctaattgctagtttccagagattcattcctttttttttttttgagacggagtctcgctccgttgcccaggctggagtgcagaggcacgatctcagcttaccgcaacctctgcctctgaggttaaagcgattctcctgcctcagcctcctgagtagctgggattacaggtgtgcaccaccacgcccggctaatttttgtattttcagta

SEQ ID NO: 586836 - DNA, 4001 bp, Homo sapiens
gagtgagacctgtctcacaaaaaaaaaaaagttacttaaaagctaaattatttttaacttgaaatgttccatggacttcacgagtaaatgttctggatttgccaagcagttttgatttcaattggcctgtctcctaatcatacacagacttacctaacacagattctgattttcaaggggttaagggtggatcaacccagagttaaccaacagcaggtcctaaaattcaggtatgtctggcagcaaacatcctctgtggcatttataaactcctactacccaggacgatccacacctgatttacattggctgcggtcaatgctgctgttttcaggaatatccctgggttgtttcatttcaaatctacctattatttcttcaagtgctagacctgaagaattttggaaaattaagatcactcctaagtttccacaccaccacgcaactggcagctagcatcccattctctgaaatgcggatgttgtacaaatactttttataataagctatctgctcagcgaaagtttccaacattagatggcatgaaggtcataagtagctcaaaaaccactctcttaaaaggaaaataagaactcctaaaacagccctcctcccaaaaaaaaggaagtggacctttctgggttccctggtttactaactgggcctttggagctgttctcctgaccaagccaaccccataaccactcaaaagggatttccgtaggtagaacttgcaaatggttaatgaatcaatgccttctccataaagcaagacccaaggaattacagcagtgaacaacggtggggatactggatcccccagagggttccataaacgttctgcttacaaggaggattaaagttctcgatgccactctctgggaccctgtcttgatcctcagaatctcaaccctgtggggagagcagggtggctgtcttactaccagacccactgatcagaaaacggaggctccaggaggtatcttgcttgccaagaatcaaaccagggccacccagtccagtcctgtctccttttgtgctggcatcattctccagcttggccaagctcagaggcaaggcaaggcaaggctgcagctttaagggtttaagagaggagacagccactttcattgaaacagccccaaactccttattagtggtcaccagtttacacaagggtaactcgttttgaaaaacaatacgcagaaagtcgaagtcaatcaagctcactgaaacctctactctcctccccctggcgcccaagagaccttgaactcttacccaattgctcccccgatctaagggtgtcccggctcccccaggagatccgggtacctgtgttgtgggggccgccgagacacctgactgcgaggggcactgccctcagggatgcaggccgggctggggggctcccgtgatccatcgactcagcccacctgatgctgcagggttagattcgggtcccatgagcatgcatcgagcgcctctcacgttaggtacccccagaattcgctgcctcccgaggcccattcatcgtacagatggggaaactgaggctcggagagttaaagtggcttagcccgtggggggcggcggcgcggggactggaccccgagccctgagataccgagccctaaccctcagccgagggcctgccgggctctctcggcccaagctgtggaaaagtcgaccctcaggccgccgcgggagatcagctctaggggaagggcgacgcggaggagggccggggtgggagccatgccttccgcccgagcgtcgggccagacgcgcagtgcccaggcccgagggcccaccccgacgcagagagccaggcggccgcggtgaactgaggcgcccggcaaaccccgagtcttggggcccgacctcacccaccccgccgtcgccgcgaaagatagcactcaccgctggcagcccggctgctctctgcgggcacctgggcagggctcaggcccacaccactgaggcgctaccaccgccttcgccggccgcgggggtgggggcgtggccattgggccgccgccccgcccactcgagccgcgcgtgcattcccggagccccgcgcttccccctgcaaatttgcgctcttggtacggcccggcccggccacgccccctcgcggctcggctgggtcgcccggcagagaaatgaaagtgcgtggttccgggggtggcggagtcgcctggagacggcggctgcggcttctacagctcggaccctgcaggtcaccgggccggctgcccaccttcccggggatcactgcagaactgtggctgtgcgcccgccggtctagcctcctccttcgggccgccgcttgcttgtgatcgccacattgtctcctccacggccctgtttcctcacctgaaattggcgaggcttcaggcccaagtcgtctccctgggttccctccatccagcctgacggcggagggcgcgcgtttgtttttagagacagggtctcgttctgtcgcccaggctggattgcagtggtgcagtcacagctcactgcagccttcaactcctgtgctcaggcgattctcccacttcagcctcccagtagctgggactacaggcgcgccaccacacctagctaattttattttattttatttgcagagatgcggtctcgctatgatgcccaggttggtctcgaactggtctcaagtgatcctccctcctcggcctctcaaagcgctgcgattacaggcgtgaggtcccacacgctgcctagagctcgcttttgaaggccggcctgttgggggtgggaagtgaccaagcaggaggcaagccctggatggaagaggagtggggggatacagagagcttctggggtttgaaaagtctggcagccttggttggggagtgaagcccacctctgcctcctgctatggtttctactttacagggtcatgaagattaagtggtataacctttgttcctaaaggatttagagcacggcattactaagtgttctcatcgccattgttattattactactactactattattactagctgtgctgtgaattccttttgcaacactgtgcaactcacttctctcagagccccttctccatcttttaaaaatagcccaggcacggtggctcacgcctgtaatcccagaactttggtaggctgaggtgggcggatcacctgaggtcaggagttcgagaccagcctgaccaacatggcaaaaccccgtctctactaaaaatacaaaaattagctgggcatggtggcgggtgcctgtaatcccacctactggggagactgaggcaggagacccacttgaaccccggaggcagaggttgcagtgagcccagttcacaccactgcactccagtgtggccgacagagtgacactccgtctcacaaaaaaaaaaaagttaatttataaaataatacataaatataacatttatatattatataaatgttatatttgttatatttatatattatataaataatatatattatataataacatatatgttacttattttttgaaacagggtctccctttgtcgctgaggctgggatgcagcctcgacctcctgggctcaggtgatcctcctgcctcagcctccctagtagctggaattacaggcatgcgccaccacaactggctaatttttgtatttttatttttcattttaaagaaagttgattgaaatttttttgtagagatggtgttttgccatgtttcccaggctggtctcaaactccagacctcaagcagtcctcccaccttggcctcccaaagtgctgagattacaggtgtgagcactgcacctagcctaatttttaaattttttgtagagacagagtctcgctatgttgcccaacctggtcttgaactcctggcctcaagggatcccttgcctcggcctcccaaagtgcaggaattacagatgtgagccaccattcccatccactcttcatctttaaaatattgtgaaaatagcaaaatcctatataaa

SEQ ID NO: 586837 - DNA, 4001 bp, Homo sapiens
aaattgcttaacctttctgaaacacagtgtctttaataacagtacctatgtcataggtctttgtgatgattaaataatatacgtaaaaactacctaacgcatggaaaaaaatgcaatgaatgttaactttagttattattattactatcttttttcaatatccttcccatcatcccctctgccactggcccagatcatcatcaactctcacctaaattactgtaattgcctcttaactaaacatctttcctctaatcttgcattcgccaatatattctctacctaggagcaaagttttttgaactcaaagtaaatcatgtctttctcctgctaaaacctactaaagacttcccatagcttttagagtaatatccaaattcctcaacatgcacataaggactgctttttacctcaaaggaaggtacagcacagtctgttatcccgtaagttccagctcaactttcgtgatctgtcagaaccaaaagctctctcatgttcacacatcacaatgctaatatcacacctattaattttaattggagatcaggtgattgatctgtcagaccccacagaaatgtgattatctttagttccgggactatatttattcatctttgtacctcagaaacttactccaatgtttcacacacgaatttgataattgttcgctaaataagtactgaataagaataacttattgaaatattcaatctcaaatgttatgacaaagataaaaaccatacctaaaccagttctcataaataaactcaacacttaaaaactgcattccttttagtaggaaaaagcattctgagttatagaaattcttacctgaatatatttcttgctataattgtaacctggctgtagggatccgaaatctactttatgtaatttactcagcggctgaacttcaggcaccccattgacttcctttattaattcaagtggcatatcagttctgcttcacactgatgtccaaagcaaattcaactagggaatctgacaacttgctgctgaaaatacaaaaccagtgttttacccaaaatgaagtcaataatttgctttaagtctctttgacttagttatgcttttccttattatagttaacacggttcggggttggggggtgacaggaggatggattattttacaattttattgcaaagatcaatacaaaacattcttccaaggaactgaaacttaaccattttctacttagctgcgtaaagtacctccaaaaagccagttttaagatctgtaacgtcactaacaaacgcttttaacattgtgctttaaaatgtaaaatttattggggaagagggaggctgaaaaatcgtgtttttttttaacccccacgggagctgtaatattgtatagacaaactgtgcaccaaaagcatcgtactccaacatgtttctgtggccccctcccttcacccgctaaataaatgaagaaacaaaaattactgaactgagattaacttctgcatcgtaggctcaaccttatttcacagacctcttgacggggacactcactagtgtcgatatctaattttaatgtttgcgcaccaaccttcccccaagccacctgagctctgtgagggcggggacttggacttaactcctgtctgcttctcccaaaacaccaagaaagatgctgaacacagcaggctcgagataaacactcgtaagaaagcgtttctctgcgataattacatcaaattttgatctaaactaattcaatcccgggcccgttacgtctggcacccactcaaatgaacacaccaaaccttacaaatttcactcacccgtactctagaaagaaccctaggaagagtttaggcgggcgcgcaggtgacgtcacacgcacgctgacggttcagctccacgcatgcgtgcaggatccctgggcatagtcgcttgttctccgcccgcggtggaccagctgcgtaacggttcacacactgatggcgcctggaggtttggcgaaatactgacaggatgcgacgtcaacgggagcgcagggccaaggtacaggccccgcccagtccggtcacatcccccggaattctcgcagctccccttagctccgcccccagtgactttccagctttcgtggcgggaggcaagcttaggggaagcgggcgggtccgctgggcgggatttgagcttccctttggtagattcgaagctcctgtaggcagagcctttcttttaatgtccagttctcttcctccaagaaataggcacctactgcagtctttacaaggaagcatttacaaggataacaatgttatttgggagtttttatagtaatttcgggcattggcataatgccaccattgagtcttgctatttacagacagatttgattaaccttgtcattgttttatagggccatgattttgtggtataattaatatttattataatttattttataggtttattatagtttatttaatatttattataacttataattgataaatattataatttatcatttataatgataaattgttaaacatgaattctctgctaattccagatatatgccttcaatcatttaagtgaaatcatcctagtgtgaaactaaatgtaataaagaattacatgaatatttccaaggctaatttgaactaaaatatcttctttatatacatatttgcaggaggatatagctaactttttttttttttttgagacggaatctcgctctgtcaccaggctggagtgcaatggcgcaatctcggctaactgcaacccccacctcccgggttcaagcaattcttctgcctcagcctccctagtagctgggattacaggcgcaggccaccatgcctggctaatttttgtatttgtttagtagagacggggtttcccattttggccaggctggtctcgaactcctgaccttgtgatccgcccaccttggcctcccaaagtgctgggattacagacatgagccactgtgcccagccagctatgtttgaagtgcctttttaatcaacaggaagcattcagtattagcccatctcctgtttcccctccccatccctgtagttatatcccacgcagaagccggggtgacaagtgcatgaactcaggagctgtccatttgaggaaaactatagggaaggtttagatgctatcctccttccatctctggctgcatccggctgagaaatactattcctcctttttatgtgaagccctccacatgggctttggaccctgaccaatttcatctcccttccatcatcatcaatatattttctcttaatgtattttaagctttccttcttttattcattctttcccgtcaccatttaaacacattctcccaggctcttgctctgtcgcccaggctgaagtgcagtggcgagatcatagctcgctgcagcctggaactcctgggctcaagctatcctctggcctcagccttctaagtagctgggactacaggcacaggccaccacacccggctaattttttaaaaaaattttgtggagacgagttctcactatgttgcccagtcagtctcacactcctctgtgggtactaaatatttgttgaatgaacaaatgctgaggaaaactgtttatcttacttctgacttccacccctccatcccacccctgccccccaccaccccattacacttaaactgcccttagaaaaaccactgaagaactctttattgctaacccaaaaggacatttttagtctcatatttttgaaaacattctttgtgctacaacatggtcctagttttcctcttaccttctaccaactgaatcttttaaaatttctcataatctgtttagcctgtaagtatccatgttctgtagaatgtgatgaagatgtctaatagaggtatacgtaagtccttttattttgttaaagtggttgttctcagttcctgtgggacacaacacttcctacacgttcaagtaacttccaatcttatttcttctgcataatctcccaattagt

SEQ ID NO: 586838 - DNA, 4001 bp, Homo sapiens
agcctactatctgtaaaaatatgtcctgattcatttttttaagtatatacctgagcctttaaaaagtatatgcctttacaattgatttccaataaacaatactgaataacaaactacaagtgactttcctgattttttcaccagaaatatatagaaaaaggaaatcctattcttattagagattgaagtacagtaattctgcacggtattaagaaccataactatgccatacagaagacaggacctgcaacctaagaaaagttttattaaacaggacaagacagtgatcaggggctcaagttttatttcaatatgcaaaagtcatctattgtaacagatatttatttcattccctacaccacaattattttagctatatttgatatatttgctcgtcagtgagtacttacattgaaacaggtattaagagtatataaaatcagtttatatattttctcctgcctagagacttcactttatatatgcttatagaacaaaaattaacttgaaagttttaaaaaatatttctctgtcgaagcaaatatctacttcttttaaaatagtgtgagcctgtgaaaacatggtattatgtatttgacattttccatctaaaaatacattatgaagcaagcatgctggtattaataaaccatgtgctttcagaaccctgaagtgcttttctataattttgttgaaaacagaataagatgatatattttccaccatgctattaacataaagcaaacaaattttatgtcattgccttgccagcttgtcttgattggaaagtgtacaaaaaaaaaaacttttaggagtttataaatattcgtgaccatagtctggtttatgagttaacaatccataagtaaacatagataacttagaaaaatttagtcaaaaatacattacaaaaaagaaaagaaaccatgtatatttcctttttccttaccccacccccatcatagtcagaaaaatcaccctccctttgcaggagggtactatccttccttccaccactttagttatctgaaggcaaatgaaaatacaatgatccttttcgttttctgatttagcttacaacgcaaacattttaacacaaacataaactactgacttcacggaaagcaccaaacagaaagagcaagattcactgacccatttggaagacaaagacgacagagcgggaaagctctaaaaatcagcttgtgaggcctctgagagatattcttctggcatttcatcacagcagccccagaccagctcacctccctagatacaaggaggaggcactaaatggagctgtttattaaagctgctgtgctggattgcattaggaagcgcgagcagaccacctggacctttcaagattgtgacagtgtttaatttgcagcctgcccttctgcagcagccaagactactactacatttaccgggctcaatcacacattatctgggttagaagtcaaggcacatgtatttatatatttatatttcccatatggagaaagggagagagggagagaaagagagaaggagagagcacagtcaaaataaaaatattgaacagcattagaaaaatattaactactacctaggaaaccacacttgattctcttctcgcactttctttcagagatcaaaatccaaaaagaaagcaaatttctaaaatagatttttaagaaacattcagaccaaattataaattagatttattctccagtgtttttgttgttgttttagtttttgtttaaaaggatcgcattgaagttttaagctgaggtttccctggtcagatttaatgggtgccttttgcctttcgcactttcagcactacactggcaggtagctgaagatacagatagaaagatggtactgtaaatatgaattatgtgaatcatatggtgagacccttgtggaaaaaaggggagttgagaaatggctgactccatacctgaccaattacagcttgcatggtccccgtgtcctgctgcgctgagagatagcaatccatcatatgttgtctttgaaaaggagaatgggggtttctggcatgcatctgtcaatcaacttctgcactcacaaccatcaccaaaagcaaggggaaaaaaagtcaagctgctccaccaaatagaatgaaaccgtcatgtgacctccggcagacacgcacacacacattcactacctccacagagcgtaagaattttctgtagatatgaaatgacattgacaaatatccaataccaagtaaataaagtgagacaaacagctattcaccaaagacaaaaacatgggctgtaatcttccgctaaaggtttaacaaacctatgaggattgtttttaatgctctagaaatctatgtttaaaacaaaacaaaaacaaaatgaactatctcaaatgagtgtccattaagactttgatttttgtgctattatatacatttttaaaattacagttcattgctctacttttcttaaggggtccctaatgattttatttttaaaatctctaaatgaccttttgataatatgcagttatctctgttgttttatataaggacaccttttcagagaagcttgaaatgtgaactgctacataacaaacaccctgatatttgtgaattggaagtggacatagaaaataatccgtgtaaatgatgatgaccactgtaatataaaatattcaaagtgtgtaaatagcagtcactaaactttttatcttctgaaaggtaagggatgatttacttgcagctcatctaaactgatgtaatgtgtttttaatgtgatgacaagtattttaactttctaaatttaattttaactatctgattcctcacaatctagggacagattgctaatgcattatgggtcagttattgttaagggtgaaaagaatataacttaccaactttttaaccttcttaggctaaagatcggaacctgactttcaagacaatcctacaggtattgtaaagttgctctccaaaaacccaaacccataaacaccatccgttaacttggtggctttgtggcagtgaagaacattcgcatttgcctactttttttctttttttttttcatttgcctactttttaactgaagttcattagttagtatactctccctaacttttcaaaacaaatttatgggaaaaccttgtgttaatattaaaatggagatttttttcaaggctctaaactgatgacaggtcgggtagcaatgagaaatatttaatacagaatatatactattatgtatattattgcataatacccacggcttgaaaattaatcaaaaggaacttcaagtaagaaaaaaaaaacaaaacaattttcaacattgttaaagaaatctttaggagcaaagaatgaaggaccgaagcgcgcgcgcacacacacacaaacacacacacacagacacagacacacacacagttaaatcagcatccccaaataaaatgagaccgtgcaccaactgggtagccctcctgggagctgagggctaactgaggaaaggcccttctcaacatcattaaatgtcccgtctgcgctgaagtcctacccgggggtttctgcagttatcccagatcagaacctcaggcttcccatcatctcctttggccagggaaggggaggccagggaagccgagcctggagcatcgacaaggactgagccaaacttgcccgaaacctgcgggctcacagagggcagggggcgcgactgctcctggcatcgccttcttgggaccccgcctgggcggacactagacagaaagccaggtgacgggaccagtgggaagttgcggaggaggggcgagctgcagtcccaggccgcagcagccgctgagcagccgcccccgctttctaattcttggggggtttgcagccaagcctggagcgcaccccggcggcaccgccctcctgggcgcccgggagccccgcgccctccgcctgcgtcctcggacttaggcagcagagccggtgcgcggatggcgtgagccccggg

SEQ ID NO: 586839 - DNA, 4001 bp, Homo sapiens
tacaagccctttcataaaaacagcttgtttaaaagtagcattttataagctatttcacagatgtgactgaattaactactagtatccgtgtgcacttctcttatagcaatgtacttttttttttttgagacaagagtctcactgtcaccaggctggagtgcagtggcacgatctcggctcactgcagcctccgcctccggggttcaagcgattctcctgcctcagcctctagagtagctgagattacaggcaagcgccaccacgcccagctaatttttgtatttttaatagaggtggggtttcaccatgttggccaggacggtctcaatctcctgacttcgtgatccgcccgcctggccaacgtacttattttttagtttttaggtatttgtacctagaatgtatggtctttctaaaacatcagcttttctcagagctttatagtcggtacgtttaagttcctatggcttccctttcagactttcgctaaagccaaagccctcattggcagttacccctccattctcatcaagacctgcaagtcctttctcatttccctgaagctctttgggtaacctgatgcccaacattaggtcaggccaagtttccacgaaagcccttgtcacttaccagctttgactacactcataggtggggtggggtgtggattaacatgcagtgtttcagtgcctatgtgccaggcactatggacagggtaggcaacaaggaaatcgctctgtcctcacgaagactgcatgaggatcaatctattttcggaataagatcccaaactagccattggtggccttttgagatgtgatttaaaggaataaaaccactaacatcctatttcgctactccctaaggtctatccatgttaactggaacggaatcgtactcaatatttaactttgaagacacgcgccaagtttagatactatgctataattacaactgatctttaagaactcatttaacgctctcaaaactaattaggtaatcactggtaatccaccttggtcggaagaggcctgccttgtggccagtcgcaacttgcttgctaggcagagggacaatcgggaggggctcaagagcgcctcccccgccagcgccgtcactgcagtggaaggcggtccttgggcaccagcaaaggcaaggcccattttcacatttccgcttgggggtgggggacacggagggacgtttggggcacatgtataaatattcctactttatccaaatggaagatatttcaagtggcaacccgtcacatcccagcaagtctccttttataacatggcctcccgggatctacaggaccgagcatggacgggctcacaccgcgcctcgatccttgagaaaaaccctcaagcaaacagcttcccagctcaggatgtaaagcacccatgcctgccaggggacagcttcccaggaaggcggtcgcaagcccccgcgagcgtgcttctggctccggtctgcggcgcccaggccaagctagggcggagcccaacgactctcaaggcgcggacctgagcgcggccgccgagcacgtgcgtcggacaggacagggcgcggccacatgaggcgggcgggcggacgcgggccccctcccccaacggcctcgcagccgccccgcctgcctttgtccgccgccgtcccggcctcctccccgcgactcgcggacctcccaaaatggcccctcgtcaggaaatggcgccgcagcccgcccgcgctcgcccctcaagcagggtcgccccgcgcccgggcctttggggcgctaccacccaccccgaccccggcccactttctgggccccattcccgcacgccgccgcccgcccgacctcaaaggagacgcggcccaagggctcgccgtcgacggcaatgtcgaagaacacggtggggttgaccatggctaatagtacacggttttcctcggcggtggcgtctgcaaaacggcacgagcctggcctcccgccccttttataccacgttcggccccgcccgcaacccggtctcgcgcctccgtcccggccaatcgggtctgcgacttcgccagagtgacagtgcatctggcctatagacggaagccggcgctgatggggacgacacatgaggcgcgcgtgcgcgctaacgcgcggaggcaggttcccgcctgcgggctccgtcgcggtggctgcggcatgggactcggggcggggcggcagtacgggacgcggggcacgggggagggtcagtgcggaacgggggtgggcagcatggcgcgcgcacgcgggagacggaagcgcggcggctcttcggccgttgtcaagcgatgaggcgcgtctccccattgcacagagggggcaactgaggcgaacgcaggcctcaaggtcgcgccgccagtcaaggtcgactggggtcccgcgcccggaccctacgcctccgcgagcggaaatggggatggcgcgtccccgagacctaggagcagccttgcgtccgcattccgcgcgggcaaacaccacgtcgcgtcctaccaggcaatgtcaggaaggaggttgcctttgagcatcgctgttttctctaacgaggtgggacaggagcagtctccggttttgagagattatgaaatgctttcaaaatgctctactttccgaaaatatcttacactctgcttgaatcttcttcaggaggaagccattaaaacaggagcctggccaggctcttacctgtgaagatgcattatgcacattttgccctcttactctttttgaatctctgctcctggtctttccctgcccccgccccgcccagctcctaccgcccccgcctcggggctgaattgtgctttgatttttgggtgaaagataagtcacaatttaaaagcgaatttcttcaggcaaagacattaataatactttaattaaaatgcacttgtaggccaggcgcggtggctcatacctggcgctttaggaggcgcggaggccaaggccggggaggatcgcttcatcttaggagttcgacaccggccaccagcctgggcatcttagagagacgccgtctctacaaaaaaataaataaaaataaaaattagctgggcgtcgaggcgctcgctactcaggaggctgggcggggaggattgcttgagcccggaggtcgaggctgtagtgggcggtgatcgcatcactgcattccagccgggacgacagagtgtgaccctctctcaaaaaataggccgggtgcggtggatcacgcctgtaattccagcactttgggaggccgaggcgggaggatcacctgaggtcaggagttcaagaccagcctggacaacatggtgaaaccccatctctacgaaaaatacaaaattagctgggcatggtggtgcgcacctgtagtcccagctaccccctcgggaggctgaggcaggagaatcgctggaacccaggaggtggaggttgcagcgagcagagatggcgccactgcactccagcctgagagacagagactccgtctcaaataaataaacaaaaatataaaataaaatgcacttatgtgactggtgttttgttaagaaaaccttacaagggaattcatatatcctgggctgtcacttaagttgcaatattaaggatattatttaatgtttctttttgtttttttgagacaaggtctcactctcacctaggctggaagtgcagtggtgtgttatcggctcactgcaacctccccttcccgtgctcgagcaagcgtcccaccttagcctcccaagtagctgggactacaggcatgcacccacacccagctcattttgtgtgtgtgtgttttgtaaagatggggtttcgccacatcgcccaggctggtctcaaactcctggactcaagcgatccacccgcctcagcctcccaaaagtgctgggattataggcgtgagctgctgcacctggacgttgtttaatgtttctaaaactcagtttcttcatctgcacaaccaggatagggttgtggtgagacaaaaatgataatt

SEQ ID NO: 586840 - DNA, 4001 bp, Homo sapiens
attcacactaagtgacataaagacaaaccacaaaaaattcacattctttcaggtcaggctttgctaccaaatgagtttgtgttgaacttaacaacaaaccttttggttttcaaaatgtttcagatttcttaattagagaatgaaagagtattgatcgaattactcttctggttgtggttgtttgacagaatgtaggtattcagtgtagtatgcaagagaccaagagatatgatttcagggtttgagaaaggatttcaggatttcagattttaaactcttgtaacttcctcttactaatccttaccttccttttcacaagggacaaaacctttctttttacagagagatacttgtaaatgcaaataccactaagagcagcaatatgtaaattgatgtcacaatacacagggattgttaatgacaaaggtcaccttctcttttgagaacaggaactgaaagggggaaggaactgggtgccagaaaagggaccccactatattgcagaaaggcaggcacaccagcggagctgaaacacattagttggttcagtgtgtggtcagaagctggtctggattttttgtcttttctcttatcattgagcggttttctcagttggatgtgagaatatgcggtttaaattatgggaagaaaattcctctcaactttaagattggatgctgtgagtcaatataaggtagaagccaacgtttggctgcttgtaccactctctagctgggtgaacttgggacagttatctgttctctcaaaaatttagttttcaaatctgttaaatgggggaagatagtggctcttctccagggttgttgagagtattacccatagaatgtgcatggagtcccgagcccaggtcctacacactgatattttcgtgagtgtgagggaccttcttggatctttcagtcctccatttgtgattatatgtctatctaaattgatctatcagaattatctctttatcccatctctggccttctctgaagctggtaatgagatgagaatagttcaagacaaaaaccaacccatttctaaatcttgggaacataatagaactgattctcagaagcgagttgacacttagcttaccatacggtattctgaagaatatcccccaaagtaatcaggtcttgatttactggatggaataaaagggtagaaggttgtatccacagcctatgtggtatctcgttaatgcaccctctggctatgtaaaatacatattcattgtcaaacctctttttaaccagaggattgaattcaggtcaaaaagtaccgtcttttaaaatcagatttgttcatttagaaaacctaaattggcagtattcctggaggagagactgacttaaagtagggcatggagaatgtgttttgagaagcatactttctgtactttccccagccttggaagataaacctctctatcctgtgtgaatatgcagatacaccaacttcatcttgaaactttgcaaatgagtttgtgagggttcagtcttttacagaactccattccctcccttggaagaatgacttgaaagtggtaactttttctgctgtccactcggccccagcttagccttgctccataaagcacaaccccgtgccaccagctacagccttctttgtcccagtaactgactggaaacttgcttttctcaccacaaaagttcttggagtaaaaatctgaagcacttaccaatcagcgcagatgcagggaagcgaaggcgagagacagggagggcgtgtgtgctcaccgaggctgggcctggctcctctgcggcagtggctgctgctggccggctccagctcctcttatctagggaccagctgctgctgttgccatggggatgctctgtttcacaggcaccagggcaagggggatggagaaggaaagaggactaacatctccatcgctgctctccacggcaatcattgtacattacaaaagtacagtatagagtcgtgctttgagtttccggtgtgcacaccagagaaattcagacaaaccagctacatcattgaattcccatgcgatagattttttttggcctgattttgtaaatatggaaactgaggcacaagaagttaagtgatatgcccaagagaggccacagctaatttcgactctcaaagctatttaagtttaaatccagagtactttcaatcactattgctgcttctcaaagtactatcatgaggaggaagagaagggtagctactgctaacatttatgtaaggctaccaaaatgccagacactcttctagagacttcacacatatctacttacttaaccctcaggccaaccttgtgagatgagctacagtcatcatcccattttattgatgaggaagctggggctcaagagttaccaaatcatctgaccaaggtctccccacatggtgaagctagggtttgaatggggtaatgaaatgctagggtccacgcttgtaaccactttgcaatacctctcagcaaagagagcatttcaaacagcacatagcaaagaaagcagcccccaactctataggttatagtgtgcaggccagaaaaaatttcctccttcaaaggaacaaagccaaatgtaccaatattaggaatacgtaggcactcaagagtggatgtttaagcaaggtgggagaggcgggagacatgctgtcttttggagaggaaggttctatgttttgggtctgctcactggaggagagcccactggggtttggaggagcagcagttttgactccaaagcaggaaggccagtctgggagatcaggtaggtatcaggacccactagaagggctccagaccccctgatagcagccaatggaccacccagtgatgcccaagaaatatgttctcacagaagatacgtgagcaccatccacacatccatattttttccagtcttacctgaggttccctgcagagcaggtccctggcaaccccttggtttcaactgcctgcttgccactggcaatgtgtttgttggtgcctccctcccacttgccaggatcccaaataacagggctagaaccatagtaaactcaccaagaggttgactcctagggttagacttttgccatggtaacagataagcagagaatggacttctttgcctgttccattttgtgttgatccttattgggacctcctgggaagagatgagggttgctgaaaggtgatgctcttgtctaggaagggaaggccctagatgttgagggacagggcctagaagcaggtctgtgttcaaaactgcctgctttatcttcttcattttttaaattttattttattttcagtgctgggacacatgtgcaggacgtgcaggtttgttacataggtaaacgtgtgccatggtggtttgctggacctatcaacccatcacctaggcattaaaccctgccttactttatcttcttaacaacagccttgttggccaatgagttagcagcatcttcagtccacacttgagtggaaaagatatactttccttctgaaatccttgaattcttcttttgaattaaactgttttgaggtaatagatctacatgtcgttgtgagggataatacagggagatctcctatacgtaagcagttatatccaatggtaacatcttatgaaactatcctacaatatcaaaaccagtatgttgatatttacatgaatatatacagaacatttctgtcaccacaagcctcccttatcttgccgttatatagccatgcccccctccgttccttcctaacctcctgctcccaatcactttttaaactcggcaaccatgaatctattctccatttctataattttgtcaattcaagaatgttttaataatggaataatacagtaggtagccttttgggtttggctttttttttttcactcagcattattccctagagatccattcaggttgttgtgtgtgtcaataatttgttctttgtcattgctgaatagtattccatagaatggaccacagttggtgtg

SEQ ID NO: 586841 - DNA, 4001 bp, Homo sapiens
caagtgattctcctgcctcaccctcccaagtagctgggattacaggcacgcgccaccatgcccagctaattttttgtatttttagtagacacgggggtttcgccatgttggccaggctggtttcaaactcctgacctcaggtgatccacccgcctcggccttctaaagtgctgggattacaggcgcgagccactgcacctggccagaaggctaacttggaaagagttgacggtggaggtaggcaaaagtgctttggatcaaatgcccagggacgggccagcaccttttttgtgctgtggaatcagacttacaggcaattaacaacatgaagctcttcgggggcttgttaggtgttactggaacttcgaacatactgagtattcaggtcaggtgtaaacaggatgggcaaggctcttaaaggtaaaaagcaaggagataatttcagtaactcagtgcagacagctggcttgcaagctccttgagacaggtaatcatggaaggttttcgtgaagtgtgataggctgggctctgcattttgagagatcagaataagtgatgcagagaacaatcgctacctgatcaaaaacaggcagtagctgtggctgaagtcagggagaggcaggtaaggttgtgaacggaggggtatctaagtaaacctctaacgtggacagtgttttccacttgccatgactctaccaagttccaaaaaggcccccaaacccgacttccaggcagcttccaacctgaggctaagtggataaccccctagagagcttttaaccccattttaggcctccaagaagagtcccatttattagcaaaattactttattctaacaaatagtttaacacaaaaatacgaactagccctccagggatctttggggtctacgcttcccatcgcctcagtgtccggtgcatgaggaaggtgtcctctgaagggcggggccggagttgaagtcggagagggggcagaccgtccagggtcaggtgtggagattcataaaatagcgtttctgggtcacacaagatggtcatgtctggcccaggcccaggtggctcctgttgggaggttgggcccaaagcaaggttacactttgggaggaaggatccgggtaagggggtacatggaggaagccccacgcccagaccccatcacctttgggtgcggggctcgagcctgtggcggcaggagagccaatttctccctgagcgcggcattcagaacctgttcctccggcacctgcaggctcaccaggtcccggaagagccgcttggagcgcggcacgttcagccctgagagcgcagcggggacggaggtgagtggcgcgcctcaccccgactcccgcacgcggccggccgcccgcccccctcaccctcggacacgctctcctccaggccgcagcggatctggaacgactttctcagctgttcctccacggccttcgcagcatcaaagtggctcccggctgcggcccgcagctccaggcccaaggccaggctgctcttcagcacgggcatctccagctcctgcggcaccgcaggctgcggctcggaccgcaccggggagggcggcgtcaggcggaagcggacctgggagcagagggcagggcagtgaccaggtgggcgcgaggccgtcgcgggccgggggccagcctcccccgctcacctgccgccgctgccgagccgcgccccgccgctccgcccgccccttccgccgcccggggctgccgtgccgcggctgagggctgtcgggccgcgggctcaggctcaagtccaggccgggctcgggcactggggctcggagttgcgggacttggggctccgggggtggccccgggaccgccgcggcttcttccccgtccgccgacttcagctctgactccccacaacccatcatcatctttggaggtgccttgagggtgcggggatgcgggggtcgcagacgctccaacggtcaggggacacagcctggctgccgcctcctttcccccgcccctcctagacgccgctaccggaaaccgttaaccctttccttcgggggcggagtcagcagccccacccaccctgttgtcgctcccaggcgtcatttccctcgctccgtccccaggtttccggcaggcttccgcactcacagccttggcaccgcccccaagccgaagtgttggaagcactcacagccttggcaccgcccccaagccgaagtgtttttgagctggggtcggttgaagccctacgggtcctcatcagggccactcctcctcttgaaaactctgctatggctgagttacccagaggaatcttagtcctgctagcgctgcgatgcccattgcccagtgtgtcagtcctcattctggggcgccaaatggggcagcatttttttttttttttgagactgagcctctctctgtagcccaggctggagtgcaggggcgcgatttcggctcactgcaacctccgcctcccaggttcaagagattctcctgcctcagcctcctgagtagctgggattacaggcgcgcgccatcacgcccggctaatttttgtatttttagtagagacggtttcaccatgttggtcaggctggtctcgaactcctgacctcgtgatccgcccacctcggcctcccaaagtgctgggattacaggcatgagccaccgcacctggccataaatggggcagctttaaggtaacggtccagtgtgccctgacctcccactcagacctgcacagcatttccggtgttccgttgcctccaaactcggaccggagttggcctgtatgagtgcgggcgagggtcgccgaccccatcccggactcccttctgggacacagcaactcttgcagctttttgtgactacttttaccttcgagagttccctgaaatattaatttgtataaaaagtagatatctggcacgggtgcggtagcgcatacctgcaattccaactctgggaggccaaggcgggaagatgtcttgaaaccctgagctggagacaagcatgggcaacataccgagactccacaccaccattcccaatctctaccaaaagaatttaattttagccgggcgtggtggtggtgctcacctgtagtcccagctactgggaaggctgaggcgggaggatcacttgagtccaggagttccaggctgcaatgagctctgatcataccactgcgctctagcctgggcgacagagcaagaccctgtctcagaaacaaacaaaaaactctgtattgtgggttcaatgttttattttgttttttgagacggagtctcgctctggtgcccaggctggagactgtggcacaatctcagctcactgcaacgtctgcctccagtgttcaagcaattctcccaccttagcctcccaagtaggtgggattacaggcgcctaccaccacacccggctaattttttttgtatttttagtagagacagggtttcaccgtgttggcctcgaactcctgacctcaagtggttcagctgccttggcctcccaaagtgctatgattacaggcagtagccactgcacccagccttgaattcagtttttttaatttttaatgtcagtggacttatcctgggccctgagcttttccacatagcagaagacccctgaactgcagaaaaggaaatgagagctcccacctgctccttaggttacttggggcaggtcccctcaattctgcaagtctcctttcattttttgtgtagaatgtaagtggaagtgggttcaggaatcctttcttactctttttttttttttttttttaattctccaaactgcttcaaaaaggttcaggaatcttgaagctttcctggaattgattgatgctcagtcaacaggcacgtttgtgtaccacttttcattatgagtttccacattgttcattttatctttccaggaagtgctgtggaacatcagatagaatggatagcacagcccaaattttacaaaaaggattttaaaggaagatctcaatggtggaacactaga

SEQ ID NO: 586842 - DNA, 4001 bp, Homo sapiens
atacattggaacaatgcatttagtagttattatttatcgtttaaagcacaatttttaaaaaaatttcccaatatcgtatcttatgctttgtattaaattccccttagagaattaaatctgggtgtcttgattccaaaacagttccctttcctatttcctatatttcctatttcctacattacactatttctggtacagttaccaaaatccttgggtttagggacagttaagatggaccactcagaggatgatcaaacatttgcctgtggctggagcaatgtagactttccctctgggatactgaggagcagaaggggtctcacttctcctgaatgttttctctacttacctagtgtcacagaaattagccagctatgtactatcgagacagctgaatgccagtttttcttatttttcacattaacaagagagtaaggttactaatgaggggtcacatcccaaatctctaatctatatagctgaatatccctatttatatttgggtcattttttgttctgctccattgacttttactaaattatactaatttgtgttccataatgttattcttggttataattaatgaaattttgtgtgtaactcatatatcactgatatacttatgtctttctgttaatcattaaggtcatttcttttataatttaaattaacatgtatcacttcaaacatccctgtataactcaaaacagttatgaagaagttctttgcagcttttgggagaagtttacaaatttctgagaactagatacatattgaaatatagttttatgttaatcaaaactgtttcaaaggaaagcatagacatttaaaaacgactgaaaataaaagtactttaaatgtcaaagtaaataattttatatgtgaataatctagatttcatggtttgagcaggaataatttataactcattaggcaagtaatatacacagtgcacttctctcccaacctattgcattacagccatattttttctcacatttgtagaaagggttacacagtgctattatttgaatagctttgaccttgttaaagcctggcaccattgttttttacatagcaagcagtatatttttaaatagagtcactttcttacaacacatgaaataaagaatgacataaaaactttaagattgtgaataataaaatatgtaagatatatcctcaccttgattttacctttaagcagccttttatttgtctgttaggaacttctttccatggttttacaggctccggctcttgttctttcttttgacaaatgaatgtataatttgtgccattattatttgaccaaaatgtaccaacagaagtttcataacgtatacaaaactcaactttactgccatctttttgataaggaggaaccaatacaatcttaaaggagaactggtcagtttcaccatcacatgaattaggaacatattctgctaaaatgtcataatgtgtctgccagtcatctaaagacattcttacatatactaacttctcaaaagaaacattcaaaactcgaataatacccttgatacttgtagacccaagaagagactcagttgactccagtattgctttctgtatttggagttgttgcataagatcttcttttgaagaaggcaagtcaaacagtggggctaaaacatattcttctgtgtggaaaatgtccgtccctaagtcaaaagtggttgaagcactcggtaattcccagcaatcaaattctttaacagacacaagattgaatccaaaggaatcagcaaatgaaactcttctagtacctgaagatggggtatccaggtatatgtcttcagaagaatcagaacctcgtctacttggttgaggggagaaaccaggttggaaagtaacttcttcatcttcacaaagagagtcagataaattaggaacttctaaaaaattatctttgctaatctgactaggtacttcagaaggctccattgggctctctgatatcaaataagagagaactgtacgactagtagaggctgacatttgagatactgaggcttaaaataggtataatgttacagttgacattgcaaaaagaactcagctctataaataggtccaatggcgtgtcaactatgctagcctgcaaccctgctagcctccccctaaaggccttgcatatgatagcatccatgctactcccaccagtatgtttcagatttaactggcagtttttaaagctgtatttgtttatgagctaagttccaaacagatatttttaaatcatgttctgctgtattggaaatcctggaactttaggataaaaatattattttaattagttgatgttaaaaatgaaaatgtggattttttttaaataaaataaaagtagtatcacaatactgaatatgtagtttggactaaattaatccatggagcaggtaagtgcaaacagggaaagataagaacatttatagaactgaagagatccagagcctactaataatgacagctatcattttcagggatttataaatgtatagctttattacaaaagggttaaatagaggtgctgaaagttctgaggaaggaaacatgattcagatggggaaggtatcattttaaataaagcatgaagggtaggtggaatttagacatgcaaggttggagcaaggcagattgtccaggtagaagaaataacccaagcaaaagcctagaacaaagaagtaatcaaattcattattttaaacattagtacatttattttaattaagccatgggaaaatacagataagacatgttattgatttacaaatataagtgggcaaaggtaagcctgatccaggactaatacatctacgtagaataaaatgttcttttgcaaatggccattttatgcccacaaagcagaagttgataccatcacaccttgaaattcaatatgagttttaaagtatgaacagcctgcttaaactgtcacgttttttttatgtcataaaacccaagttgggggatggtcattttggtaaaaacctataaaaatttaactgcacacaatttgaccgagaaatgccccagctagaaatttgctctgtcagtatgggaaagtatacaaagataaatagagatctatgttcataacagaattgtgcgtttaacagtctctacaaacctgttaaatgtccctctcgaaagagcattggataaataacccatacaatagaatgttttagaaggataaagtagcactttatgtgctaatatggaaagataaccaagataaatggctaagtgataaaaaagaaaatgtgtacagatatgtacatagaaaactcctgaaaggatacaaaagacaatgttagcagtatttacttctaaccacagaatttaaagatggcagaggaatgggggctctattcattttactttatggtctgctgtactgtttgaaatattatacatgagcatggttttctttcaaaatatctattaattaaactgaaaaaatatacgaagtgtgaaaggtgattagtttttctttttataaagagcccaatagcataatttctttcaaatgaaaacctcattaatatggtataacttattaggtaatttgaattgcataaagtagtggatggagaaattattttctaaaattataagtgactagtgtctagaaggataaagaaatgaaattatttgagctttatctcatccacatagctagaatgggtggtgaccacatggattgctcaagaatgggtaatggctgcggaaatgtctgtgcctttcagatttgatgactacaagtagctatatttcaaggtacctgaaatacattgctatgtagtcaaggaaatcagcaacaaaatgctttatggaaattagtaaaatagttcatatagccatgtaaataatgggataatgaaaatttaagatataataatgtactgaaatattttaactatccaggagttagttagcaaaggaatggaaatgaagacccctgggtccatttcct

SEQ ID NO: 586843 - DNA, 4001 bp, Homo sapiens
atacaagctacacataagtatatttgaaagcaatactttagcccaagttttggtcgcttttgtgaatgccctttaaaaagaaaccagcagttcatcgatctttaagaaatcatcaaactgtccagaaaatcaacttcatttaggattctccacaattaggtagaacttattctttctaagtacaattaagtttggaatctatgtttacaaactccaaaacatgcctacagcggcatattttactttttttggtccaatgttctcatctacagcatccccaaagcaatactaatgcaatttcagatcaaaacaaggagaaaaaaagttcctgaatagcaataagtttcactaagttcagttataacaagtatttggaagtttcctaacagtggttattattaattatggagtgggatgcagactaccaagggaataaatgcgtaagaatgtgacaatcagaaagcaaatatactgtgacaccccttttcacagccctgatttgtttattctttcttgcctctaacttactacagttcaacacgcaacgcaatgcatgcttgctggtctctttaagcccacagcaggattttatatcaataagccagcaatcaaatacttcaagatatgctgaggagcagacaatgcaggcagttctaaagatttttcattttatttttgttttgttttgatattagaccgagccacatcaccctcacgcacaatcagctgaggaggcacacactttcacttaaaccgtctccaaactcggctcctggcccagcacgcatgcatggcccatgcagacaaacaagaaaggctttggagtgtggtgcctgtttttttctttttttgtaaagcatcgacaatctccttttaccctgaccattctttttaaagccacaaacaccctcccctctcccctacacacaccccccattccctcccccgccaattccaacccaaggaggcgggggcgggggagatggggccgccgggggattcaaaacctgccctcacaaaagacaaacataaataacaccaacttgagaggcagccgattcccaagcccggttcgggacgcaatccctcggccctggggcaggaccgggagagcaggtgacgccaagcgctatggtaggaggtcgcagtctagctttgtgccaagaagcacctgaagtcctaacacattggctgcagctcccggcggctgccaggcggatcccactgtgacacggagagagacgagctccctggccacatttaaaaaaatagaaaagaaaaaaaattacagggtaatgaaaataaatccctttgtttttcctcccaatgtgccaggaaacaatagatcccactgataatgcctccgatcttcaacctattgctcctccaccacaacccacccccacccccagcctgcaactcagcctttgtacaagccgattttttcctcctctccaccctccccaactcctcgccccgcgctcagcctcccccttacccgagcgggagcgccgcgggcggggagggtcgggccgccgcggctcccaccccctcctcgcaggcgccccccgccccacggtggacgcggcggctcggctcggcgccggcccgctgggtacaccgcaacccgctcctcacggcgcagcgcgtagggcggctgcggcggccgcttccactcgcgcgtcggcccccaggcgctccctgcccgcggcgggcggccccgggaggcgcgctgcgctccccaacgccattgcgggcgggcggcggcccgagcagcgacgcgcccgcacgctcgggccggcctggggccaggggtgccggccggggaaggggtttggcccacgtgcggtcgccacgccgggccgtttcggcggccgcggtgtaatggaggagaggccgcgggggtgaggaaggccggggtaacaggtgcctcacctcggctgatgggattaactctagggccgcagagagagggagcccggcagcaaaatcccgggagagggagagagagggagcctctggcggccaaggaagggcgaaaagcaccggcccgaggcgaggccgccccaccccctcggccgtgggcgaggggcctctccggcctggggcaaggccccttcctgttcgggtgttggctccggaacttggttctggggctgaccgctgctggggccccacttagtctgagtctgcagttaactccgtgaccccaaggcatccaagtcccaggccactctgctgacctggaaggccaagacgtaggcccaagtctggtgtggccttcacctaagccactgcgcctggcctactactcaccttgaccttaagatctcactgccaaagagaaagggatgaggaggtcttctacctttcctgtctagggagagtttttcagctcactcccccccgaaccccgcccttttctaaaggctcagtacaacctcttacacccccaagtaccggaagtgttaccaccttcctgcaagatataaaactgatcatgactgtcaatacagatgtttaaaccaatccttccaaaaagcctagggagcaggaactcttaaaaaataatttttcaagaaggtaaaaacatgacaatggtagaaatataaaatgaacattggtcaaaatttttataactcttttaattaggaagggaaccccagcaagatactgcaacccattcacgtgagactgtgaagagtagacatagaggcaagaagaggcaaatctgcttactattctatagagcactgaaatgtaatgtttattattatctgctttacagggcggtaaccagttgtatctgtaaagtaacaaatttgcattctgtagataaaactcatttacattaccaaacgtttctacagcttactgagtagtaaaatagcctagtgaaagtcagtctaagtaaggtgcagacgactgtaaatttcacaacactccggagtcctgtagataacatccagcattccattgaaaggacaaacagtaatcttttgctcatttcaaagtctttcacaagttttcccaacataactatttttagccccatttcactgatggaaaaactaaggtttaggttttgtaacttacccgcttctttattggctattaatagtaaatgattatggctgaatatgaacccaggcaagtccgtacacaaattctatatactctgggagcaaaatcttttcatttcagaaggattttgtaactactcaatactcagttctatgtattttttaattttaagcagcaagggcttttttttcctttaagcatcaccaaattctgggtcctttcccaagaaattggcattctctgtctacgaagtggatgtcacttctataagcataaacagatgtaacaggcaatgtgagggggctgtggttccaggctccacttttggaaagaacatttctgctgtctgggataatctagtggaaaagttcctgtcatttatttgcagtatggaaaccaggttttttaggcgaataacctaaataaatgcagaatctaatcactgagttctgtctgtagaagagggggcagagttggcaataaagacagtcttacacctctttgcagaaagatgattcatacagaaaagcaccctaaaggatttggttggtttgagttttatcttttgaaaatctgaaacttctggaaaagttcatactgaaggaatgatagagttttaaacccgatggtgagaatttaagattcctagatttcctataatggaccttccatttccaacacttacttgaatgtttgaagggtctattagactgctaatccaatacatgcggctatttaactttaattaaaattaaatacaatttaaaattcagttccttagtcacacaagccgcatttgaaaggcttgatggctacatgtgcctagtggccactctgttgcacagtgtagatacgcaacatttccatcacagaaagttctatcaaacagtgttgttctagaccacattttcacttct

SEQ ID NO: 586844 - DNA, 4001 bp, Homo sapiens
ccttaaagtgtgtacattcagaaaatattatttatgaataattttaggtaaaactaaagtaattacatttcaaactaacactcctggttttcagtactcacaatactcatactccagttcattggaacgtatctcacaattcccgaacttcttcagctttaatattactcactattgatgtatgccattataaagcacatttaagaaatgtaattgatatctctcaaactctgaacttttaaaatcacctgacaacaggtgattttaaaggtatcaacaatcttgaatcccttacaaaaactcctactagttgtcaagtctattctacatacaattaggccctagtactaaaaacaaatttagaaaacaaaatggagaaaacacacttaccttaataggagcactactaaacttaattttcctatttgctgggatttcttcttcttctggcaatccaacaatttccgagtactccatatcaggctgatagtaactgttctcatcactatcttcctcctcatcctgctcagtgcctgtctctccccagtctgaattatacctggatctcaccctatacacattatagtcactgtgcatgtacacatgggaaccatcaaaattatttgaatcttcaggtacttcttttccacaactggatgcagaagcatcaggagaggtgaaatcaccacctgcaagttctttcctctgttgctttgctgcctcccttccaaccaaattagcttcagcatcttctaacagttggctttgtggtgaagggatttcggactttggcattgccttactttcagcacaaggttcttcaggaccatctttgtcaatgctgtcgggagtctgttgattagatgtggagtcctcgggttccttgctctgctggatctcttcaccaggtatcgaagctagagaggtacttttagaagccacttctggtactggagttgcattactcttgtgagcatcctctgtatcaacacctcgcttgtttgaaggaggccaggaattagaatccttcaggtgaccaaatgtgtcaagatttgtaacagtaacagatggtaaattcaagggataatgcccagtcactgagtattcattgttttcagccttctcagaaatgatggcactgggagaatcagtgttctcaaatactgcactcagttgactcacagttggggagacagcctcagttcgggagctaaggctgtccaaggaatcagtactgcctctgttggacttggaacctccccattcatcctgaggttcactccctccagctttctctttctttggggaatagcggttgttctgtcctgattcatgcacacttctctcaaacatctttcgagtctcagtgaacttggaatatgaagggccatcgtacatagtgtcaaatctactaattcgttcagaaacagaagactccaacttaacaactgagccatctgttttttccagaaattctttgggcttcattcttctctgaggagatgaatgtccacctttcccccttgttttggcaatgactgcagcattctcgttgggttccatacccatctgcataaataggtttttaattctgttgacattggagccatatttcctccccctgctctgctgggagccctcaccttcttttgttttttgttccccatctgacttgggtttgtcaaaggtacttttcagtgcctgaaactcagttcgatatgcattcctgtgaggagaggcacttctgagagtggttcgttcacctgaagactcagttttcaacattttcacttcaggggtgaaaagccaatgttcataatgatcaaagaaaaaaaccaaaaaccaagatacctctcttctctaatcaccagtattgggtcaagaaaagtacctctcaaatggtatacggtgtcagtgatcgtcccaacaggtgtattaggaacttagtcacagtcaagagttacacagaatgattttttcaaagcaagactagaggttcatctgcaatagaaaagaatgaatttctgaattcatttacttatttgaatttatgtctagtcaaataacatacatttttttttccaaatggcttagccacgtggcaaacagaagagattactcattgaaatgggaagttaaaagtcaaaaagttatcattctgattggtctttggtaaaaaaaaaaaaaaaaaagttccaaacacaatttggagatacctatcaaaatctcacacacacacaaacacatacacacactcacaaatacaagctacacataagtatatttgaaagcaatactttagcccaagttttggtcgcttttgtgaatgccctttaaaaagaaaccagcagttcatcgatctttaagaaatcatcaaactgtccagaaaatcaacttcatttaggattctccacaattaggtagaacttattctttctaagtacaattaagtttggaatctatgtttacaaactccaaaacatgcctacagcggcatattttactttttttggtccaatgttctcatctacagcatccccaaagcaatactaatgcaatttcagatcaaaacaaggagaaaaaaagttcctgaatagcaataagtttcactaagttcagttataacaagtatttggaagtttcctaacagtggttattattaattatggagtgggatgcagactaccaagggaataaatgcgtaagaatgtgacaatcagaaagcaaatatactgtgacaccccttttcacagccctgatttgtttattctttcttgcctctaacttactacagttcaacacgcaacgcaatgcatgcttgctggtctctttaagcccacagcaggattttatatcaataagccagcaatcaaatacttcaagatatgctgaggagcagacaatgcaggcagttctaaagatttttcattttatttttgttttgttttgatattagaccgagccacatcaccctcacgcacaatcagctgaggaggcacacactttcacttaaaccgtctccaaactcggctcctggcccagcacgcatgcatggcccatgcagacaaacaagaaaggctttggagtgtggtgcctgtttttttctttttttgtaaagcatcgacaatctccttttaccctgaccattctttttaaagccacaaacaccctcccctctcccctacacacaccccccattccctcccccgccaattccaacccaaggaggcgggggcgggggagatggggccgccgggggattcaaaacctgccctcacaaaagacaaacataaataacaccaacttgagaggcagccgattcccaagcccggttcgggacgcaatccctcggccctggggcaggaccgggagagcaggtgacgccaagcgctatggtaggaggtcgcagtctagctttgtgccaagaagcacctgaagtcctaacacattggctgcagctcccggcggctgccaggcggatcccactgtgacacggagagagacgagctccctggccacatttaaaaaaatagaaaagaaaaaaaattacagggtaatgaaaataaatccctttgtttttcctcccaatgtgccaggaaacaatagatcccactgataatgcctccgatcttcaacctattgctcctccaccacaacccacccccacccccagcctgcaactcagcctttgtacaagccgattttttcctcctctccaccctccccaactcctcgccccgcgctcagcctcccccttacccgagcgggagcgccgcgggcggggagggtcgggccgccgcggctcccaccccctcctcgcaggcgccccccgccccacggtggacgcggcggctcggctcggcgccggcccgctgggtacaccgcaacccgctcctcacggcgcagcgcgtagggcggctgcggcggccgcttccactcgcgcgtcggcccccaggcgctccctgcccgcggcgggcggccccgggaggcgcgctgcgctc

SEQ ID NO: 586845 - DNA, 4001 bp, Homo sapiens
ccactgaaccctcagtttcctcattataagcgtgtgtctctcaaggcctactactgctgggctgaaaaaaaaaaaaccacacacacacacctgagatttatctagtccttggaagtttccatgcaagttggggaagcagctggaaggtgagaaacccccagacctaagaggcccacagtgaggcccctcgggtgagtcggagcctgcccagggtgtgtggagccccagggtgccggctcactctgactgcgtcccagggagcttccccctctcacttactctcaactattcacacctagcagtccccgaattctcgatttatgttttggggcctcctgcctgcatcctggttgtatccctaggcctctccccatcttccaacacctacaatccgtaacgccatcaacgctggattccctgctagcccagccttcttcaattgtttactatcacctttgctctccacctgggttgaaaattcagatgcacagaatcaagcctccccccaggaggggggtcaagcgacccccaggtcactcctaatcaccagcactcaaggaccccgaatcacagacttgaagcagacagacagcctctggcttacggaaggcgattgtaaggaaaaaaaaaaaaaaggacatggcttactcaaagtgccatgcatcaatgtcacagaagggcgacaagagggatgctgggtgagctccgaatctagtactttccagcctgcagctctacttgttgctgcaaattcactcaacagtcagggcttctggttctcagcctccccctcctcctctccaccagacagcggtgacagcccacggttcagccactgaggaggccatctacgatcttctcttccttcccttcctctctcccccactcccctcccatctgctgcttctttggattccccacaacttcagcaagcaagtaagcgttgggctccacgctccgcaggaggccaagatacccttcaatgtatatggggtcaagagagtccccagaaaactgtgggccatccccaaagcccccacatcatccccagtcttttctgtttgggccaaaggtaataagtgatgactcaggaagggcaaggccaggcaaagaatgacaacttcgctaagatttcagctccagtaagggaagttcaagccagggtgggaaggcagggaggagaccctgtacccaggacccagtgtgtgaggcagctctgctcagcctggcaggggaggagagacagactcagagaggaatggagctgaacacgcccacacacataccaccttcactagtgatgctctttaaatcaccaagaaaaagttatgtaaggagaaaacatacagcttccgtggagagaaggaacattttgctcagccttggggtatctgatttaataagaggctcttggagaacaaagccacaattcagcatcagtcttacacaccaaggagacaaagcatcgtgagggggaaaaccgcacacccagggacgcacaatcactatgcatttagaaagccagctcccgcaggtctgcttactcagccccaaggggtcctggaggtcttctcttccagatgctaataagcagtgcaggcttgtaagctgctggatggcaggatgcgagtgacggggacgggcggcactcccagctctgacaaatcctgctgcctcactcgaaaggtccatcagagaaggggtttcccagccccttcagcacaggcaatttctagggttcggctgtgctccgagctgctgccactgcatgtctgcaacagatggggaccggggctgggtgtgttcccagtccccaaggcagcgcaacaagcggctggcagacagcatgggctggcctaagacagcgcaggcaacggtcttggtggctggagctgctttgctgctcaaaatgcaggcagagctcgggcagattcccccattgacgggactgcagcaaactgtcattcccacctgtgtcaggcgctgctggggaggaaactccttaccacacagcaagccagcaggagggagggctggaccggagcttttaaaaagacaggcagcaggatggagggaggcaggagcagaggccgatgatgcagcagtggacagctctgggctccaggtcctctggccagcacaacccctgcactgttcccatctaacttcaggcaaaggcttcagaaatctgaactccctggggattcctgtccttggagcacaaagattgtgggggtttttttcccctctggccagaaggatgggtatggctttccaaaaggctctggcagtgaaatccccatttacactccattcccccaactccaaccagacagcctgcaaacatcatccaggagacaacatggtctctgcctatatcagccatgtctctgattttctgtattctgatgctttgacacctggggccttgctgatcctggagggactgccctcccagggctgggcaattcctggagatagtaagcaactcatctgtgagcttgcttttcctatgcaagccaacccacacagacccttcccctcctcacctcctcctgggggctctcacaccccaggccatcacccactacccaaatcaccccagggcaggtaccagacagctagggacagcccctgtacccacagtcccctaaaattattcacagaaaccacaataaagtctcttgcctgcatctcccccttgctccctctgcctcctgcccaaccccgtgcttccccacgtggcagtggtgtgcctagcctcctgcttccagggatctgtgagtatcatcagttccttccttcgtgacactcattcctgagtctgcatgtcttcctgtacctgattacaacaaatcccaggtgccctgaaaacaggctgtggggcagaaaatgaacttgaattgttaggagaaaatgagggtccccatttcagaaccccgccgtgtccctcattaaataaaacttgctcaggacttgaacttctcagcagtggaggaattgcttccaaagatattgagtgatctgttgctgcaggtattcaagaaaaggaggcttcttccacgagcctgtgactcaaaggctatgatttagtgggcaaatgtgttattcaggtaaggttgatggcaacacaaggtggaaaaagattaatgtggatgacgtattcaggaaggcttcctagaggggacagaagggcgttgcatggccatctactaaggcccacggacaaaaaggcggctgagtcagctgggactttggggggcctctgtaggggttggaagtccgtggctttcttaaagtcactttcagcccaggagggtaccaggcaatccagctgtccactcagagacctgacaaatcacaggcctggcgtgctgtggccagatagctctaagaactcacaagcctgagctctgcacttgcctacctgagcaggccattttaagcggaaactgttttttgttttttttttgtccgtagaatgagccatgtgttatgggatgttcctcaaggtccctttcagaccagagcattaatattctgtgtcaacaacccaggtccaagtcctggatcagtcatttctctgaacctcagttcttcctttgaaaaaccaagctgagtggaaacacttgctctgcacacctcccagggctgctgttgggatcatggatgaacacgcatcaggacagaaataagcatcatcctgggatgtgcgggattattctggaaccagagggcagtgctagcataaacctgaggtttagcagaaagctggcgccatttggcgaagatcgaagggccaaacctcctgcagcctgcagccagccccccgggcaccgatgcaagtggtcgaccagagatccggccaatctcaatattttctcctgctggttctggaactagccttgctgggtgagctgggcctgttttattttctgtgtgctttattccaaagcatacatacgagcctgaggaaaaaagcctaattggttttccttgga

SEQ ID NO: 586846 - DNA, 4001 bp, Homo sapiens
ggcccagggcccctgtggggctacttggcatcaggtgtctggagacccgcccctggactccaccctcttcacccaagcgttaggcacgtgtgggccggagtttacacaggaggaccttagcggggcgtctaaaagaagggtggctcagcaaacacggggcagtgcgccctgggattcacagtgggaagtgagtggcctgcctcggccatgccagctgcgcctgaccctgtcgggaaggattagctttaatgaggggtccggacagcccattcactgcgcactcccaccctgccccgggagagcaaaataactttctctacggagcactctggtgtgtgtgtgtgtgtgtgtgtgtgtgtgtgtgtgtgtgtgtgtgtgtgtgtacacaaacatttacttggttggctgaggcggagggtgtgacccagtgggccacacctcccaccgccctaccccgctacgtggaggcgaggaacagtggccgcgggctaccggggcgccttccgaaaagagaaccactacgcggcccgccgcccctctggctggacaaagtgaagccgcaggcagatccgagtcgccaatgtcctcccgggcggctggcgcggacggggctgaagttcaatgcagcctgcacggattagggagctccgagcccccaaataccacagagacccaaagtacactcccggggcgggggaagggaacggcggcagaggagacccccgctccaggcccagaaacgcccggagagaaactggagcggagggggtgcattggaagacgcagctacacagctccccccaacccccgccccgctgctttccccacccaccgcccctcccctctcctccctcccctcccctctctccgtctccagcagccgagcgcgggctccacctccccggagcgcagtccacaccgtcccttttcagcaaaacaacacaacgcaccgccccccgcacccgcacccggctggataccgggctacgcccagccgcccacccgccgcgcccggcgccccctctagtctgcagccgcccagcccccgccccaggcggagccccagccctggctgcacgcgggcagagagagagattgagccccggctccgccagcccagctcgggccctgtccctctaccctttccccaagccgcccgaagtgacaggaggggcacgcacggcgcgcgcggggcgtccagcgttaaccgcttcggcgccggggacgggagcgacaggagggctggggagcaggggaccgagtgctgggactcaccggaatgtgcacgcgcagcgaacgcctcttctggctggcatttttcttgccgccgctcccgccggggctggaaacatcttttttcttcttggtgtccataaccgcgcttcccataactctaaccagaagttgattctgcgaaactcctcgggggttcggtcccctccttccctcccccggccgctgccttcggactggagccgcgcgctctgttacaccctgaagccacctcgtggggacttccgcggagagggagggtgagcagggaactcgcgcggccgccgccgccgccgaagcgccgaattcaagcgtcctttcctacggaaccctcgtaggcaaatcagtcaaagcccgtcccggttctggtgtctccccgggttactcgtggctgaggtctcccgctgggtgacaaagttttcttccttttgcaaagctaagaaacattttccaccctctcggctcctcccacagattcccagaggtaatctgaaaggcaggtgcaattaaaaccagcaatttggaaaacaagcctcctatgcctgtgcccaagtggggaatctggaaccagtaagcccgttcgtgcataaatgtaatcctcggccgcagaataaaccagctcggagcctgcagctgggtccgtcctcctttctgggcgagagggagggcggcgggggaagaggaggtgcaaggcgagccctctgcgcaattaggctacgggcggccgctggcagaagttctggcggcggcgctcgcggccctgcgcgccggagggggcgcccggagtccagcgggccaagaagggcagggcgcccgctcctcgccccccgccgcgccgcggccccaggggaccgcaaggggacagtgaggggccgggcctggcaccgacgcaagctcggggagcgcgggtggtgggaggcggcgcgtgttgaacaggaagtgcgcggcgtgcagcgccaccgtcccgctccccgtcgccccacgccgccctcgtcgccgcgcccagacccctgcggcggccgcagccgcttgggactcgctgcgagctggtttcggatccatcccgcctcccggcgtctcactgtgtgccctaccctttgaaacacgcccccgcgcccgccctgccgtagaccaggcagcgaggaagcccacagtctccgggggcgctgcgcgcgaagtagcacgtgcttctcgaaacaccgcagcccccgggtcccgccccgcccggcgcgcgcactcgaacccgcccagagagcggtgcgtggcgctgggtgcgagcagggtctagccacccccaccctcaccccaccccaccccaccctgcttttttcaggttcatcaaggtttgcgcagtggatccgcggtaagtgcgtgtccccacgccgcgggaaacgtggggctcctgagactgcggaaagaattgggagaaggggagggctcgaagacccgggcgagggttcccggtgcggcccaggtcctttagagccccgggtgggcatccagtaccgcctgctgccgagggccctagaggggttgggggagggggctggtgtgtcccccacccccagatgcgccccaggatggcgcgacctcggctccctggtggaaagtagggggagtgctggcttgggggtcgcttcccctcctgctctagtttctgaggatgtgatgaccccaaaggtcattggcgctcccagaatgctgacgtcagctcagccgctccgagtaatcagtaatgcagggaggccacccgcagaaagaacgcgacaggggtcgctttggggacaccatagggcctttactccttttgaggtgcgtgctttcgcaggactccctccccagaggaggaggcatgatcagcccacccaaaggatcatctcttaggaagcaggcgtgcgcccacgcagggagaagcatccttcctttcagctgcttgccgggtggcttttccaacccgagttccagcagcttgcacaaaatccttacagcttgggtggttccctggctcataggggtgggtttatattctttctccttctcctctgctctctggtccagaatgaagccagcctggaagatccccagtctcgagacagagcctgacaggggcagatgcactggaaggaccctgtctgggtttagcaaccaagcagccatcctggccccacaggtgtgggacttctgggtcttctcctggctggcttcttgctagaggatttcaagagacccagcaagactgtattgtcccactgaatgctcaagatattggttagaagtagaaaaggggagggggtagtatttagcctctgtccccactaaaaattattcccaattgtcatttgtgtcatctgtttagcttacagttttaatccttgtcaaaatgatcatttgccagggtgcataaaacaccctatttgatgagaactggttttaaaggaaaatggggccatcagaaggaagccggttggtgtgaagagacgtctgggaagagcccctggcgagggccctcattccactgggtgacccagaaggagaaaaccgcgatggcgcttctcatttgaaatgttttctttatggacagtgtttagcaattgttataatgtgtacttttgttgattgatctgtatacatatgtaaaataatttgttctctgagttaattttgttggaacaaagactttagtgcttcctacattaaaacattttactgtattgcctgcattttaagag

SEQ ID NO: 586847 - DNA, 4001 bp, Homo sapiens
gaaatgcataattaaattaataaatctcaagtaagaagaagaaaagggacaggacaccaaatctgtgttgagaagaatctctgtgttgggtttcattaataaaaatcttaaaaagctcatgaattcagtacaatgcttaatggcacttaagcgataatagtaactaacatttatgaagtactcactatgggtttacactgtttttaaatgccatgatacggattggctcatttaatcctcaaaacacctgatattagctctattttagaaatgagaaaaccaaggcacagagaggttaagtaacttgtccaaggtcacacagctaaataagtagtagcgattcctctcgaacagaagctgctctctagttcttcttgcctccctgctaatttgcaaaaattgtaactgtaaaagactctcattcttactaatataagagacaaaaccctggtgatttagacattcaaagtcttatggaacgggcacaccattccaccctgtggacagcggccaagatttggcctgcaatataataaaactgaggaatagtgagatgggttcgaatgaagaccctggattatttttctgtaggatgaaatgcaaattaagtccggtaaaattctgaaatgcaccatttgttaccaataaatacagacaaacacttttaatgacaatgactatgaacgcgttctcttccagctaacatgtttgtgaaatgctgcagtgaatctcaaagataacaggcacccggctaattctattgggttaacacgtccatgctggctgtgcaggcttatttaagtaattgcctgactgtgaatgaacagaggtattaaagtaaagttggcacaagggacagcatccacatggcacgttctttgtttcgagagctttattctatcaatactcctggaaaaaagagaagttgctaaataaataatggaagcacacaagacagtgtgaacgccttttcaagtcctcgaattgtcaagcatcttatataaagttctttcccgactctgagctcatcacatttcattttacatattaattttgcgtaagagcaagctcatcccgttcaaatgttaacagcttcaaaataagatcctggtgaaagctcgtcacattccattttaaatattaattttgccaaagaacgagctcatgcctttcaaatgttaacagcctccaaataagatccaagttatttacctgtaagatacaagaagaagacaggagagggaaaaaaaacaaccaagtgagaggagaggcgacagaaatgacggagtgagagggtcgcctgaactcaacaccgattcaataacctcttcaggttttcctatttaactttccccattaaaaaagaagacacaccctaccggtcatatcttcacaggcgcagataagggcaccagtctatgattaaagggtctggactgtgggtatgattcggggttgcctccgagtgcatggtgacaagcacaaacaattagcgctccctgacaccttgctgtaattcgagttcggcgagtaaggacaaaagggccgcccgtccgtgtggatgccgggctcagggctgcgctctgggagcctggctcgcgtcccctccgcggacgcccggtaccccgcagcccgagctcgccggcgcccgcatccccgccccggttcccgccccggcccctgggcttccgcaggacgcagctcgccgtggggcagcgccggagatggggcgcggggtccccgcgggtcccggtcctcgggcggccgggccgtgggagcgccgggccggcagcgggcggggcgcactcaccttcgtcctcgaactccagcttctccagcatgccggcttccgcgggtcccagggccgccgccagcgccgcctgagggggaggaggaggacagcgatcagcatgagctgcgacgctcgtccccggccggcgggctcgcggccggccgagcgctggggcctggctctgccgcgccgccgggaggaggggcctggcaggggacgcgggcagcgggggccgggggcggagcgggagcgctgcccccacccgcccgaggccgccgccgccgccgcaggtggcgcggccgcggcccgcgtgcccctccgcgagtgggacgcgccgctcccccccgcgccttggtacggcccgcccgggaggaagcgtgggaagggacccgggagctcgagggcggcagcgcctgggcccggggcgcccccctccggccgtggcccgcgtcctccccgccgtgccgccattgggagaggcccgcggcccgcccccactccgccccccggcgccgctcaccttcccagcaccggcggccgcgctcggcaggctccacctgcgcaggtgtgggctccgcggcgcggggagggggagaggggctggaggctgcagaacgccccggggcgccagctaggggatcctttctcgctttcctcttccctttccaaattttagatgtaactgcccatcctcggcccccttaacaaaaatcgttccgtgggctacacgtattgtagatgcactttgtcgctatccatttttttttttccagcatggaactcttaattcgcgtcctctcttcgcagccgagtgtcttctcggttggggagccgctgccaaaaacgtacacaccctgaatctggccctggccgctcaggagctgggtatctgagactctactatggccaactcaggttggcaggctgcgcggccagcagccgctagcctcctggaagggcaggacaggccgagaggggactgaggtccctggccccacggcccatccctgcagagtgcacgggcgccgcgaatgcgattagctccagtaccgattagggctgaaaggagcttggccctagcgctcttgcaagccgggcctgaaagaggaagtcctgaaaatgcctctcgtttagctttgtcatcttacttgcgccaatccctaagtcttaaacctcttaaaaaaagaaaaggggtggggagagaaaaagaaaacaaaactaagatgtttcatggtaaaaagctacagcagataccatacttcatagtgaaagactgttttccctatgaagttcagaaaccaggccagggtgtctgctctcactaatcctattcaacatggttctagaagtactaggccctgcaataaggcaagaaaaggaaagaaaacgcatacagattggaaaggaagaaaaacacctgtgtagataacatgttatctacatacaaaatatcaaagaatctacaaaagaaagaaaaaactcacctggaattagtgagtttggtaaggtcatagcatacaagatcaacacacaaaaatcaatcacatttctataaactaacaatgaacacatggaaaaatatataaaacaatatcacttaatacaatcacttcaaagaaaattaatacttaggcataaactcaagaaaccatgtatagtagctgtatgctgaaaatcacaaactgtagatgaaagacgagctaataaatggagagacagtcctgagctggaagccccaacatagtaaaaatgacaattctcccccagattaatcttttggtttaatgcaattgctaccaaattagggttttttttaaagacataaataagcttattctaaaatttatatggaaaggtgcaagctctagaattctatttatttatttattatttttttgagacggagtctcgctctgtcacccaggctggagtgcagtggcgcaacctcggctcactgcaagctctgcttcctgggttcacgccattctcctgcctcagcctcccaagtagctgggactacagtagaattctttaatcttgaagtcgcttaatattaaagcaaactatatagatacagcaatcaagacaatggtattggcagaagaatggatataataatcaatagaaataaatagaaaacccagaaatagacccatgcaaacatggcaaaccaatttttgatggaggtgtaaaagcaatagaactggag

SEQ ID NO: 586848 - DNA, 4001 bp, Homo sapiens
gactaacacatgagccacaagattagaaattgtggtttgagtcatgcagctagaggccacaagattccaaacctccccagttgctccttaggataacaccactatcatcaactctaagattggtgctcaagatatttttcaggctctgcattctgatgcaccaggtgccaccacccacaccactaatctggctcaaccagttctgtgatcccacccaggaacagaagacagcaagagaatcaactttgactctccatggtttcatctccaacccgaccaataagcactgccctctccctggccccctacctgcctaattatccttagatgacccatctcaggattttcagaacctggtttgagcaataaagctccagtgtcctttagccagtttctgcatgcagccagtttctgcatgcagccagtttctgcatgcattaaactctctattgcaattcccctgtcttgataaattggctctacctgggcagcgagtaaggcgaacctattgggcggctacgcctgagatctaatgacaggctgcacgtgaagcccagaccaggcacctgtcttacaccacagggggatccagtccacagaaccagcgtccttccctcctggaacggaccttcccaaagccagaggggctctaggcggctcaaacaggggcttcccggctaccctggtcccaggcgggaccactcaggttccttctccaagccccctaggctgcagggcaggcttccctaggggcaggcccaggcctatagcccgggacccgcatcccgggcgagctgcaccctcccgagaccttccccatctgtacaatggggacaggacaaggcccagcaggcaggctggcgggggttccggcgacagagggggacagcgggcgagcacgacaagagcacaggcccacgtgcgcaccggcggggaggaagtagcccggcgccccgcccgcagcgcggaccggaagtgctgccgtaatctgcgctgagagtcgcgaaagcgctgttccccttagtgaccggcgacgcgggcaagatggcggcgctgggggtggcggaggccgtggcggccccacacccggctgagggggccgagacggctgaggcggtggagctgagccgcgccctgagccgcctgctgccggggctggaggccgacagcaagccgggccggcggcgcgccttggaggccctgcggcgcgcgctggaggagccaggccctgccgccgaccccaccgctttccagggcccctgggcgcgcctactgctgccgcgcttgctgcgctgcctgagcgaccccgccgagggctgccgcgcgctggcagtgcacctgctggatctgggcctgcgccgcgccgcgcggccccgcgatgccctgccgcgcctgctgcccgcgctcgccgcgcgcttggccggccccgtgcccgcgcgccgcccgcccgaggcctgtgaggagctgcgcctggcgcttgtgcagctgctgggcctggccgtggacctgtgcggcgccgcgctcgcgccccacctggacgacgctctgcgcgcgctgcgctgctccctgctcgaccccttcgccgccgtgcgccgcgagagctgcagctgcgccgccgccctggcgcaggccacgcccggtgagcaccccgggccccgctcccacacgccaccccacactctcacccccacctccacctccgcggcccctctcacaacccccgcggctcggccccgcccccctccacgcccgcaccccccaacatcccggaccccccatgcgccgcttcccccacccgcctgccccaaagcaccccgcccggccccctcctcccaccaccactgcttcccctgcctcacgtcccgccaccaacgcgcccttcagctgctcccttgtcctctacccccatgtacctgtttcctgcgctgccacgtgctccttgccccgtgacccctgttcctgcttggccctcactcacctcactcccctgtccccttgctccccgcctccaccctccacgccccaagccccgccccccacctgcctgctccctgtgccccctccacctgcctatcctgtgccatcctcctccttgcacgccgccctcccgcgaccctcacctcccaccctcctccctgcctgagccccctccaccccacccgggcccacgagccagcgcttctgtccagatacctggaaaccaccgcagaaattcctgttaggcggtttggggtggggtgtgccctgatagctgccccctttccttccctcgggggcttgcaggacttgcacctggttgagggcacgcgctttgagactctgctctggtcatttcactttctgtcccattcatcctactcccctgcctttccgctctggcttggaccactgtcctaagtggaaggaggccgcttctcccctccactttataacgttccccatcttttttagagctctgatctgatccggtcgttccctttccttagctggccattcctgcagggtcttgccctttccctcccctggctgggatgtggaatgatagcaggcgcctgcttcctgctggcgggaaggctttccgaaggagggaacactgatgctataaatccgtgggcggtagggagcaggaaagcagtgagggatctggccagctcaggccgtcccagtgatgtcccagtgatggtctgaatgtagtgggaagtgcagggggtgtcaatagaagtgatagacccgagttcaggttgttaaaagatcactgcagctgcgtggagaatagattccagaagtagaggaagagctggacttggggaaatgccgagatttccacgttggttaactttggatttcacatggtccagaactcctgtggagcttggggaagaaccttgggctggatggacatggccattgagaattcctggcatttaatgtatttcttcttcatcctcaaccacttccctacccagtctgtacatcagccccacgagctccctccctggaccgtaggttccacaggacagcactgtgcccatctgtgccccagccccaagcgcagcctgctggggtatgtgctcactggttgctgtggggtgagggactgtgcctctgcctggagcatcccctcatctccagcacctctggccttcctctcccctgggtggggggcctcacctctggtctcggtcacactgggcaacggcagagaggttgaggcgctcacccaaagtctcactggaatagccgtttcccagacgggccccaagtagtgcagagctgaggcaagaggcggcctggatgccagagaccctttggttctgactttttttttttttttttttgagacagggtttcactctgtctcccaggctggagtgcagtggggcgatctcagctcactgcaacctccgcctcctgagttcaagcgattctcctgcctcagcctcccaagtagctgggattacaggcgcctgccacctcttgttctgactttctgcggggactttacaaataggaagtgcagtggctttgcctggagtggtgctggcccagcttcctggaggagcctggggtctcgtctcaggtggggctgggagtgtggcctcgcctctgtcttctgggctcggcttctttcctctggccagtgtccccgtcaggcctccaccttggcttcagcaggtccaggctctctggtcttcagccacaatgggtttgcacccccagcctttccccgctggtcctcctaagcctctgggttgcacaggtgtcatcagggtgggacgcttgtccctgagcctcttcctgtgccgggcggtacagagctctccttggcagcctggattgtgtactgttcatgcagcaaggacctggcgtaggagaggaagggaggtgaggaactcataggcaggcagccgtcctctggaagcccacagagctgggcgaggcgtgtgggagcagctctggtaactgggggcctccctgtccctcagaccacttccacatgc

SEQ ID NO: 586849 - DNA, 4001 bp, Homo sapiens
tgcatggtcacagatgagaagtgcctggctaaccagacttggggactcctggtttgcagtgagtgctgtcaaactcgcgttctaggctgggctcacagcaactccgactccaagctgtttaggcgcctctgtctccactcaagtccacagtcaaggtcactactgtgaaacactgtcttgcttttaatttccaagctgccttgttatttcttgggagtaggccaagctaactttaggaggaacttagtttatagtttaactttgaaacaaagatgataacagccctttcctgaagccaacctccttcttgcctggggaccagaatgcttttgtaagactaacacatgagccacaagattagaaattgtggtttgagtcatgcagctagaggccacaagattccaaacctccccagttgctccttaggataacaccactatcatcaactctaagattggtgctcaagatatttttcaggctctgcattctgatgcaccaggtgccaccacccacaccactaatctggctcaaccagttctgtgatcccacccaggaacagaagacagcaagagaatcaactttgactctccatggtttcatctccaacccgaccaataagcactgccctctccctggccccctacctgcctaattatccttagatgacccatctcaggattttcagaacctggtttgagcaataaagctccagtgtcctttagccagtttctgcatgcagccagtttctgcatgcagccagtttctgcatgcattaaactctctattgcaattcccctgtcttgataaattggctctacctgggcagcgagtaaggcgaacctattgggcggctacgcctgagatctaatgacaggctgcacgtgaagcccagaccaggcacctgtcttacaccacagggggatccagtccacagaaccagcgtccttccctcctggaacggaccttcccaaagccagaggggctctaggcggctcaaacaggggcttcccggctaccctggtcccaggcgggaccactcaggttccttctccaagccccctaggctgcagggcaggcttccctaggggcaggcccaggcctatagcccgggacccgcatcccgggcgagctgcaccctcccgagaccttccccatctgtacaatggggacaggacaaggcccagcaggcaggctggcgggggttccggcgacagagggggacagcgggcgagcacgacaagagcacaggcccacgtgcgcaccggcggggaggaagtagcccggcgccccgcccgcagcgcggaccggaagtgctgccgtaatctgcgctgagagtcgcgaaagcgctgttccccttagtgaccggcgacgcgggcaagatggcggcgctgggggtggcggaggccgtggcggccccacacccggctgagggggccgagacggctgaggcggtggagctgagccgcgccctgagccgcctgctgccggggctggaggccgacagcaagccgggccggcggcgcgccttggaggccctgcggcgcgcgctggaggagccaggccctgccgccgaccccaccgctttccagggcccctgggcgcgcctactgctgccgcgcttgctgcgctgcctgagcgaccccgccgagggctgccgcgcgctggcagtgcacctgctggatctgggcctgcgccgcgccgcgcggccccgcgatgccctgccgcgcctgctgcccgcgctcgccgcgcgcttggccggccccgtgcccgcgcgccgcccgcccgaggcctgtgaggagctgcgcctggcgcttgtgcagctgctgggcctggccgtggacctgtgcggcgccgcgctcgcgccccacctggacgacgctctgcgcgcgctgcgctgctccctgctcgaccccttcgccgccgtgcgccgcgagagctgcagctgcgccgccgccctggcgcaggccacgcccggtgagcaccccgggccccgctcccacacgccaccccacactctcacccccacctccacctccgcggcccctctcacaacccccgcggctcggccccgcccccctccacgcccgcaccccccaacatcccggaccccccatgcgccgcttcccccacccgcctgccccaaagcaccccgcccggccccctcctcccaccaccactgcttcccctgcctcacgtcccgccaccaacgcgcccttcagctgctcccttgtcctctacccccatgtacctgtttcctgcgctgccacgtgctccttgccccgtgacccctgttcctgcttggccctcactcacctcactcccctgtccccttgctccccgcctccaccctccacgccccaagccccgccccccacctgcctgctccctgtgccccctccacctgcctatcctgtgccatcctcctccttgcacgccgccctcccgcgaccctcacctcccaccctcctccctgcctgagccccctccaccccacccgggcccacgagccagcgcttctgtccagatacctggaaaccaccgcagaaattcctgttaggcggtttggggtggggtgtgccctgatagctgccccctttccttccctcgggggcttgcaggacttgcacctggttgagggcacgcgctttgagactctgctctggtcatttcactttctgtcccattcatcctactcccctgcctttccgctctggcttggaccactgtcctaagtggaaggaggccgcttctcccctccactttataacgttccccatcttttttagagctctgatctgatccggtcgttccctttccttagctggccattcctgcagggtcttgccctttccctcccctggctgggatgtggaatgatagcaggcgcctgcttcctgctggcgggaaggctttccgaaggagggaacactgatgctataaatccgtgggcggtagggagcaggaaagcagtgagggatctggccagctcaggccgtcccagtgatgtcccagtgatggtctgaatgtagtgggaagtgcagggggtgtcaatagaagtgatagacccgagttcaggttgttaaaagatcactgcagctgcgtggagaatagattccagaagtagaggaagagctggacttggggaaatgccgagatttccacgttggttaactttggatttcacatggtccagaactcctgtggagcttggggaagaaccttgggctggatggacatggccattgagaattcctggcatttaatgtatttcttcttcatcctcaaccacttccctacccagtctgtacatcagccccacgagctccctccctggaccgtaggttccacaggacagcactgtgcccatctgtgccccagccccaagcgcagcctgctggggtatgtgctcactggttgctgtggggtgagggactgtgcctctgcctggagcatcccctcatctccagcacctctggccttcctctcccctgggtggggggcctcacctctggtctcggtcacactgggcaacggcagagaggttgaggcgctcacccaaagtctcactggaatagccgtttcccagacgggccccaagtagtgcagagctgaggcaagaggcggcctggatgccagagaccctttggttctgactttttttttttttttttttgagacagggtttcactctgtctcccaggctggagtgcagtggggcgatctcagctcactgcaacctccgcctcctgagttcaagcgattctcctgcctcagcctcccaagtagctgggattacaggcgcctgccacctcttgttctgactttctgcggggactttacaaataggaagtgcagtggctttgcctggagtggtgctggcccagcttcctggaggagcctggggtctcgtctcaggtggggctgggagtgtggcctcgcctctgtcttctgggctcggcttctttcctctggccagtgtccccgtcaggcctccaccttgg

SEQ ID NO: 586850 - DNA, 4001 bp, Homo sapiens
cagacagtctctggggcacccagccttcgaggaccacgggacagagggaaggcttccccggctgccgcctctgccccaggacacgtgcgaagggaagcagcgggcggcgggggccactcaccttctccagcttctcgaagtgctcccggaggaacttcatggggcgttcgggcttggagatgcagaggtggacgatacagtctttgaggacctgctggatcccgtgcagctgcacgtacagctcacagcccttcaggctctcgtcctcctccgaggggcaggcgggcggggaggccatggcgagggtggctgcttccttcctgtccagaaaacacacagatccccaggcctgagagctgcccggggctgcgcgccggataaacgcaggcggcgtgaaccaggcttctcccaggagcgtggaagaaagtcactgattctgcatttgtcaaagatctttcattctgtggggccaggtgaggtgttaaacgtgacggcccccagagccttccctccccacagacccccggcaggggtggagggggctcaggcagggggggagggggctcaggcagacaggggtgcacgcggctgagaagccccttctgcagttctgaggattccgggtgggaagagtgggggggcccggcgccctgagggtccagccggggggttccagggcctcgtcctcctccatcccccctttttgggggcacttatgtgaaatgtgaatgctgggggcccctgcgcgcggcctcaggggagggggagatgagggtgagactgtggatgggctggggcggcctctgcacaggaaaagacagaaacgcaggtaaacaagggaagctggcggtggtgggggggtggggtgcgggagaacaaatgcggcggccgcgcagcgaagtcaccatggccaggccaggccggcaccgcaccgcggggcgcaggaccccagccccccgccacgccgcccccggagtgcccagaccgccgggaaggcgcccacccagagaccccgcgccccccgccccaaacccggcctcagcgccggcgaggaccctcccgggacccctgaccgggagccccaggcccggccccgccccgcgcgccccactcccggcggggccgaacccttccaaatgtccgcatccccggggggcctcccaggcccggggctcccggcgcagaccccagcccggccccgcgtacctggatgcgcggcgcccgaggccaggaggcggctgcgcggggacgcggggcgcggggacggctggcgagcgagcgagcgggtccccgcactgcagcggcgccgccctccacgcccgcccccgcgccgcgcgcagctgctgcacccccaacgccgcccgcgcgggcctgcagcccgtctccccccgaccgcctccccgcggggcccccaaccccggcccccacccccggctctccccgcccccgccccatcccccaccggcgcaggttcaggccatcgctgccaggaccccccgctgtcgccgccccccgccccctccactcagactctgagtcgcccactccagccggtgcaggccgcggggccgcctctgatggcctgggcaccccccactcccgccccgttcacgaccaccgcggctgcctgagctgctcacacctaggggatcacatccctgcctctgcaggacacccggtacccagcaagcacgcccgttccctggggtctcactctgccttagcggccagagagggtggccaggtgggcccagccccgcttccccaggtgactcccagcgcttaggcgcaccagcttcaccccgatgcccagtgggaaatcggaaccctcctaaattctttcccacctttcttggggatccagaggtcacggaggcctaggaggagcctcttggtgacggtcctaacccacaagcccagccctgcaggaaagggaatcaacctcatcctcctaccgcacaccgttgccccatcctgccagggtggcggcggcagaaactccatcttccctccccagaggctccaaatgccaggagaggggtaggcagttccagctgtgaaggagatgatacctgcctccctgtgcacactcacctgtctacccccggggtcctccacccacctgcccagcccccggatcctccacccgcctgtccagcccccgggtcctgcactcacctgcccggcttccctgttgcctactcacctgtctcccactatgctgccccatcttcacctgtctcccactcacccgtacacaccatctcccactcacccgtctcttgctcaccttttccacactcacctgtacacagacaccatctcccactcagccctcccatgctcacctggtccacactcacgtatacacactcaccgtctcccagtcagccctcccatgctcacctggtccacactcacctgtacacactcaccgtctctcactcagccctcccatgctcacctggtccacactcacctgtccagctttcttgttcattgctcagctgtctcccactcacctgcctgcacaggcactacacaggtcaccagccctgccgagcacattccccagcagggctgacattgcctcagcctcttcctgccagggtgaacgtaaaccaagcaggccaccctcgggggtcaaacacgaaggtccttggtcctcagccctcaccctcagcacccactggccccagccccgtctcaggcagacctgcatttgtcctgagactttcttagggatccaggcctggtctctgaattagaactccatcccacaacccactcagacctctggctctcccagccctggcctgcctggagctgctgctgaccagcagtaccatcacgtgctccccgcggcccctccactccctcctcctcctcctccaattactcctgctcctccagggtagactggtgaggacagcaaaaaagacccaggtgccacctaaccaaggcgacgtctcgcttcggggggcagatgctccaggcctggctgcttctctcccgggctgtcctggggttctctggagactccctgtaaagacttcccccacaccgtgcctctagaggagagtggaggcacctctctggctgacctcacaggacagccctctgatcccgaggcgcacacacaagccctccttctgctgcaatacctcctcaggctgagcctccttgcctgcgtccttttgagacaaggatctcccaggtttgggggctggcagcatgcacgtggccagccagacatgcggcccctggccccactgagctgtgacgtctgctgagctcctctcctcattgccacgacggcagctcccactgcctctctctttcacacttttccccgccactcagatccctgttccagtggcccccaccccacacaaggactccctctccagactggctctggtaggagtgcgaggcgtggcccccaccgccccaacctgcagacaagtttctgcctgactcccaggcctctcttgcttcagccttactggcttgagccaaggacagacgcttccttagtgtcctgctcactgtctgatcattgccagaggatgaaatcaacacagaagtgggaagaaacaggatcctagagaaatggagccacggccgtcctcaaaccaaacctgaggcccttcccgtatctggacttcccaattatgttcatcaataaatacctttggccggatgcggtggttcacacctgtaatcccagcactttgggaggccgaggcaggtgggtcactggaggtcaggagttcaagaccagcctgggcaacatagcgaaaccctgtctcgactagaaatacaaaattagccgggcatggtcatgcacgcctgtaatccccagctactcagaaagctgaagcaggagaatcacttgaactccagtgagcccagatcgtaccactgcactccagcctgggcagcaaaagagcgaacgaaactccgtctcgaaataaataaataataaataaatacctcgt

SEQ ID NO: 586851 - DNA, 4001 bp, Homo sapiens
agctattttatcccaagtggtgacagcatctgtaactaggctgaaaactgtcggtgagccccacaagctagcgaaacacctggacctaaaaccctgaacctccttccaggagagctctgaagacctggaaccccctggaagccgaagggggaattctgtggctcagaggaccccacctagaggcatgaatctcgggagaccaaacaagggacggtgggccccaggtcggcctctctccccgcgcttctggaaggacctgcaggacggcagacagtctctggggcacccagccttcgaggaccacgggacagagggaaggcttccccggctgccgcctctgccccaggacacgtgcgaagggaagcagcgggcggcgggggccactcaccttctccagcttctcgaagtgctcccggaggaacttcatggggcgttcgggcttggagatgcagaggtggacgatacagtctttgaggacctgctggatcccgtgcagctgcacgtacagctcacagcccttcaggctctcgtcctcctccgaggggcaggcgggcggggaggccatggcgagggtggctgcttccttcctgtccagaaaacacacagatccccaggcctgagagctgcccggggctgcgcgccggataaacgcaggcggcgtgaaccaggcttctcccaggagcgtggaagaaagtcactgattctgcatttgtcaaagatctttcattctgtggggccaggtgaggtgttaaacgtgacggcccccagagccttccctccccacagacccccggcaggggtggagggggctcaggcagggggggagggggctcaggcagacaggggtgcacgcggctgagaagccccttctgcagttctgaggattccgggtgggaagagtgggggggcccggcgccctgagggtccagccggggggttccagggcctcgtcctcctccatcccccctttttgggggcacttatgtgaaatgtgaatgctgggggcccctgcgcgcggcctcaggggagggggagatgagggtgagactgtggatgggctggggcggcctctgcacaggaaaagacagaaacgcaggtaaacaagggaagctggcggtggtgggggggtggggtgcgggagaacaaatgcggcggccgcgcagcgaagtcaccatggccaggccaggccggcaccgcaccgcggggcgcaggaccccagccccccgccacgccgcccccggagtgcccagaccgccgggaaggcgcccacccagagaccccgcgccccccgccccaaacccggcctcagcgccggcgaggaccctcccgggacccctgaccgggagccccaggcccggccccgccccgcgcgccccactcccggcggggccgaacccttccaaatgtccgcatccccggggggcctcccaggcccggggctcccggcgcagaccccagcccggccccgcgtacctggatgcgcggcgcccgaggccaggaggcggctgcgcggggacgcggggcgcggggacggctggcgagcgagcgagcgggtccccgcactgcagcggcgccgccctccacgcccgcccccgcgccgcgcgcagctgctgcacccccaacgccgcccgcgcgggcctgcagcccgtctccccccgaccgcctccccgcggggcccccaaccccggcccccacccccggctctccccgcccccgccccatcccccaccggcgcaggttcaggccatcgctgccaggaccccccgctgtcgccgccccccgccccctccactcagactctgagtcgcccactccagccggtgcaggccgcggggccgcctctgatggcctgggcaccccccactcccgccccgttcacgaccaccgcggctgcctgagctgctcacacctaggggatcacatccctgcctctgcaggacacccggtacccagcaagcacgcccgttccctggggtctcactctgccttagcggccagagagggtggccaggtgggcccagccccgcttccccaggtgactcccagcgcttaggcgcaccagcttcaccccgatgcccagtgggaaatcggaaccctcctaaattctttcccacctttcttggggatccagaggtcacggaggcctaggaggagcctcttggtgacggtcctaacccacaagcccagccctgcaggaaagggaatcaacctcatcctcctaccgcacaccgttgccccatcctgccagggtggcggcggcagaaactccatcttccctccccagaggctccaaatgccaggagaggggtaggcagttccagctgtgaaggagatgatacctgcctccctgtgcacactcacctgtctacccccggggtcctccacccacctgcccagcccccggatcctccacccgcctgtccagcccccgggtcctgcactcacctgcccggcttccctgttgcctactcacctgtctcccactatgctgccccatcttcacctgtctcccactcacccgtacacaccatctcccactcacccgtctcttgctcaccttttccacactcacctgtacacagacaccatctcccactcagccctcccatgctcacctggtccacactcacgtatacacactcaccgtctcccagtcagccctcccatgctcacctggtccacactcacctgtacacactcaccgtctctcactcagccctcccatgctcacctggtccacactcacctgtccagctttcttgttcattgctcagctgtctcccactcacctgcctgcacaggcactacacaggtcaccagccctgccgagcacattccccagcagggctgacattgcctcagcctcttcctgccagggtgaacgtaaaccaagcaggccaccctcgggggtcaaacacgaaggtccttggtcctcagccctcaccctcagcacccactggccccagccccgtctcaggcagacctgcatttgtcctgagactttcttagggatccaggcctggtctctgaattagaactccatcccacaacccactcagacctctggctctcccagccctggcctgcctggagctgctgctgaccagcagtaccatcacgtgctccccgcggcccctccactccctcctcctcctcctccaattactcctgctcctccagggtagactggtgaggacagcaaaaaagacccaggtgccacctaaccaaggcgacgtctcgcttcggggggcagatgctccaggcctggctgcttctctcccgggctgtcctggggttctctggagactccctgtaaagacttcccccacaccgtgcctctagaggagagtggaggcacctctctggctgacctcacaggacagccctctgatcccgaggcgcacacacaagccctccttctgctgcaatacctcctcaggctgagcctccttgcctgcgtccttttgagacaaggatctcccaggtttgggggctggcagcatgcacgtggccagccagacatgcggcccctggccccactgagctgtgacgtctgctgagctcctctcctcattgccacgacggcagctcccactgcctctctctttcacacttttccccgccactcagatccctgttccagtggcccccaccccacacaaggactccctctccagactggctctggtaggagtgcgaggcgtggcccccaccgccccaacctgcagacaagtttctgcctgactcccaggcctctcttgcttcagccttactggcttgagccaaggacagacgcttccttagtgtcctgctcactgtctgatcattgccagaggatgaaatcaacacagaagtgggaagaaacaggatcctagagaaatggagccacggccgtcctcaaaccaaacctgaggcccttcccgtatctggacttcccaattatgttcatcaataaatacctttggccggatgcggtggttcacacctgtaatcccagcact

SEQ ID NO: 586852 - DNA, 4001 bp, Homo sapiens
agcttctccccgaccacacgtgccgaagggtactttcctctcccactgctgcaagatcaacgtggaattcgacctcaaaccccacatcaccttagccatgggagctattttctttttccttttttttttttttttttttgagacggagtctcgctctgtcgcccaggctggagtgcagtggtgcgatctcagctcactgcagcctccacctcccggttcaagcaattctcctgcctgaaccaccccagtagctgggattacaggcgccgccaccacacccaactaatttttgtatttttagtagagagggggtttcgccatgttggccaggctggtctcgaactcctgacctcaagtgatctgcccgcctcggcctcccaaagtgctgggatgacaggtgtgagctaccccgtgggagctattttatcccaagtggtgacagcatctgtaactaggctgaaaactgtcggtgagccccacaagctagcgaaacacctggacctaaaaccctgaacctccttccaggagagctctgaagacctggaaccccctggaagccgaagggggaattctgtggctcagaggaccccacctagaggcatgaatctcgggagaccaaacaagggacggtgggccccaggtcggcctctctccccgcgcttctggaaggacctgcaggacggcagacagtctctggggcacccagccttcgaggaccacgggacagagggaaggcttccccggctgccgcctctgccccaggacacgtgcgaagggaagcagcgggcggcgggggccactcaccttctccagcttctcgaagtgctcccggaggaacttcatggggcgttcgggcttggagatgcagaggtggacgatacagtctttgaggacctgctggatcccgtgcagctgcacgtacagctcacagcccttcaggctctcgtcctcctccgaggggcaggcgggcggggaggccatggcgagggtggctgcttccttcctgtccagaaaacacacagatccccaggcctgagagctgcccggggctgcgcgccggataaacgcaggcggcgtgaaccaggcttctcccaggagcgtggaagaaagtcactgattctgcatttgtcaaagatctttcattctgtggggccaggtgaggtgttaaacgtgacggcccccagagccttccctccccacagacccccggcaggggtggagggggctcaggcagggggggagggggctcaggcagacaggggtgcacgcggctgagaagccccttctgcagttctgaggattccgggtgggaagagtgggggggcccggcgccctgagggtccagccggggggttccagggcctcgtcctcctccatcccccctttttgggggcacttatgtgaaatgtgaatgctgggggcccctgcgcgcggcctcaggggagggggagatgagggtgagactgtggatgggctggggcggcctctgcacaggaaaagacagaaacgcaggtaaacaagggaagctggcggtggtgggggggtggggtgcgggagaacaaatgcggcggccgcgcagcgaagtcaccatggccaggccaggccggcaccgcaccgcggggcgcaggaccccagccccccgccacgccgcccccggagtgcccagaccgccgggaaggcgcccacccagagaccccgcgccccccgccccaaacccggcctcagcgccggcgaggaccctcccgggacccctgaccgggagccccaggcccggccccgccccgcgcgccccactcccggcggggccgaacccttccaaatgtccgcatccccggggggcctcccaggcccggggctcccggcgcagaccccagcccggccccgcgtacctggatgcgcggcgcccgaggccaggaggcggctgcgcggggacgcggggcgcggggacggctggcgagcgagcgagcgggtccccgcactgcagcggcgccgccctccacgcccgcccccgcgccgcgcgcagctgctgcacccccaacgccgcccgcgcgggcctgcagcccgtctccccccgaccgcctccccgcggggcccccaaccccggcccccacccccggctctccccgcccccgccccatcccccaccggcgcaggttcaggccatcgctgccaggaccccccgctgtcgccgccccccgccccctccactcagactctgagtcgcccactccagccggtgcaggccgcggggccgcctctgatggcctgggcaccccccactcccgccccgttcacgaccaccgcggctgcctgagctgctcacacctaggggatcacatccctgcctctgcaggacacccggtacccagcaagcacgcccgttccctggggtctcactctgccttagcggccagagagggtggccaggtgggcccagccccgcttccccaggtgactcccagcgcttaggcgcaccagcttcaccccgatgcccagtgggaaatcggaaccctcctaaattctttcccacctttcttggggatccagaggtcacggaggcctaggaggagcctcttggtgacggtcctaacccacaagcccagccctgcaggaaagggaatcaacctcatcctcctaccgcacaccgttgccccatcctgccagggtggcggcggcagaaactccatcttccctccccagaggctccaaatgccaggagaggggtaggcagttccagctgtgaaggagatgatacctgcctccctgtgcacactcacctgtctacccccggggtcctccacccacctgcccagcccccggatcctccacccgcctgtccagcccccgggtcctgcactcacctgcccggcttccctgttgcctactcacctgtctcccactatgctgccccatcttcacctgtctcccactcacccgtacacaccatctcccactcacccgtctcttgctcaccttttccacactcacctgtacacagacaccatctcccactcagccctcccatgctcacctggtccacactcacgtatacacactcaccgtctcccagtcagccctcccatgctcacctggtccacactcacctgtacacactcaccgtctctcactcagccctcccatgctcacctggtccacactcacctgtccagctttcttgttcattgctcagctgtctcccactcacctgcctgcacaggcactacacaggtcaccagccctgccgagcacattccccagcagggctgacattgcctcagcctcttcctgccagggtgaacgtaaaccaagcaggccaccctcgggggtcaaacacgaaggtccttggtcctcagccctcaccctcagcacccactggccccagccccgtctcaggcagacctgcatttgtcctgagactttcttagggatccaggcctggtctctgaattagaactccatcccacaacccactcagacctctggctctcccagccctggcctgcctggagctgctgctgaccagcagtaccatcacgtgctccccgcggcccctccactccctcctcctcctcctccaattactcctgctcctccagggtagactggtgaggacagcaaaaaagacccaggtgccacctaaccaaggcgacgtctcgcttcggggggcagatgctccaggcctggctgcttctctcccgggctgtcctggggttctctggagactccctgtaaagacttcccccacaccgtgcctctagaggagagtggaggcacctctctggctgacctcacaggacagccctctgatcccgaggcgcacacacaagccctccttctgctgcaatacctcctcaggctgagcctccttgcctgcgtccttttgagacaaggatctcccaggtttgggggctggcagcatgcacgtggccagccagacatgcggcccctggccccactgagctgtgacgtctgctgagctcctctcctcattgccacgacgg

SEQ ID NO: 586853 - DNA, 4001 bp, Homo sapiens
aaagaagtattagatatctctgccctttctgtcatccgttactggctgctgcttcttacctatttaaaacatgcattcttttctctttctcgtttctggtaggaaaagcttttgattcgattcttgtgcaaaaagaattattaagactatgtttatcctcttggggaaacatttagaagtccaaaattaaaattgtaagtaacaagcttcacttttatcttcacagcgcactaatttccagggtttctgggattcttttggagaaactaaaaatacactaattttataatccatttcaacatgtaatcctgcaaagaaaagaaacatcttcctaggagcatacacaaggaaatgaaatgacacttttaaatgttttcattttatgaaatacactgcggacacacaaaccacaagcagtgtaaataaataaaagctggtgcaatgctgcatgcatgtttgccttacaccacaaagagaaaacacttgcacactgcactccatggtattttagcttgggttgccataaaaatgagatttgggcatgttgtgtaatacaaggggctgtaaatgagggtgtgtgtctgggtgtgttagggaaagagggttgtaagcagaaggggtgggacttgccaggagcagctatttgagaaaattcctttttctttcccattcattctttctagctctactgtctggcacaatccttacaattactcactggcttttcattctaaagacaaccaacaagctttcagaacttcctacagtgtttttctcatacacttttaaaaaaataaagcaccaaatcattcaatatgtcttttatataaaaagcaaaccattaacccatttcctcgttccaaagacccccgtgggtttcagactaaatagaatcctttgttacgtgtccaaaaataacacaacacggtattggtaaattggaaaataatagataactcttatttccaagaatgtcagagctactggccataaattttgttctgccccagtgagtccaatttcatgcttcttttagcgaatctaccgtcctaacaacagtaaagccaatcatattaaacacggttctccttttctctttcgacattccattaataaatacaagggctgaaagaagacgccaagcgggccagtttctttatgcacaatggtatcctctaagcgaaatacctccaaccacagcgaaagttgtctttctagcagatgcccaccccaaccggcccaggcagagggggcaaagggtaagagggaagcgtaacatcccagctctcccacctctagaggaagggaagagggtatgacagagagcggagtaggaaggtgggcgagtgggagagacagaaatggatgctgagggggtgggcgagatgggaaggtagggaaaggtggagaatgcggggagaggtgggtgcgcaaagcggcaagatccgagagcacagcggggagcggtggggggcagcgaggggatccgggggcgcgaagtggggggtctggtcctcaccattgaacgcccctgcgtccgcgggcgccgcctcctcctcctccccgtcctcggagtcggactgcatgggctcctcggcgaagttgacccccttgctgggggtgccgcccccggcagcggcgcccaggtccccccaggtcctgccctcatggccgaagcgcgcggtgcctttgcgctcgttctcctgctgcaggcgggtgaagtgctgcagcgcgaactccagcaggtccgcgggctggtgcctcagcacctccaccgtgaagccctgcagcagctccgtcagtcccgccgggatctcgatgctcatcctgcctccggggcggcaggcgcctgggcgccgccctcgccccctccccggcacggcctagggccccgcggctgccgagcgagcgcctacggcgctggcgcgctaccggctgcgagcgcggcgcactgggccccggcggcccggctggcccggcccgcggctcccggcgcgcgtctgctccgtgtggtggcggcggctgagcgagcgcggccccgggagggctggcagcatctcctgctcctcccgctccagccgcggccgcgcctctcccccgcccgggcgccccgcccccgccccgccgcggtgcgcgggagggggcgcaggagagcgcgcccacgtgacccccggaaaccatggcaacctccgctggctggcgccgcgcacccgcctgtcagaccaccgcagggctgcgcgcccgggccgggagaggcggagggaggcccagcgaggccgccttcgtgtccacctgtccgcgcgtccaggagcgggctggccactcgccccgcttcccaggcgtcattcgccatggtgaacccccgcagaggtggtgccaggagatttgtcttgaaacttcagcctccaccttagtagtggcattttattttccttctagaatctagttgcatgataagtgttgctaatgtcctttgtttaaagtcttatggtggtactggttctcttttggacaaagaaatgctaccccatctttgtgacgtctttctttttcttccccacattttatccagcctttcccgatccatcctgtttattatgtttcgtcttactgatgctattccgttgtgcactccacgcatttactatttattgagacaaaggcaccatttattgagaggcacctatcaaagttagttgatctcttttaaataggatagtgcaggatgaggcgcttattattttgaaactttcctttatgctttgaatgatttttgacttgtatgtccaaaaattgaaatacttcagtataaagaaaaatagaattactaatgtgtgcttttaaagtagaaggctttgactttgaaatgaggcttactttgcaaatgtttacaattttgaagtagagaaaattgtcttttgtcaattaaattctatttaagtacgcatacttcattttctacaattatcatatcattgtaaataaaatatttcaagagcaagctcacttggttattctgatttatcttcccacccacggaagagtaaacacatgactggggaaactccaagtctagaaatcagagatgtaacgaactagtccctcttgtaaaaatggatcttgatgttaaccctttgttaatgatgcatcctgtattgactccatgagccaatgtatttctctattttcatttcttaacaactttatagtaataatgttacgttgctttaaatatacagtagttaagtgcttctaattgtgtcgagcattttaagaattaaacttttggccgggcgcagtggctcactcatgcctgtaatcccaacactttgagaggccgaggtgggcggatcacctgaggtcaggagttcaagaccagcctggccaacatggtgaaaccccatctctactaaaaatacaaaaattagcgggcatggtggcaggcacctgtaatcccagctactcaggaggcttaggcagaagaatcgcttgaatccaggaggcggaggttgcagtcaaccgagatcgtgcagtgccgttgcactccaggctgggggacaagagtgagacttcgtctcaaaaaaaaaaaaaaagaattaaacttttataaaatatggtgagcctcacatgtcaccggttggagcacaatgttagtactactctctaccgtgtaagcattattatttttacggatctggtaatctaagatgcatgtgtatcacctgtctaaatttgtgataatatttgtattaattatgataaacactgctcacatgtggcagaaaatgcgaaatacaatagcttaagatttatttctctggaatctaaatgtgggcagttcagagttggtattgagaggtgatagcgtgctggcagtcctcacagcccgcactcgctcttggcgcctcctctacctgggctcccactttggcagcgcttgaggagcccttcagcctgccgctgcactgtgggagcccctttctgggctggccaaggcctga

SEQ ID NO: 586854 - DNA, 4001 bp, Homo sapiens
agccgagatggtgtcactgcactacagcctgggtgacagagtgagactctgtctccaaaagaaaaacaaaaacaaaaacaaaaacaaaaaaaaccgcaatactgcaggagaaaattctatagtgccaaaccataagcaactatagcccttaagctaaatttaccaatgtcaaatgaaaaacaaataaaagcaactatatccccgtcattgtaaaagcaaaacacgaacatgtgaacacacatttcccctcatcagagatttaacaaataccaactacaggatttttatagctaccttttttttttctttttgagacagaatgtcgctctgttgcccaggatggagtgcagtggcgccatctcggctcactgcaagctccgcctcctgggttcacgccattctcctgcctcagcctcccaagtagctgggactacaggtgcctgccaccacgcccggctaattttttttgtatttttagtagagacggggtttcaccgtgttagccaggatggtctcgatctcctgacctcatgatccgcccgcctcggcctcccaaagtgctgggattagaggcatgagccaccacgcccagcctatagctaccttaaaaaattatatttacacacacacacacacacacacacacacacagccattacccatgacatctcggacaaattctgggggaggtcgaggtgcccattcactcattttctctggaattggaactgctttgtcctgcaacatttaaacatgaaagcatttaagtataaacctgttgacaaaattatatatctccctctctttttttagagacaggttcttgctctgttcctcaggctggagtgcagtggtgcaatcagagctcactgcagccttgaactcctgggctcaagtgatcctcccggttcagtctccagaatagttaggactctcaggcgtacaccaccacaccaggcaatttttttatttttgtaaagacagggacccactatgttgcccaggctggtcttgaactccttcctggcctcggaccatcctcccgcctggcctcccaaagcgctgaaattacaggcaggggccacagcacccagcccaagttacatctcttaagaccaaagaattttaattgactaatgaagcaggactgctttgctacttggacacagagctgattttgtgttcttccctctgtcgtggcttttttcatcctatgtactcttgggtataacacagtccacaccttcccagggctacgctttccagagcagaactgaaaaacctaagccatagtttccagctagaaaccgccaactttaacactactagataagaagagtcaagcttttctagttaaaggtataaaggacgttcccgttcaattgtttttatgattgaggggaccgaggcccagagggggtgtgagcgggagaggagtgaccagctccaaacgtctcggccactgtctctctaacgatcagtgttgtttagagtatacccttttgctaacccacaaattctaccttttcagtctaacgctttttgttcacagaaagttaaaccagaaggggtcttggagcacgggaagccgctccaccgtgctttgattcaagctgggctctcacacaaggacagacgggaagttcactatctccgggacagcctccttctcctcctcctccccaaagactgctcttggagggtcggatactgagtttctgagtttggaggcggggaaggtggacctgcgggaaccctgaagcgctgcagaggaagggggtgggcctcggacgggccgtggagcctgggcctcgtctcaccgggttcttcatgagccgctccagcttgagcttctgctcctccgccgcattcttggggatgacgagcgtctgcggctctttcttgggcctcggtggtcgcaccgaggaggcggctgggctagccatggcagccttccagtttcacaagcgagcggcggcgtcggcgcgcaagtatgacgacacagccgcgcgccggcgacgcatacgcagtctccgcagaggggaacggaggcggggttgcaaggcgcaagcagcctgctgaatattcatgagcctgaggctggcgtgggttattgtgttcaaagctgcggggtttcatttcctgttcctgaacaacaaatcagtgcagctagatgctcacgtccctgaaggggaggtggccctccgtgcctgagtagcctggccctagccgacctctccagtccccgcgggcgtcttcgtgccaccgagcagccccgctgatgctctcggcacctcctccccgtcggctctcctcgcctcccggctttgtccgggcacttccttggatctggtgccccctcctccatttctgacaatctcctgtttacataagacagcgcaaacatgtcactgagcttcctgaagactgggacattcctcctttgtccgccttgaattactctatacctggccccccgcaaatacacctctgccaatgaatgaccgtctcgtagtgtgaggcacagtaataaacctaaggaaccatgtctgctcattctgcttgcgagcaggatttcacaaaggccgtgactcggtgactgagcgcagccctctccaataacgccctgaacaataagctgggaagagcgagagagaacacaggtttccacctctcttgcctgaacactgcatttttagaaaagacaagttcaatgatcctagcccctgcctcttcctgtacataatctctgacgggattaatgattatgcttctataactttttttttttttttagagacagggtctcgcttggttgcccaggctggagtgcaggggctcgatcataggtcactgctgccttgaactcccgggttcaggcactcctcccacctcagcctcctgagtagctgagactacaggcgcatgccaccacacccagttaattttttatttttattttttgcagagacaaggtgttgctgtgatgcccaggctggtcttgaactcctgggctcaagcgatcctcctgcctgggcctccgaaagtgctgaaattataggtgttaagtcaccatgcccagccaagcctctgtaatctgtaactagataataccctcacacacagccttgatgaaattttgctctattgttaacttctgagcacattagatataactttttttttttttttttgagacagagtctcactctgtcccccaggctagagctcagtgatgcaatctcggctgactgcagcctctgcctcccaggttcaagtgatcctcctgcttcagtctcctgagtagctgggaatacaggtgcacgccaccacgcctggctaattattgtatttttagtagagatggagtttcaccatgttggccaggcttgtctcgaactcctgacatcaggtgatccacccgcctcagcctcccaaagtgctgggattataggcatgagccaccacgcccagcttgatataacttctgagcacatgcagggcaccaccaactgtatataaatgtttttatataaactgtatataaatataaatatataaatgtgtgctgaaactctgttttggagcagtttaacaaactctgtgaaagactttccctggttacagtcctcagtaagattgcaaaaaaccaaccttaattttttaaaagcctgattttttgtttagttgacattgagaaacagaaaaggcccggcatggtggctcacacgtgtaatcccaacgttttgggaggccgagatgggcagatcacttgaagtcaggagtttgagaccagcatggccaacatggtgaaaccccatctctattaaaaatacaaaaattagccaggtgtggtggtgtgtgcctgtaatcccagctattcaggaggctgagacaggagaatagcttgaaactgggagatggaggttgctgtgagccaagatcgtgccactgcactccagcctgggtgacagagcaagactctgtgtctaaaaaaaaga

SEQ ID NO: 586855 - DNA, 4001 bp, Homo sapiens
ttttaaaaatataaatctgaggtcatttgaggggccaacaaaatacaaggaagggagataaaaattaaatgtttaaatttaacaaaagtcactacaatgtcacctaacatctactacaatggtggtaataaactaaggaagattaagttacagcaaaaataactaatataaatattagagattacatagcaaaaagtgggtttgccttccagaagactatggtaccctgaccatttggggcccagtaggatatttagcaatgaaaaggtcaagatgggtggaggtaaagctaaatcaaaaggaacaggtataactgagaatccaagatagatagtgtccaaatagatggtgacagatcaatcttcctcctctcaagaagcatttactgtacttgttgcttcctctcaagatcccaatggctgctcaagctgaaagttgcctattcctgctgttgagggtgttcagcaaccagaattaattttgtggtggctcagggctcttgctgcaactgagcatcgaacttggagaatttgtgacacaaagtgggggtttggggcagggggtagattgggtggctttattgctagttgttctgaaaaaagaaaactccgaagcatttacatgtaagctttccaaccactttcaaacacctctacaaaacaccctcagaagtctgaaatctttgcagcagaagggctgtagttaaagctgctgggctaacaaaatcatcaaagaagccagatgagacaacccagtcaggaaatcctagtgattattcttaacctgtttttccctaatttaaggtaaactcttatatacctgatgtgggatgtagaaagttacactggagcaagctggatcttctgctgaacttttaatcaaacctaagaaaaaataaaggcaaggtttgtttttattaatcttattttattttaaaatagcataacctagaagttattctgttataaaggaacatggctgaacaggtaggaaacagattccccattatgagttctccttatggcttctgcaaggatcatggagatgtcaattactcgtattttggagcaatgcttcatcttctcatcttgaggtatggtattggtgactaccactgcttcaaagcatgcagtgttgatgcgagaaatggctgggccagaaaagattccatgagtcaagatagcataaactctggttgctccagctgagagaagtttgtcagctgcgaggcagattgtaacacaagtgtctgccatgtcatctacaaggatagccacacgatcattcacatctcccactagcactatgcagtccacttcattggccttcttccgttctttatgaatcaaagcaaagtccacattcaactggtctgcaatggaggtcactcttttagctccaccagcatctggcgagacaataatgcagttcttccactcagggatattctcccttatccacttcaggacagttggctctgcatacaagttgtctactgggatatcaaaaaagccctgaatttgagaagcatgtaggtccatggtgatgatatgatccgcacctgctatagagagcatatttgcaacaagcttggcagagattggggaccggctcttatccttcttatcctgtcgggcataagggaagcatgggatgactgcagtaactcggctagctgaagcaatcttgcaggcattaatcatgatcaaaagctccattagactgtcgttgatttcgccacaaccactctgaacgatgtagacatcctctccacgcacactctcatcaatttccacgcaggtctcctggttgctgaatttcttagtcaccaccttgcctagctccaggcccaggcggtcagcaattttctgggataagtcctggtgggagctgccgctgaagattttgatattcggcgtcttggccaactaccagaggcactccgtcgagcgatccagctgccgctgaggctggaacggaagtgaagcacagactctaatggcttccggttgttactcaaccgttagggtcccttcccccttgcggcgcgcggtcccaaattgaccctgggtctcttgaaaaaatttctgcttgccacctcccacttcacacttttagactaaataatcaagtatttacagtgtatggagtttttttctattagcacctatattagtttcacagggctatttaaacaaatttgaatgcataaaaacataaaactacaaagcaaaacccaagtttaaaaggaaaattacctactaaagtatatgcaaaagattattttagaaagaatttccccaatgaagtgagaaaaagacaataaaatagaaagttgaaaaatggcataaataggcaatcacagtaaaaaaaaaatggataagaaacgtgaaacaatggaagtaatcaagaaaacgctattttcacacatcaagtagccaaaatgttaagataaggtcttctattcggatggaatgtataaatatgtagattttgcatgggtaattttgcacataaactttgactcatcatgtatacttctaggaatctatttcagagaaattttcacaagcaccccaaatatatatggctacatagtagtgtagctgtattcattcatgcaataaatattttgtgaacacctcctatatgtcaggtattatactacttctagggtataaaaattgtgcatgacaaatagtaattgccctagaattgtttataaaagcaaaatatgggaaccaacaaatgttcatcaataggtaaattaccaaataatttattgtatatacatatgcgaccattaaatagattaagtgtaatcatgtggaaatgtctcctaggtatttttttaaaggtaaagtcagtcacaaaaatatcatagtattatatttatgtatttaagattatgtgatactgaaagcatccaattagcatggaagtcctctttataataattacctttggagaggggagtaggttgtgagagttgagaatgaaggaggactgttacattttactgctatcagtgtggcatttgaacatttattacttttgtagtaaaaatgatgaacaaaatgtatttggtaattaaatgtttgttagcaaattttaagtatacagcttctatggcgtatcggggctggaaatagtgaggaaggaggcagaaaggaccatagatgccaatgatttcataaaaataatggaggcatcagatacagatcaaccatttatatcttgctaattgtgtgcctgacatttggataccagggtgtttttatttagcctaaaaccaaatcatcatttttttcatattgtaagataaccaaataatttaagagattttctcaccacacttctgggcttccttaatgtgttgggttcatgaataggataaactcagaaatgggataagaaatggggtaggcaacaaagatgggtaagattcagcaatgtctgtgaaaaacattacttagctataaaaaggtagttttatatattgaatgaggtattattataaactcaaataaacagctatgttttaaattttacaccaaaatggcttgctgctgatccaatcatttctctcctggcatcaacatggttttctctctagttcagcctcttcctggttgacagtgtatgccagcccatttctgtccataacccttcattcatattctttttatcacacacacaaaaaatcaacagacctacctataccacataattctcacccttagccagactacataaagtgatttctaaaaatcccgtggcttaatttagaagcactaatagtatttgtagtttcaatttatttttctcttactattctgtgtgtcacacatttttcagtgttgtttaaaaaacaaaacagattctaaacaggtttaatattacctaaataggattaaatgctaatgtgaacatttaaaacccatacttggttgcattttccttgaggtgttaaggaggagaaatttttgtcttgctgctat

SEQ ID NO: 586856 - DNA, 4001 bp, Homo sapiens
agatggacgccaaaaggtgacccatccgacccagggcggcctccctttggataagcacctgggaggagggcgctgggaaccaagtgcatcctctctacaggtgaacggtattaattagtccatggtcaaacagtcacgaaatttccctccaagatttgcccccatcgactttcgtcccaggagccttttcgatgagatacttaggagaatttatatcccagtaggagagaaggacaagcttatgatatttgttttggttcttttaaattctacttttgaccacttctgccttgtgactttcaaagaagcatgtctagacttaacttcccttgaaaaccgccatcctaattcttccttttactccccagagcccaatcttgcgtctgtttgaagtcacccccggctgacggttgagatgaagccaagtatcaaatggcctcttcccttagttttgtattaaaatatgcaccgagtctgtacgacgcaactcaactctggagaatttcagttacaaagtaaaggcttctcttcttttccttgtgcaattccctcctcccaaggagaaagaacgcaacaaggaactccgaaacaatgtgcttcttccccaagcttctaagaccccccctctgcagagcgaaaggccgcttctgagcacttaggtgcgggtacagcaagcgagactcccagcccactttctgtgcggggtctcttgggcgctgccaccagcaacggcaggattcgcctgcgccgcggctcacttccaggtttccgctcggctccttcccagcccacgcgccgggcgctcctgggattggcgatcgcgctggagagggaaacttcggcggtgtttgttgtaggaggttctcctcccggaaccgccagggagaggaagtctgatcgcctacgggaggcggcggggcggcctcggctgcgccccgaaaccgcaacaccggctcctccccaggatgccctgaggacacactcgggcagcgacttgaaaacaatacaagaaaaaacggccaaaagttctttcggtacaaaaggcacccacgccctcaggcacaattagcaactgcgtctgcaaacatcccattccctcctactttgcagatcggaaaagcaacccgtacccccaagtcatttactaacagtggtggtaaggtgtcctgatgctgcttcctctcctctaacctacattttcttcttcacaatcatcaactttgtgagcacggaagggctttgtacgaattgcgcaaggaaaagatggcaaattactcaaaagtacagaaaacggagtcctggagcgtccgtggttttcagcctctcttagggctccgggaggcgggtacctgggaggtaccaggcagcaccccagggtgacccccggggccaggctctgtctcggcggacgccgaaccacccccagtcgctcacctgctcgggcttaacaggacccggaggcctcgcgcggtgaacgcggccgagagcacgaagggggcgcgctcgggtcaacctggaagccggggctcgagtccctgggcgcggacttggagagatcaggcttctggaaagtgtacaggtcggaattcccgcagcccagctaaatcaagtgctgctgctggtctcctctggcacctccaattgctgcgcgctgcggcggaagcccggggctcgcagcgcagtctgttctggtcggagggggcggcggcgaggggccgccagactcgctgcccgggtggaaggtccagggcggctttccgggctagtagtgtttcattcgccggcgcgtccctcttccctgctagcaccgcccgggagccggctgagagatgggaccctggctgttcactccggcgcatcgaacttgcctacgcgtccgtaggaacgcaaaaaagacatctgcccacctgctggttatttgccaagtgattcgggaaaccagaaccctggggcagctgggggagaaaagaaaataacccaggaggcggtcaccgctgccacaggtgcaggtaggaacttcgcgttcccaccctccaggggaggagattggatcaggcgccagccttgaggtgtctgattggagaaaagctgtgcagtgccgctcccccgaccgactccttgagaagaaacggcggagacctgagacccggaggctgaggctgtaggtgggctccgctgggtaaaagttgccgcagcagctgtcccttggccccatcgcgatttatttttcccccttgctttccgggtcccgggatcccaagtttgtaactaacgggagcgaatccacacccgagcaaaatgtttgcgagtttcaggcgcccttagttgaaaggctgtaattaacaagtccgctgtttgccagccaggcgccgttgcaggcgctttctgtggattgtcatttatttctcacagcaaccctaggaggtaggtattgttattattattattctcactcgacaggcgaggaaaccctagcacgggaaaatggttgctcaggtttgcctgtctggtacgtggcagagcagggttggaacccagggggcctgactctagcttctacggtcttaaccaccacaacctgccagtctgagactcttaacacgactcagtgaggatgtgaatttccttctttcaggcctggaagtccatggacagccacccaacgagggcagtgtaaatccagccctgagccactgcaggaagtgaaccggggattgcactcctggtcacataagagtactttttttttttttttttttttgagacggagtctcgctcagtcgccgaggctggactgcagtggcgcgatctcggctcacggcaagctccgcctcccgggttcacgccattctcctgcctcagcctcccgagtagctgggactacaggcgcccgccactgcgcccggctaattttttgtattttcagtagagacggggttccccgtgttagccaggatagtctcgatctcctgacctcgtgatacgcccgtctcggcctccctcccaaagtgctgggattacaggcgtgagccacagcgcccggccaagagtactttttattcatttgacataaagatattggcacagggcattttcactaatgaaggcagaggtgcagcttgcttcatcttccaggatgctcttgtttcaaaaaacgattttgatgttccttgagctcatatgcaagcataactcccctgaaggactgggtgtggagcaactgagcatctctgttgtgaaaactgtttgcagtataaaagcagtgaaagacagccgggcaagatggctcaagcctgtaaccctagcgctttggaggccgaggcgggtggatcacatgagaccaggagtttgagaccagcctggccaacatgacaaaaccttgtctctacttaaaaataataataaaaaacaaggtgggtgtagtggtgcacgcctgtattcccagctattggggaggctgaggcacaagaatcatttgaacctgggaggtggaggtggcagtgagctgagatccggccactgcactccagcctgggtgacagagtgagactctgtctgtaaaaaaaaaaaaaaaaaaaaaaagtagtgaaagacatactgcctaactcaaataatttgcaatatagaattagtagaaaaaatttttagagagtatttcaatttgtgaaagataaaaatatgaatatatgatttactttttagtttgggattctttgaatttctatgatatgcacagcacagggtatttggaagtcatgcatttttatatatttctcgggattacttttagagcataaactttcaatcacagaagcaggattgaacaaaggcaggccaccaactttgaggggagaatgggataattcatcatagtgccattactttacagatgaaattgaatcatggaagaatgcctttatctgaggagtcatcaccactagggagctatggaggtgggtttttacgttgttggttgagcatatgggtgaaaataaaaaatt

SEQ ID NO: 586857 - DNA, 4001 bp, Homo sapiens
cagcaattcccaaagggggtcagtcctcagcccactggccacctcttcccctggctcctggcctggcccaagagagagtggctgggtctctgtgactgggctcccccagacagcagcaggtccccgaagatggaatttgaagttaagtcccaggttgagagacagcatagaggcctcactttgaggtacgggggtcaaagtggtggcaggggcacctgggatggagggggtgggctgggggcccacagtagcagcaaacaggacgcagcagaacagtcccagccctagacagccatgcctggccatggccccacctggcttcgggtggccttggtgggcagggactcagttgttcagcagcttttgaggaggaaggtcctggagagaggagaggccctgtgagccctggctgtggcccccctcttccctttcccaggatcggatgtcccagagagaggcttctgatctcagagaagcaggtagtgtgggcaggatgcaaagtgtcctgtccatggctctggctcttcttgccgggcccttcctgtaccttcaggccccagcacaaatccctgcctgggggttcctccttccccctctgctcatgcagaagctggggtctgactgcaaccaggggccctcatccttaactagtagcaaaagggatggacttgggcttccagacatggattcctctcttccttccctctgctgagcctcaagtctttacgcaggcttaccgtttgccaagcacccttctgggcatataactgtgaacaagcaagcccttccgatgtcttgacctattccaacccccacctcccgccccagccagaagtgctggcgccctcactctcagaccccagggggcacagggcctcgggaggggtaaagccagagctgagtgatctggcccagtcagaaggccgcccaggctctggccagagaagcaaggttcccaatctggcagaagcaccctccctcccgcccctcccgtttcctggggctgggcctgttcccttccctaggacccttgaagtattcgggggaggggcagcttggcgatctccggcttcctggaggagaacgccaggcaggcaagctgggcgaactgcaggcagctgcggcggactcctaccccctccccagaactctctcctctgtgcgcacacatctggtgggggaagggagggtgagccagggacacacatgcacccggcacccttacatcacacacatagccacatctagcgcccgtgacacactcacccgtcacatacccccctgcccctgcacgcgcgcgcgcacacacacacacacactccgtcctgccgagccactctcctccctgcatgggttcaaacccaagctctgtgagcccccggcctcccctgtctctctctctctctctctctctctctcacacacacacacacacacacacacacacacacacacggcatgtactgtacagagatgcacaccccctacacacattcacacacacagacatgccacacaccgccatccccccacactcgtacacgcccaccacccctcgcaggcacacatgcacacacgcgcgcgcacacgcacacacacccccagcccggaccggccgacctgctccccggggtctctcccgcaggcaggtctcctcgccgagcctccgaaaaggggcggtcgtggcggccctggcgcccagctgggcaacgcttcgtggtatctcaccgcttctctctgttgtgcccagcgccccgactgaagatccggacctccagcccccggcggcccctcgcctagtccagagaccgcagcctcgccgccccgctgcccctgagccgcccccggcccagccccggcccgcagcgctctcaccaggcgggcggccaggccccgcgctccgcactccgcactccgcgctccctcccagcggcgccgcctcctggctccgagcctcgctccccggcgaagccgcccgcgccggggctccgcggcagccggctctgacggccctcccgtccgcccgccctcgctcccgcgccctctctcctcctcctcctcctcctcctcccacccagcccgccacccgcggtccccccacacccgggcgggcaggcaggcgctcacagcagcgcggagccgcggccacctcggtgccgggcgcctccacgcgcgctcattcacccagcgctgtcaatcagccgcggcgggcgcctcgctgtgagcctggcgagagcaatcacacactcccagggcggcccagcacacacatccacacgcgcgccaggaaacacactcgcaggtcagagggcgcgcgcacacacgcgcacacatggcagcctgccccaggatggcaccccgggcaataagagtcccaccgtttgctaagtagaagtacaatggacaattctacttcctttatctcatgagtcctcaccgcaaccctgtgtatgtcgccactttgcagacaattaaatgaagacacagaaaattaccgaatttgcccaagattgcacagcttggtagaaactcgaaccgtctccctgccggccctctccaccacctggtggttttcaacagttgcactgctacacagcagtgcctccaacacttcaccggtgaactgccaaatgccaatccctgtgtgacatgtcttttcgctaaaactgatctctcaaaaatactgtttcagaaatgtctgccagaaagaatggtgagctaagctgcttgtgagaagtggattacaactggtttctagtaagaggtgtgaggagaacagtaaaatcaaaggctgggttcagtggttcacgcctgtaattctaacactttgggaggctgaggcaggctgatcgcttgagccccggggttcaagaacagcctgggcaacatagcaaaagataaaataaaaacaaacaaacagcaagcaagcaagcaagcaagcaagaaaaaaagaagaaagaaagaaattatctgggcgtgatggggtatggtggcagacacctgtagtcccagctatttgggaggctgagactggaggattgcttgagcctgggaggtggaggttgccgtgagctgtgatcataccgctacactccagcctgggcaacagagcaagaccctgtctcaaaaggaaaaacaaagaaaaaagagcgtgccccttcacagaaagtaagagagctcaggcaaaagctgacacaggttgaagatgaccaagaaaaccgagcagtcactatgtatacttcatggaacctgttaagttgtagtagtgactaactgaagtactactgactcattcatgtggttttgagtctctaaatcccttcatgttttcttcaaacaatgatagtaatttaaaagtatcagaacatgaaacacttctgtctccctgcaccatttaaaactttccctcaaaatctaaacatccaactgtgtgccaagaatgatggtggatgctttataagagtctccttacttattcgtcaccacgagccacagagacagaaaaattattgtcaccatgttatagccttttatatgaccctgaattccctttccatctatatcccttctcttcttctcttgaaggttgtggcagttgcagggtgtggggcggcggggggcgggtgctggtgttgcttaaagagttacctagggcagattctgtctcagtaattgagagctagcttagcactttgtggatatggtccatgcctatttgataagtgaataatgatgaatggttctggggtccatatgggcaatgggttgcttttcagaaaggcatcttccttatcacagagccccgccaattcatgtaaaatcaaatcaggccaccaactgaactactctcagggccatcaacgataaagtctgggatttattccaggtcccttaacaaagcattgcaaaggacatctccagatgcacccccaggggttatcataacctgcccccacccccaagtccattaggggctgcccggaggctgcaaactgggattc

SEQ ID NO: 586858 - DNA, 4001 bp, Homo sapiens
cacaaggagctccttgaagttttcccagcgttcttcaccccaggcctttgccaactgtgcacagtgcctgttcctccctccattcttggcctggtgagaaccacccttctgtgtaatctaatccaagggtagccatagcattagcatctcctgggaacttgttagaaatgtgaattcttggtccttacccccacctactgatcagaaccttggggaaggggcccagtgatttgtgccttaacaagcctgcagggcgttctgatgcatactcaggtttgagagttcttggtgtaggcagcagttctcagctctgtctatacactctacagttagcagaggtagagtgtaaaattctcactgatattcacaccctcttcctgaaaattttgacttaattgccctgggataggacaaaggcatctgtatttttaaaaagtctttcttagttggctttaatgtgtagctaaccagcaaaagatacttgcctgcttttctcactagctctcaccaccccaagatcatccctgcctgcttttatgaccacaacccttgctgtttcatggatttgcctgggtgtgagaggttcctgtcttgtgttcactctctgctctggagagtccgcagctgccaacaagttttcttctccaccacctctcccatccatcttacccaacctcagtagttccctgggctgaagccaagctctcccaggcagactggccgggagctttgcagtcgggggccccacacttacgacttgtagcagtggcctgctgataccacccactgttcgttgatgagggagccaccacagaagtggtagccagaattcagggacacctggtaggggacagaattctcctcacagttgtagcccccaacgatcttgtcatcatcatcaaagggggcagcaactggagtggagatgggaagggagaaggcaagtcaatagcatgttaggggtggcgctcccagcctgtgattgctttctgctaattagaaatccttaacaagcacagtgaggctaggcaagggagggagctctgccacccctggtgatcatcactgcctgtggctcccaagtctctgtgcctgcagggcacatagctaggtaccctgcggaggatccgagctctcctggggtcaccaggctgaagtcgcaaggaatgtcctcacaatgcttccagtgggataggagttgggatgtggttgtctctcccactgagtgcttctctcttttattcatcacctgtgtacttcccctggctatttgggccctggattgtcaggattcttttgccaagctaggaaaaccccctgtctgcatagacctggccatgaccaccttcccccatagctcagatctgtgcagtcagggcagagttgagggcagcccccaggctcactttggcagaacaaaggtagactttgttattggccaataggacagcaattcttaaccttggctgcatggctggaaatattaaaaatcacctgggaagcttaaaagcccagaacacaagctctaccccagacaattgaagttagaatttctagagctgagtctctggcatgagtaatttttcaacctccccaggtgcattcgaggttaggagcagctatagtggtgctattctgttgctgttggagccaagcctgaagcctgctgcttcatttcgtgggacagccccacctggcccccttcccagcttctccaaccacaactcggatatggatgaatgacagtggtgggagtgaagtcaaggagaaggtgaacaggtgagacttaaaaagagcccaaggaggatgggaaggagatatgccagatggaggaaacggaatatcagagcacagtcaaaagaggagaggtggtaagaatggaagggcatttgtcggccaggaacgggggggtggttggggcctgaggcagggcatgatactcacgagcagctgccacaaaggtaaggatcaggagtggattcatggtggtagagtgtgcctgactggtggtggaggactcgtctttatacctcacgaggatccagagaggaggtgactgtgaggtgagggtcaccactcctcccagcacaaacacacctgcagctttcctcttcccagggtcttgcatcagcctggctatgtttggccactctctgggtttgtgattcacaggtgataaggaaactttccttctgagagcagagagcgagaccggctgtttcctgcaaggatactgggatggggaagacagggaaagtcaagccccagataacagagctgggctttcttaggccctggagatgagggttagaaggagggagaatggcctagctgtttacaaatctttccacctattgggaatgtatttaatgtacttaaggaagggcaagcattggtaaaaagcttggatttcagtttcctggggcccacatgagaggagcaaagtcttatctaaggctcattcctgtgaatatgaagatgcttctctccagtcagtgtgcaggaaggtcaaatgcaagattttggggaatgaaaattccaacactaaggggtaaggagaagggagactcagcattccataggattctgggcttccagatttctctccttcctaccaaggcttaaggatgggaagtgtttcaaagaaggagggggcacagtttctgtaggagctttctcagtgcctctggaggatggaaaaccaatggcgcactcctccccttcttcaatgtgaagacatttgtctctctcatgtgcatcctgtcataggttctttttatgcagcctcactgttgtccttgcaatctgcactcaggtgatgcaaactgacccacctgctcagggctgacagtctgaaccagaatgatcagatgatcattttctattttcgatgcagtgagattatgcttggctcagtacaaagtgaatcttcctagagaatatcctgatttgggccctaccaaggctactaagacacagttgtgtaattgactgaggcacaacctggccagagcagtgtggaaatggagatgctgtctgtgctcaagtctaatgatgtagggaaaggaggagcttccttatgagggtgctttcccttctcagcaactctgagctcaggctggtgatgggcaggagtaagtagagttcaagtttggattctttgaaaggtaaaagaagcagaaatgttctagagacggtggacaaaatgggaaaagctcagaaacttggtgttgaaatcggacctggccagggggctagagggaggaagcaaatggaaaccagagggaattggaaataatgccaaagtggggcccatggtgttgagaggacacacagagtaccttcggtttcagctcctggtatggctgctgagccagcttccccacagccaggagacccactgcttggagaccccctctccgcctcgcaccccctctaatcactaatgggcccatacctaacactgctatgcttagatggtgcacagtgcctgacaactttacaagagttttcatgtaagcaacagtggtacattacttttcatttatgctgagtttcacactttaacttcccacaaacatgctaattgtaatttgtgcagagcaaaattgtttccatttatagagcaagagactgagattcagaaggattctgtcttgcccaagaatacagatcttggcagagctgaccataaggccaacagaagccatggagagcattgtgaagtgtgggaatttcatctaagaggaggtatctaaaaggagatttattgaggatcaagacagaggtccctagaggacaaactgtacatctgattccttcctggtgcttttcttcctggtagaaatggatgattgaatttatctttctcctggcacctagtctcagagcattaccatgccacagttcgagacccatccaggccatgactgccatgtagatgacaaacttctctgctcacgaataacttgccaagcctgaggtagccaggttttggagca

SEQ ID NO: 586859 - DNA, 4001 bp, Homo sapiens
tcactagcactgtgggcacaaggagctccttgaagttttcccaacattcttcactccaggcctttgctaactgtgcacagtgcctgctcctccctccattcttggcctggtgagcaccacccttctgtgtaatctaatccaagggtagccatagcattagcatctcctgggaatttgttagaaatgtaagttcttggtccttacccccacctactgatcagaaccttggggatgggtcccagtgatttgtgccttaacaagcctgcagggagttctgatgcatactcaggtttaagagttcttggtgtaggcagcagttctcagctctgtctatacactctacagttaccagaggtagagtgtgaaatactcactgatattcacaccctcttcctgataattttgagttaattgccctgggatagaacacagggatcagtatttttaagtactcattcttaggtggctttaatgtgtagctaaccagcaaaagtactagcctgctcttctcactagctctcaccaccccaagatcatccctgcctgcttttatgaccacaacccttgctgtttcatggatttgcctgggtgtgagggcttcctgtcttgtgttcactctctgctctggagagtcagctgctgccaacaagttttcttttccaccatctctctcgtccgtcctacccaacctcagtacttccctgggctgaatccaagctctcccaggcagcctggctgggagttttgcagtcaggggccccacacttacgacttgtagcagtgacctgctgacaccacccactgttcgctgatgagggagccaccgcagaagtggtagccagaattcaaggacacctggtaggggacagaattctcctcacagatgtagcccccaacgatcttgtcatcatcatcaaagggggcagcaactggagtggagatgggaagggagaaggcaagtcagtagcatgttaggggtggcgctcccagcctgtggctgcttcctgctaattagaaaaccttaacaagctcagtgaggctaggcaagggggggagcgctgccagccctggtgatcatcactggatgtggctcccaagtctctgtgtctgcagggcacgtagctaggtaccctgtgggggttcagatctctcctggggtcaccaggctgaggacgcaaggaatatcctcacaatacttccagtgggataggatttgggatgtggctgtctcaagcactgaagtcttctctcttttattcaccacctgtgtactccacctggttatttaagccccggattgtctggctactttggccaagctaggaaaaccccctggcgacatcgacttggccatgaccagtttccccctcagctcaaatctgcccagtgagggcagagttgagggaagccccaggctcacttttgcagaacaaaggtatacgttattattggtcaaaacaacagcaattcttaaccttggctgcatgcctagaaatgttaaaaatcacctgggaagcttaaaagcccagaacacaggctgcacaccagacaattgaagtgagaatttctagagttgagtgtcttgcatgagtaatttcaacctccccaggtgcattcgaggttaagagcagctatagtggtgctattgtggtgctgtcagagccaagcctgaagcctactgcttcatttcatgggccagccccacctggtctcccttcccagcttctccaaccacagctcggatatggatgaataacagcggtgggagtgaaatcaaggagaaggtggaacaagtgaggcttaaaaagagcccaaggaggatgggaagaagaaatgccagatggaggaaatagaatatcacagcacagtcaaaagaggagaggtggcaagaatggcagggcatgtgtctgccagggaagggttggttgaggcctgaggcagggcgtgaaactcaccagcagctgcaacaaaggtaaggatcagaagtagattcatggtggtagagtgtgcctgattgctggtggagaacccgtctttatacctcccgaggatggggagaggaggtgtctgtgaggtgagggtcactgctcctcccagcacaaacacacctgcagctttccccttcctatggtcttgcatcagtatgtttggccactctgtgggtttgtgattcacaggtgataaggaaacttgccttctgagagcagagagggagaccggctgtttcctggaaggatgctgatatgggaaagacaggggaagccaagccccagatcacacagctgggctttcttaggccgaggagatgagggttagaaggagggagaatggcctggctgtttaggaatatattttactattggggttatatttaatgtacttaaggaagggcaagtgttggtagcaagcttggctttttagtgtcctggagctcccaggagaggggcaaagtcttatctaactaaggcttgttcctgtgaatatgaagatgcttctctccagtcactcagtgggaaagtcaaatccaaggctttggggaatgagaattccaacattaaggggtaaggagaagagagactcagcattccataggatgctgggcttgaagatggctctccctcctaccacggcatagggatgagaagaaggagggggcacaggttaggtaggagcttactcagtgcatctggaggatggaaaaccaatggcgcactcctccccttcttcaatgtgaagacatttgtctctcatgtgcatcctgtcataggttctttttatgcagcctcatggttgcccttgcaacctgcactcagggtgattgaaactgacccacctgcttggggctgacagcctgaaccagaatgacatgcccctgatcacatgtcagagtttggaccatggtaaatctgggttatgatttgatctgagaatcagcagtaggtagggatttgagcacatggtaaatgggtgacatattgggttcaataacaaagatgtggaggggtgggtctagaattttctattttagatgtagtgagattatacttggctcagtactaagtgaatctttctagagaatatcctgatttgagccctaccaagggtactaagatacagtcgtgtaattgactgaggcataacctggccagagcagtgtggagatggagatgctgtctgcgctcaggtctaataatgtaaggaaaggaggggcttccttatgagggtgctttcccttctcatcaactctgagctaatgttggtgatgggcaggagtgagcagagttcaagtttgaattctttgaaaggtaaaagaagcagggatgttctggagacagtgagcaaaatgagaaaagctcagaaacttgctggagaaatcggacatggccagggggctagagggaggaagcaaatggaaaccagaggtaactggaaaaaaataccaaaatagggtccatggtgttgagaggacacacagagtaccttcaggttcagctcctggcatggccactgaggcagcttccccacagccaggagacccactgctctgaggccccctctctccccggtaccctctctaatcactaataggctgatacctaacgctgctatgcttagatggtgcatggtgcctgactgcttcacgggagttttcacgtaagcaacagtggtacattgctctttgtttatgctgagtttcgcagtttaacttcccaccaacgtgctaatggtgacttgtgtggagcaaaattatttccatttatagaggaagagactgagattcagaaggattctgtcttgcccaagaatacagatcttggcagagctgaccataaggccaacagaagccatggagagcattgtgaagtgtgggaattgctgcacgtggcatctaaaaggagatttattgaggatcaaggcagaggtccccagaggacaaactgtacatctgattccttcctggtgcttttcttcctggcagaaatagatgattgaattcatct

SEQ ID NO: 586860 - DNA, 4001 bp, Homo sapiens
accaaatagggagcagggtcttctttctgaacagatgagtcagcaaagaaaaatgtccctgagaaaataatgaacattcttaatacataaatattataaaaataaggtaacagtctcttacttgaaaaggaatctggatgattcttaaacagttatcagttggccaagaagtgttaacgtatttgacatgtttttctaataaaaatgtaaattaaaacgatatgccattttatcttatatttataataattttgtttaatattgataatattcaatctaagagagtataatgagagacactcatcactgctagtaaattgattccatcttcttgaaaagcaatttagaaacaggcatcaagaatcataaattgtttataacctgtgacctaatcattccaaccccaagaatccattctaaagaaaaaaatcagatatagacaaggattacaaacaagtatgctcatgttagctataacagctgaacactggaaacataaatatctgacatagtaatgttggacattgaagcacatcaaaaagtggaacatcatatataataaaaattaaactaattagaatattaaacagcaaaagaatattaatgcttatttaagttaaaaagaacaagaaaattgtggatataatctatttgtctaaaaacaaataaataaaaacatttaaatgcaaaaaatatatagattctgagagtaaactcaaagtgttagcatgtgttgactaagaggtgggattatgaatgatgcttatttttctactttaaaaatgtctaaattttgtaatatgaacatatattgtttttataaatgaattatttaaaacataccctagagaataaaggggaggaaggctgattctagtatcagaaataaagccctcttcttgtcttggcttctcttgctactcctgttaaccttccccaagactgggtctgtacctcaccacacccttctgtgtgatcacacagttagaaaccccaaagagaaaagggtagactgtaaacaagggcaagagacattgagctctctatagcaggcattgttctaagtgctttacatagatttatttaatcttcacaatagctctataatatgggtagtcatacccccattttgaagaaattgaagcacagaagagttaattaacttggctaatctcacacagctaatgtgtgatacaacctaggcagtcagagaatggtgggaaatgcctcatctgcaaattctgctgtcagaagaaccccatgtggggcaaggactacagaaggtagggtcctagtacttgatcttttgtttctacttctctgttttctgcattagtgtcggtgggaggacactcactgttaagccttctccaaggcacatgtgtgccttaacccaccctatagcttaacactagaaaagtgggctcagcctatccggagagcctttggatggagtctgagaggcaggactcctaattctgctgatgacactatttttgactctttttctgcacccttcgcaatcctgcctctgtctcaccccatccattaaactgtgccttacaggacagagtacaaggtcttgagtacataccagcgaggacacccaaatagaagacatatttcatggtgatccagctcttccccctgtgagatgtagaagaaaatcagcagagtgtggagcggttggcttagttgtcttctcaggaacacctggtagactcagtggctatggttagatacggaggcactccatgggattggaaagcagctctgggcataaacaggggagggagatggcttcagagagacagatgaaagccctctgttccagggaaggtggaggactgtgcctctgttggggcatttcagggaaggaaactcctggattcagctccttctatctgctgcccctaaaaacacatctgtttgaaggtagttcagttgtctgtggaaatggcagctctaggctcaggacttatcttccccacagagtttctgagaccagggctatgagggacaatattctttaccttagctcagggagtaagtgtcctgaggtttgctctgaacctcctaatagttacttatactttccccagcccctcccatctttgttacactagcttcatatgtccctctgatcactgtttcatcactcagtcatcatcaccaacttggtgttttttgtcctgagcaacagcattgagccaagaaaatatggaaatgaaaagcattcatagaacagttatcttgatagttggggaattgtttacagtctagatgacattaggcctggtgacaattcagaaggcagtacctctaatacttaaagacttagaccaatattagactaccaaagtcatccttggataattgggagcatagtctaacaagaaaatgagcggtaacactaatagctgatatcctctaagcatttactgaatcctaggcactgagctaagatctttacggacttgtcagtagagattttatatcaggttagtctgagatgtaaaattcactacactttgtatcactctaaccctttaaagtttcttaaacccataatctctttccaaatgtcacaacaaccctagaaagaagagatagggctgggtctggtatctatttctggtctgtgggtggcagaactgaagcagagagaatctaagtagttttcccaaagtcacatgtcgtggacaatgagaaataggccttgtcactggtgtagggttgcaggtcccccaccaggatacttaagggtgtatgaccactgcttgaaccttaatggctaagtagtgagtcaaggacacggtgcccagccaagaagcaggtatccttgatggccaagtggtgagtcaacgccatggtgtccagctgaggagcaggtgtccttgagtacccaaacatcccagagaatacctgagaacctatcaaggaaaacagtcccatcatgcacacacagtaggcaaagagccagaaaattagcttaaaagcagcttagagatggaaagcagggcaggtctctaaaggtgtcctctgctatctaggagtgtctcatatgtaagtcctaataaacttatccactggccaagctggacttgtctgagtcattctttggtctcttggctccctcctagtttgggggaaaggtttttttaaaaatatgattctggatttttcttgttacaattggcatcacaaatggggtcagagagaccaaacttcgagccaggaatgagtgtctatggtggggaatccctgggcagtcggcaatgtccatgtggagtggagttgcccaactgcacaacttttgtgggccactgcatgagtacagggatgcttggaaaacatgggcaaggactgaatacctattgccaagaagccaagatattaaagtatgataatgatagtaaatgtggtgttattgcaataaggctggctaatcacaaatcattagagcaggaaagggagaaagggtagaaactccagcagaagctaaaaggcatggttttctaatcctccagctggttacatattatggccctttcttgtgtacattttaaaactgacgggcaaattacaacaagaaaaattcagagctcaaatgtttaatctacaactatagagttaagtagagtcttctaaagctctctatttctctttccttttctgcctgctttgaatctactgttaataagttactggtattgagataaaactcactaattcaaggtcaatttgagattttttttttcctcatatggttcagccagttctagctaaaatgtaaagaattaaactcatttggaactgaaaaaaaatggataaaggaggtttttaaaaatcaaactgccatagaaactgctttacccaaattattgatccactgctttccttgggttacctattggggcaaataaagtttagccatgtgaacaggtcccaattttatcaaaaataatctggatccagctgtcttttatatagtaatgagt

SEQ ID NO: 586861 - DNA, 4001 bp, Homo sapiens
tcccaacaacaactcaagacagaattatataagtatcatgacaagaacagaccaaatgctaagagtctgaggaggggaaaaataatgtattgttttaccaaatatacattgagcacctagtatatgtcaagctctgttttaggggcttgggctatatagtgaacaaagtagatattcctgctctcatatattacaattaatgaagatattcagtaataataaacacaacacacaaataaactatgtaggatgttaaatggtgattagtgctatggaaaaacacacaagtaaactatatatgatgttaaatggtgattagtgctatggaaataaaagtaggacagggaaagagagaaaggtattaccaattgtgtgttgggggagaaggaggggtttcaggcagtatttgtttgttgtttgtttgagacaggatctcactctgttgctcagattggagtgcagtggcaagatcaggctcactgcagcctcaacctcctgggctcaagcaaaccctcctgagtagcttggactacaggtgtgtgccaccatatctggttaatttttaaattttttaatttttttaatagagatggagtcttgatatgttgcccaggctggtctcaaactcttgggctcaagtgatcctcccacctcagcttcccaaagtgctgggattataggcatgagccattactccagtctcaggtaatattaaaccagtcatcagagtataacttcatgggcaatgttgaacaataacatgaaaacgggggaagttgctagtcaaatatctgggtgaagggactccaggcagaggcaacagctgcagcatgggtcctgaggcttgtgtcagttacatcacagaggccatggctgctgacccagagtgaatgaaggggagcagaggaggaaaggggctcaaagaagaatggagggttttgtagaccatcgtaagaactcggccttgtttcctgagtacaaatggaaccactcaaggatttgtgcaaaggagtgatgacagtctcctcatggagaacctgtagagtgtagaagtatagaggtagaggggtctgttaggagaataatttgctaatccaggcaagaggtggtggcttagatcattgtgagcagtggagatggtgagatgtgattgaatttaggatacatttagaagacaaagccaacatttttctaagagatcaaacgtggggtatgagagaaagagaggatttatgaataagcctgggtttatgcctgagtaactggaactgtgccaggagatatctgattcttcaatgttctgctgtgccctctgtggtgcagaacatcaatcctgttgcagacaggtccagagtcaggtcttaggagtgggtctggtatttgagtgacaatgtccacgcctcccacaaaagcacacaagcaaacctcctgcggcaggcaggcaggcactatcacaggaggaaacttgatgggaacggggcagtggagagggacagaggaccatcctacacttgaattctggaatgatgcctctcgctgttacccgtctttcatgcttttcccaggatttctctttggtgggtaaagagacaaatatgcacacactcaccagtcagattcaagagagcccagaggaggataaacttcatgatgatgttgaaagcccagtttagctccagtctctggaaaactgggaagagagagagaaaacaactaaataaaacaaagcaagattgtagaattggaaaaatatatcatctgaattattttagtagcaggattcagttttagaaatggtgtccattattcagaggagagtgtagcgtcatctgtcagagagacaagaatagagtcaagtgattggtccccaatacagttgaaaatggttctggaactcagagttctgccctctgtcttcagggaagaaagtaccaaagctaagttgaagttcatgatatctctacagacgcctcctgtctggtctcctttttgccagccttggtaggcaggttcccctctaaactatgtgtgggctgctgcccctcctgtctgtgtgatgctatctcccactgtgtgatgctatttttctccagtggacataatgtagccctctggagctgacattgcttcctctgcctgacattaaactcctctttgaaatacattaaccttttccttcatgtcactgtttatccatttattctgtgaaccaacctgctaattatttatcttatgtatctaacttgtgctaggatctgtgcttgctgttggggttgcctcaactgaaggatttctttcctaccttccaagagcttacagactagtgggaatgatacttaagttgatggttatgaaacaaagtattcagggctaaaaattgagatatgccacagactagataaaaatatttgcaaaacacatatctgctaaataattcatgtataaggaaatagtaaaattcgacattaagaaaacaaacaacacaacctaaaagtgggccaaagatccttaccaaatgttttagtctgcttggactgccataaaaaaaaccacagtctaggtgtcttacacgacagacacttactttcttatagttctgaaggtcagaagtccatgatcaaggtgttgtcaaattcagtttctggtgaggcctctctccctggcttgtggatgatcaccttcttactgcttcctcacatggcctttcctctgtgcacacagagataaagagggaaagaaagctctctggtgactctttttataaggacataaatcctattggatcagggctccacccttctaacctaatttagccttaattgcttccttttaggccctatcttcaatacagttgcattgaggtttaggccttcaaacagatatattttgcagtgatggggaagataacaccagagaatatatacagatggtaaatggcatatgaaaaaattcttaacataatatgtcattagggaattacaacaacaatgggatactactacataccctgtggaagggctaaaattcaaacactgacaacaacagatgctagtgaggatatgaagtatcaagaactgatgctggtgagaatttattgctgatgagagtgcaaaatggtacagtcactttagaaaatagcttggaagtttcttattaagctcaacataacctcactatatgatacagcaattacacttcttgatacaccaaaagatttgaaaacttgtgttcacaaaaatcctacacataaatgtttatagcagctttgttcaaagttgccaaatcttggaagcaaccaacatgtccttcaatagataaatggataaacaaagtgtgattcatccatataatgaaatgttattcagagattttatgatttaaaaaacttaactctcaagccatgaaaagacatggagtaaacctatatgcatattgctaagtgaaaagagctagtctgaaaagattatataccatataattccaattatatgacattctgggaaaggcaaagctatggagacatatgtatgtgcaagaacttttttcctataatgacttcttttcctccggatagattccaaggagtgggattgctggatcaaatggtagatctactttcagttctctaaggaatctccacactgttttctatagtggttgtactagtttacaatcccaccaacagtgtaaaagtgttcccttttcaccacatccattccaacatctattttttttttttgattatggccattcttgcaggagtaaggtggtatcacattgtggttttgatttttttttcatatgttttttggccagttgtaagtatttttttaagaattatctattcatgtccttagcccactttttgatgggattgtttttttttttcttgctgatttgtttgagtaccttgtagattctgaatgttagccctttggcagctatacagattgcaaagattttctcagggttgtctgtttactctgcagattatttctttt

SEQ ID NO: 586862 - DNA, 4001 bp, Homo sapiens
acacacacacacacacacgcacacacacacacacacacacacaagtttggtttttttaaaaaaaacttttagatatggggtatcactttgtgacccaggctggagtgcagtggcagaatcacagctcactgaatcctaaactcttgggttcaagtgctcctctcgccctcagcctcccaaatagcttggattacaggcacatgcctggctaattttttaatttttttcagagatagggtcttgctgtgttgcccaggctagtcttgaactcctgggctaaagtgatcctcctgcctcagtctcctgagtagctgggattacaggtgtgagtcaccctgcctggccaaaagtttattttaataaagaaaatttgttataaaaagattcagtccctgaaggtatacggttgttttatgttttcagctccactaggattacactttcttcgcgataaaagaccacatttgcagcctgggcaacatcgcaagacctcatgccttaaaaaaaaaaattagcaggcagggtggtgcacacctctagtcccagctactccagagactgaggcaggaggatcccttgagcccaagagctggaggctgccaagtccctgtccctaaaaaaaggaccacatttgttttcttcataaataggaacagtgaatacatcctgcacacactattctgtcatatgtaatataatgagaccttttattgcataattaaattaatctcgttcaaaggttacaaaaaaactattacatacacccactgcttactgaaaactgccaagagaaaagtacttttggaatttaagacaacgttatgtaatggaaagtgtatttttgttatcagaaaaaaaacccagtttgaatgtcaactcagctactcaccgatgaccttagacaagttgtttaatttgtacaagctgcggttagttcatctgtaagaagctgagataacattcattatagcagtggaaagagatggagcaggttaaggttaagttgcacctaacaaagtactcaacaagttagatcccgcctgccttcagttgtcaggagtacattttaagtaaactgggcattactgatccttaagaaaatgggtaagtcagaaaacttccccagtcaatttttaaaagtcttcggcgatggttttctcacgttgagagccatggttcgccccaactgtattttggaaagtaaacttattattctaatccccttttctacaatagaaaaacctacaatcttgtttaaagtaaacatccccctccccgacgttccccccagtccaccaaaaaaagaccaaaactcaaacttgcctcgttgttaggggttcacaaaaaagtgataggggctttcggtttttagtccttatgtttctaattcgtgcatcgaagaaaccgaaagcgggaggttttgaaagacactagtgccaaatggagaccaagactccgacttaactgtaaagctgagagttttccaagaaaagggaaccccacatatttgaccaagattccaagtttcagaaaccaccgcatcaggtctacttgagccaggaaaaaaatcctgagttcggaacgggccacccagagatggttaagctaaaactgccttcttttctggtctccaaagtgaaagcgaatccttggctatgtgcctcaccgtcccgcagccccatgttaaccccgcaaaaccgcatccccccgaccctccagcagcctccgaccaaggaagctccaggaatcccgggtcggcctggcaaatgactttgcaaagccgcatttccaactccattccctactggaccctccagaagcaccaatgccgacgtcaggatgggaaaaactaaatcgacagagtaccagcaacctcgactacgctgaagacctcgagggccccttccatacctgaatgtagtcagcgaaaagctgtacccgcgctccgccatctttacccgaagagccaaagcacagccgcacacatgcgcactgtggccgatttcctttcatttccccgcccctcacctttcctttactctctatgattggaggagagtcagagctgctccaagagcatgcggggtgttgtagttctaagaagcgaggcttgcccgattctgtgcctgtgcgcatgctgaaagcaggggcgggaccggggcggtcttccagcagggaaaatggcgctggccatgctggtcttggtggtttcgccgtggtctgcggcccggggagtgcttcgaaactactgggagcgactgctacggaagcttccgcagagccggccgggctttcccagtcctccgtggggtaggtaaagaagggctccgtgggagagggggctgatgacgggacctcgggcagcgtagcagacgcagcttacacagttcgccctcagccccggttctgatccgcggcctcatgtcggggacgtagttcgtgacattcccatattagcgagaacagaacgactgtttttgcgctccctccaccgcaaaaaaaaaaaaaaaaaaattcctctgcttgttccattcgtacacagaatgtaacccaagcttgtgtcaaagataaatcatagccagccagtaagtaaagcgctgaaaacagattttattcagtaactactgcaggtaaagagctgagctccatcccggtttgtgcagaggtgactttgggcgttttaaagggagaatgagcgaggcgggagtgtaggggctctgtagagtcagagaagtgtagtatagtgaagtcagtgcaaatgtgattagccggctgtgtctgctagctcgcagttgtcttagggagaattctatcctcccgcagagactgggagacaaaggccctatccttcctaatgattagatttcgaaggaatggctctcagggccttgaaagaaaagcttccgagttagttgcaagggatacgtatttacaattatatgccctttccaggaaatgctctaagggagttcgggacctactatcggggtatgttggccaaaataaataggaaattttccaggcagcgttgagctttctcaggcaggcactttaaagggggggccgaggtcatcctaggatacagccttatgctgctagaaactatgctagagtttggtcaagtctgtggagttcagggatttgtacagagttgtcctgagaggacagttctgcaggtctcacttggcatcaaggctcaccactctctggatctgtctttcctttccagccctgccctcacctcccctcccgcttcccctctcccccctctcctcttcccttcccttccctcccttctttcctcccttcctccctccctcccgcgcagtacatgttttctgtggtgtttgagctctgaggagctgaattctgtttcccatgtttcacttggaattaattttaattggaagtatcttggatgttgaaactgtcatggctttggcatttacattctactcaatttctaagcagcctgaaagtgataatatccagaaatataccaagaaaatatatgccactatatgccaagcaatgtgccaagctttctacatgtacttcctgggataatcttgacaacagtcccattaggtgtatacactttccaactgaaacagtaggctcacaatggtcccaagttcacagacagtcctgagcctgtgttgttaatcaccggggcatgcttggcaatacttgtggacatactgaaaataaatgccagttgttaagtgttagagaactttgtgtatttttaagagttcttaagatcaaaagaagtatgtgggctgggcgcggtggctcacacctgtaatctcagcactttgggaggccaaggtgggtccatcacctaaggtcaggagttcaagaccagcctggccaacattgtgaaaccctgtctctactaaaaatacaaaattaaccaggcgtggtggtgcacacctgtaatcccagctacttgggaggctgaggcaggagaatcacttgaaccagggaggcggaggttg

SEQ ID NO: 586863 - DNA, 4001 bp, Homo sapiens
gtgagctgagatcacatctctgcactccagcctgggtgacaagagcaagactccatctcaaaaaaaaaaagggtatgtatgaataaacgcataagatcctatatacatgttagtcataactgtatccaaggaataaatgtattaatatttttacagaagaacaaacccagagaaacacacagatcactgtgcacagatcaaatgataaatctctgtgtctaagttttccaataaatactgagtatatctgacattttcagtgtcctaaaatatttttaaaagaaacagcagaatgagatgaaggtagaaaggaaatgctttcttttgggggacagtgtaaatggagaagggtgctaggaaaagttgaagttgttaagaaagggaaaagtaagaagaaacataagaaataccaaaagaacatttaaaaatagcttaaggaacaaaaggagaaacggcataaagatgagactacaaacgggactactgggaagaagttatatccaaaactggtgtgcatatctcatgcactgtaagttaaagtgtcaactggtacaatctccatggagtgtagtttggcacttacaaaatcagaactccacttctagaatttatcctacaatttgtacttgtgcacttggtaaaagttacataaacaagattattcatttttttaaatgtttattttatgtacaaagaactatcatggttttccattgggtagatgccttggataatcctttgaaggaagatcacttagtccaacttaatgaaaccaatatccttcccatactgacaaaaacactggcggcacatattgaggccatatttccggatcagaccgtgccggtttgaacagacgcgacaagagcgagaaccctggccgaattttcgcgggtggctccagcatagcttctggtgacccatcttggtctcagagtgcaacgaggtaaaaggtactcattgttttataacagcaacaaattggaaaaatctacacgtccatcaataataaatacattactgtatacgcataatacaggatactatgcagatgcagaggaagtgactacatgataggaaagtatctctaatatatattaattttttaaaaatcaagatgttgaagtatgtacagcatgctacatttgtgttaaaaaaaaggaatagataagcacacttgcttgtatatgtatagaatatgtctaaaaagatatgcaaaatagcaacattagttgcctctgtggagaagttggtggctggggccaaggatgcgaggcttttcaaagatatcttttctgcctcttgaattgtgaaccctgtgaatgtattatctggtcaaataatttttttaagaaaattatgtctcagaattgtggctacacagtgacagctcccggctgtcacagggggaaggaggaggagaggaaagaggatcaggtgaccgagcaccgccaggcagaacttttcaaggcctattaggccaagcagggtgcgtgacttcttcaagacccgagagctgagaatgaataaaaatttccatcagcagataatacagaacttgtagtggatgagggagactgagaaggcaggcaagttaatccggccggtgtccagactaaattactaggggcacaaaagggccagagcacagagccaggagcgggaatccagctcctctccagtgccaaggcagctccgctccagtcccgccccagctccgagctccggcccatgtcaactgacctcggatgggcttgtcgtccttctcatcctctttggtcttccgctgatcggcaccgaggtaatccggcattttagcagctccaaaagcctccgctccttaatgattacacagcaccttccttgcttccggtggtgtcttccctttcccttccccaccggaagtaaattgggctcagacagacccctttatgcagtgcttcagagtccggacagagccctggggaaacgctttggcacgctggtttttggactgattacctgtgagaaggaaactttacagtgtttgtaaaacgcctggcatattagacacaataagtagtggccacatctacaaatatagtgaaggtaatctatttctggtaaagagttaatatccagaatatataaagaactcctaccacacaagaaaacaacctgattttttaagtgggcaaataacctgaataaacattgctccaaagaagatatacaaatggacaacatcactgttaggaaatgcaaatcaaaaccacagttggatgccaccacatacctattaagatagctattattaaaaaacaagcaaaaacaaaacagaaaataagtgttggaaaggatgacccttgggtccagccaacccttgcatgtgctgctggataaaatggaatcctggtgcactgttgatgtaaatgtaaaatgataaaatggtgcaactgctgtgggaaacagtatgattgattcctcaggaaattaaaaataattaccatgccacctagcaattcgatttctggatgtgtatccaaaagaactgaaaacaggatctcaaagagatatttgtacatccatgtccataagcagcattagtcatgatacccataaggtggaagcaacccaagtgtccatctacatatgaatggataaacaaaatgtgatacacgcatgcgcgctcacacacacacacacacacacacacacacacacacattattcagccttaaaaaggaatgaaattctagtataagctacaacacagatgaaccttgaagacattatgctaagtgaataagtcagtcacaaaaaagacaaatactatatgattccacaaatatgaagtacctagaggtgtcaaattcctaaagacaaagtagaaggatggtttccagtggacagttttttccactggcatagtttcagttttgtaagagattaaatgggtatagagtttcagttttgtaagataaaaatagttttgtagggtggttacacaataatgtgaatgtacttaacattactgtaaacttaaaaacggtgaagatcgtaaatttcatgttatgtgtgttttagcacaatttttttaaaaaacaaaacccccgaccgggcaccgtggctcacccctgtaattccagcactttgggaggctgaagcaggcagatcatgaggtcaggagttggagaccagcctggccaacatggctaaaccccgtctctactacaaatacagaaattagctgggcgtggtggcacgcacctgtaatcccagctactcgggaggctgaggcaggagaatcgcttgaacctgggaggcagagattgcagtgagccgaaatcaggccactgcactccagcctgggcgacagagcaagcctctgtctcagaaaagaaaacaacaaaaaaacaaaaacccatgttagagttaatggtaaaattgaatgggaggaggtgtgaggaaaaaaatatattaatatgaagaaagtggagtcaggttactttgcaccttggagcatgttttaacagtggttgcattagtagggatcaggaagaggttttggggcagaagattagttcaatttttttttttttaaagacggggtctcactgttacccaggctggagcgcaatggtgtgatctcagctcactgcaacctccacctcccggcctcaacgatcttcccacctcagcctcccttagttcaatttttgaaaagtcagttttgaagtgacaattttatcatgcagcagatatacagaccaattaaatgtatttaattggcctggcacagtgactcacgcctctaatcccagagttttgggagactgaggcaggaggatcccttgaggccaggagttcaagaccaccttgggcaacatagtgagaccctgtctctacaaaaaaaaatatacatatatatatatataatatatttaaaaactttaattgtgaaaatataatgaaattagtaagttattttctaatttactaatttctggtggtccttgcta

SEQ ID NO: 586864 - DNA, 4001 bp, Homo sapiens
cactgctaaagaccatcactccattcattttcccagcgccttccgcagccccgcctcttctggctctctctcatctaaaagaacccaggaaagagaagcctgcagaagcgagtgctgtcgaatctcacgtgtgatctccacagagcacagcacagccagccgcctgctcacgtaatgtaccatggcaggggaggcggctcgaatgacaaaactgctgcttctgcttgtctgctggataaaatgcctgcgggctggacaaagcatccactgagggcaagcagggcgccttgagacccacaaatgcccggaaaatgctatcgctgtaggggtatttgtccgccagatgccccatgtccttactgacaaatcacagccactggagaggtttatgctcctccctgggggtcccttcctgaccactttattattattattattattattattattaaagacagagtcttgctctctcacccaggctggagcgcagtggcacaatcatggctcactgcagcctcaacctccagggctcaagccatcctcccacctcagcctcccaagtagctgggagcacaggcacacaccactaggcccagctaattttttgtttccttttcttttccttttttttttaagaccaagtctctatctgttacccaggctggagtgctgtggcacgatcttagctcactgcaacctccgcctctcgggttcaagcgattcttctgcctcagcctcctgagtagctgagattacaggcatgtgccaccacacccagctaatttttatatttttcgtagaaatggggtttccccatgttggccaggctggtctggaacttctgaccttaagtgatctgcccgcctcagcctcccaaagtgctgggattacaggtgtgagccactgcacccagcctctctctatatatatattttgtgtaggcacttgtttttttgtagtgacttgtgtgtgtgttgttgtgttgcccaggctggtttcaaactcctggcctcaagcgatctgcccgcctaggcctctgaaagtgctagggttacaggcgtgagccacagttcccggccaatccactttacctcatcctgccccagaaggacttttgtggtgagcacaggcttgctgacgtcactggccacgctgctgggctccagggagaccagggtgcccatcttcccaaactgggtcaccaccaccaggatgtgactgctgaaggccgtacacaccacctgggtggggaccccgcacaccacctccgtcttctgcttcgatatcaccaacggcgtgtcttccatggcggggctctgcagtggcagctttaatttaggttaaaaagaaaggggaaaaaaaggagtcaatcaaacagtacagccttggggctcccaaaaaagtagcacggggcattgaaacggaaacgcaaggaggcccattcaaaagaaggggccaggcgcggtggctcatgcctgtcatcccggcactttgggaggccgagacaggacgatcgttgaggccaggaattcgagaccagcctggccaacatagcgagacccccatctctaccaaaaaaaaaaaaaaaaaaaaccagcagggcgcgcctgtggtcccagttactcaggaggctgaggcgggaagatcgcttcagcccgggaggtcgaggctgcggtgagccgtgatcacaccattgcattacaacccgggcggtagagcgagaccctgtccgtaaaaaaataaaacagaagcaggagcggggccgcccatagagaccgcgcctggggctttctgggttaggggatcgacttgcacgttcacactgccaggccgggcagtggcttcccgcccctcggcctcgccgccgccccggccctgcagccgcggcccgggacccccacgacacgcggtgccgaggccggccgggctactggggacgcagccgcccggggaagcccgcgggtacccgcgctcaccaagccggcgccgcgcccggaagtggctctgcgtgcgccacgcgggcccgccccgtccgcgggttccgtccaccttccggaagtcagggccgcggcgcttctggtcccggagacttggggctcccgggcttctgagcggctcgggttccgcgctgccggcagggcttgggggcgccttagagccgaaccccgttttttcaggaaagggcgctgcgaccacccccgtcccgggcctcagcccctctgctgcagaccctcgggatcgtcgctggtaggagctctgtcccccgtgtctgtgtccaggacccccgaagcgccgcgcctaggaaccccctagcgctgggagcccggccctgctcgaccacgggctttgggctggaggcgtcatcgtcgccacagcgaacgcttatttggcaccgagtgtccgccaggcatcgctctaagcgctttatacccataactcacttcatctcagccacccggttccgtagaagcgtttcatccgcgttttacagacgtgtgcaggtgcagagagctcggccaggctcaggcggcgggcgggctggggtgggctccgaccgtccctcgggcgctccgtgacacgaagccccggccaaggccaagaagggggccagccccaccctgaagcgggatgagttctggttcctcccagggaccccctcactccctactgctcactctcagtttctccaagctggaaggttttttgttttgttttgtttgagacggagtcttgctgtgtcacccaggctggagtgcagtggcgcgatctcggctcactgcagcctccgcctccctggttcaagcaattctcctgcctcagcctcctgtgtagctgggattacaggcgtgcgccaccaggcccggctaactttttaaatttttagtagagatggggtttcaccatgtcggtcaggctggtcttgaactcctgacctcaggtgatctgccttcctcggcctcccaaagtgctgggattacaggcgtgagccaccgcgccccgctgctggaagttttattggtagggtcggacatcttggtagcagaggctgaaagtgattggagcctccagagccttcctcggggtggggcgtttaacatcccttcagaaccccaccctcggaggccttactgtcgtttcctgacaaccatgtcaaggccgtattttctgtctatattaccagaaaggggtcccgatccagaccccaagagagaattgagggcgagtccacaaagtgaaagcaagtttattagaaaagtaaaggaattgaggcaggaaaacagggtctggaggcagggaacacttcagctatgacaggaaataccctctccatagggtgtacactgagtaaatgattttgtaactttatttcatcctctttatttacatagggcgtacaccaagtaaccagtagaaacccctagagggtatttaaacctcacaagttctgtaatggggccctgagcctctatgctttggccgcccccacaccatggaatgtactttcattttcaaaaaatttctgcttttgttgcttcattctttttttgctttgtgcatttttttttttttgagacagagtctctgttgtccatgctggagtgcagtggcgtgatcctcactgcaacctctgcctcccgggttcaagcaattctcctgcctcagcctcctgagtagctgagattacagacgtgcgtcaccatgcccggctaacttttgtgtttttagtagagacgaggtttcgccatgttggccaggctggtcttgaactcctgacctcaggtgatctgcccgcctcggcctcccaaagtgctgggattataggtgtgagccaccgcgcccggtggctttgtgcattttgtccaattctttgttcaagatgccaagaacctggacaccctccaccagtaacagaataaagaatggctactccataggcagagcagcatgggctgctggttgcccatttttgtggttatttcttgatgatatgctaaacaagg

SEQ ID NO: 586865 - DNA, 4001 bp, Homo sapiens
agagttctggcagcactcagaacactccagtcacgggcacactgctaaagaccatcactccattcattttcccagcgccttccgcagccccgcctcttctggctctctctcatctaaaagaacccaggaaagagaagcctgcagaagcgagtgctgtcgaatctcacgtgtgatctccacagagcacagcacagccagccgcctgctcacgtaatgtaccatggcaggggaggcggctcgaatgacaaaactgctgcttctgcttgtctgctggataaaatgcctgcgggctggacaaagcatccactgagggcaagcagggcgccttgagacccacaaatgcccggaaaatgctatcgctgtaggggtatttgtccgccagatgccccatgtccttactgacaaatcacagccactggagaggtttatgctcctccctgggggtcccttcctgaccactttattattattattattattattattattaaagacagagtcttgctctctcacccaggctggagcgcagtggcacaatcatggctcactgcagcctcaacctccagggctcaagccatcctcccacctcagcctcccaagtagctgggagcacaggcacacaccactaggcccagctaattttttgtttccttttcttttccttttttttttaagaccaagtctctatctgttacccaggctggagtgctgtggcacgatcttagctcactgcaacctccgcctctcgggttcaagcgattcttctgcctcagcctcctgagtagctgagattacaggcatgtgccaccacacccagctaatttttatatttttcgtagaaatggggtttccccatgttggccaggctggtctggaacttctgaccttaagtgatctgcccgcctcagcctcccaaagtgctgggattacaggtgtgagccactgcacccagcctctctctatatatatattttgtgtaggcacttgtttttttgtagtgacttgtgtgtgtgttgttgtgttgcccaggctggtttcaaactcctggcctcaagcgatctgcccgcctaggcctctgaaagtgctagggttacaggcgtgagccacagttcccggccaatccactttacctcatcctgccccagaaggacttttgtggtgagcacaggcttgctgacgtcactggccacgctgctgggctccagggagaccagggtgcccatcttcccaaactgggtcaccaccaccaggatgtgactgctgaaggccgtacacaccacctgggtggggaccccgcacaccacctccgtcttctgcttcgatatcaccaacggcgtgtcttccatggcggggctctgcagtggcagctttaatttaggttaaaaagaaaggggaaaaaaaggagtcaatcaaacagtacagccttggggctcccaaaaaagtagcacggggcattgaaacggaaacgcaaggaggcccattcaaaagaaggggccaggcgcggtggctcatgcctgtcatcccggcactttgggaggccgagacaggacgatcgttgaggccaggaattcgagaccagcctggccaacatagcgagacccccatctctaccaaaaaaaaaaaaaaaaaaaaccagcagggcgcgcctgtggtcccagttactcaggaggctgaggcgggaagatcgcttcagcccgggaggtcgaggctgcggtgagccgtgatcacaccattgcattacaacccgggcggtagagcgagaccctgtccgtaaaaaaataaaacagaagcaggagcggggccgcccatagagaccgcgcctggggctttctgggttaggggatcgacttgcacgttcacactgccaggccgggcagtggcttcccgcccctcggcctcgccgccgccccggccctgcagccgcggcccgggacccccacgacacgcggtgccgaggccggccgggctactggggacgcagccgcccggggaagcccgcgggtacccgcgctcaccaagccggcgccgcgcccggaagtggctctgcgtgcgccacgcgggcccgccccgtccgcgggttccgtccaccttccggaagtcagggccgcggcgcttctggtcccggagacttggggctcccgggcttctgagcggctcgggttccgcgctgccggcagggcttgggggcgccttagagccgaaccccgttttttcaggaaagggcgctgcgaccacccccgtcccgggcctcagcccctctgctgcagaccctcgggatcgtcgctggtaggagctctgtcccccgtgtctgtgtccaggacccccgaagcgccgcgcctaggaaccccctagcgctgggagcccggccctgctcgaccacgggctttgggctggaggcgtcatcgtcgccacagcgaacgcttatttggcaccgagtgtccgccaggcatcgctctaagcgctttatacccataactcacttcatctcagccacccggttccgtagaagcgtttcatccgcgttttacagacgtgtgcaggtgcagagagctcggccaggctcaggcggcgggcgggctggggtgggctccgaccgtccctcgggcgctccgtgacacgaagccccggccaaggccaagaagggggccagccccaccctgaagcgggatgagttctggttcctcccagggaccccctcactccctactgctcactctcagtttctccaagctggaaggttttttgttttgttttgtttgagacggagtcttgctgtgtcacccaggctggagtgcagtggcgcgatctcggctcactgcagcctccgcctccctggttcaagcaattctcctgcctcagcctcctgtgtagctgggattacaggcgtgcgccaccaggcccggctaactttttaaatttttagtagagatggggtttcaccatgtcggtcaggctggtcttgaactcctgacctcaggtgatctgccttcctcggcctcccaaagtgctgggattacaggcgtgagccaccgcgccccgctgctggaagttttattggtagggtcggacatcttggtagcagaggctgaaagtgattggagcctccagagccttcctcggggtggggcgtttaacatcccttcagaaccccaccctcggaggccttactgtcgtttcctgacaaccatgtcaaggccgtattttctgtctatattaccagaaaggggtcccgatccagaccccaagagagaattgagggcgagtccacaaagtgaaagcaagtttattagaaaagtaaaggaattgaggcaggaaaacagggtctggaggcagggaacacttcagctatgacaggaaataccctctccatagggtgtacactgagtaaatgattttgtaactttatttcatcctctttatttacatagggcgtacaccaagtaaccagtagaaacccctagagggtatttaaacctcacaagttctgtaatggggccctgagcctctatgctttggccgcccccacaccatggaatgtactttcattttcaaaaaatttctgcttttgttgcttcattctttttttgctttgtgcatttttttttttttgagacagagtctctgttgtccatgctggagtgcagtggcgtgatcctcactgcaacctctgcctcccgggttcaagcaattctcctgcctcagcctcctgagtagctgagattacagacgtgcgtcaccatgcccggctaacttttgtgtttttagtagagacgaggtttcgccatgttggccaggctggtcttgaactcctgacctcaggtgatctgcccgcctcggcctcccaaagtgctgggattataggtgtgagccaccgcgcccggtggctttgtgcattttgtccaattctttgttcaagatgccaagaacctggacaccctccaccagtaacagaataaagaatggctactccataggcagagcagcatgggctgctggttgcc

SEQ ID NO: 586866 - DNA, 4001 bp, Homo sapiens
ttacaggcagccgccaccatgcccagctaatttttgtatttttagtagagacgggtttcactatgttggccaggctggtctcgaactcctgacctcaggtgatccacccgcttctgcctcccaaagtgctgggattacaggtgtgaatcactgtacctggcctttattattattattattttttttgaggaatctcgctctgttgcccaggctggagtgcagtgacatgatctcggctcactgcaacctctgcttcctgagttcaagcaattctcatgcctcagcctcccaagtagcttggatcacagatgcacaccaccaggccaggctgatgtatttttacagagacggggtttcaccatgttggccaggatggtcttgaactcctgacctcaagtgatccgcccacctcggcttcccaaagtactgggattacaagcgtgcgccaccatgcttggcctcctcataacatttttaacagcagttataataaatccgcatgcacaccgtgtaatgcctatggaactaataactagtcttctatcgtgcagtgctactagtcacatatatagatgtttttgtgattctcaaatacacaaacccacctaagagcatcatatacccagatattcactgcagtctgaatagcagactgtgaacaacttaaacatcagtcagtaggtgaccggttagttgtgtcattctttttgagaaagggtcagctccgtagcccaggctgaagtgcagtggcaagatcatagctgactgcaacctccacctcccagattccagcaatcctcccacctcagcctcccaagtagctgggatcacagacgtgcaccaccacgcctggctaatttttgtatttgttgtatagatggagtctcgctatgttacccagactggtcttgaactcccgggcacaagtgatgcccccgcctcatcctcccaaagtgctgggattacaggcgtgagccacccagccctggcccctagttgagtcattcttacaaagaacatcacgctgctgttaccgaggacttcccattagtcttgatatggcacaatctccaagacacttaaagtataacacaccctgcagtgtgtattatgaattgccatttgtgtggggaaatgattatattcatatgtaagtttataaattcagaaagcattccgaaaattcatagagtacccaggggtaactttgcttgtctctagtgttgaactagaagtgggaggaagatttaattttcactacatgccctttggtgccttttgaattcagaacaatttccgttatttattaaaaataaaatacagccgggcgcggtggctcacgcctgtaatcccaacactttggaaggccgaggcgggaggatcacttgaactcaggagtatcacttgagctcaggagtttgagaccaccctgggcaacatagtgagaccctatgtttacaaaaagaaaataaataaagtaaaataccacgtgttactgaatccctggtatttggcgggacactggatactggaaacaattgtggagctctttggaaatttaccttaaaagggagtccgctcaaaggcaggaatgactctacaagggtgaattttcaaatctgccataggggcctcgggcctcagcagcatccagagccctacggacgggcaggttcttacgtctcaactcccatcgcaccagtcctgcagctttctaaaggtatccagcactttctaccttgcattctatcttcatcttcgctaggcctcacagcaccgcatgattccgggggagggtgcttatcagactcgcgtgtggccccacggcacctagggcaccgtcgagcacacggtccgggaagctccaatgaaacggaacaaaccgcgagatcaggggaggtaggaggcccaccctacgccctgcccccgcggagcacaagccccgcctgcgtcccgagctcccgggtccgcaaagctgggccccaaagagctccaacgccggaaccaaggagcacggaatgccgggaacaagctcctcccgtgcgcgatgacgacaaggccgaggcgcgaagggtgggaccgcaggagccgtgcagccgcggaccaatgagcgggcgccggacgacctgtggcccaatggcggcggcgcgcgggcacgctgggggccggccagacgggccgacttttccagaagacccggatagttcctcccggccacgccgcgccggctctgggcactcagcatcgtttccttttcctccgctggagcagctatggcggcggtgaagaccctgaaccccaaggccgaggtggcccgagcgcaggcggcgctggcggtcaacatcagcgcagcgcggggtctgcaggacgtgctaaggaccaacctggggcccaagggcaccatgaagatgtaaggcggggctgaaccggagggccgggcgggcaccgcgcgccgccgcgctcctggcgggcccgggaccgcggactggagcccgccgcctcggggctgcgcagccgtccttctcggcgtcctccggggtcggtcctgtgtccctcctaagccccaccgtcccggccatttcttcccgcatcgatgcagtctccgcggagaacaaagcggctctagagcgcggcgttccccgccctctggggcttccaggcaccctgaggactcggcacaatctctgcggggacggggtgggcactacacctgtcctccatcctgctggacataactagccccacatccctggctccctaaaatctgggaaaagcccgttttctaatgggacttttagttatcgttgaaaaagtcatagtctggttcatttctgtcctttaaacaggctcgtttctggcgctggagacatcaaacttactaaagacggcaatgtgctgcttcacgaaatggtgagaggtgctctgggctaggtcagaaaggtcttgattttccgtagaatgttttctttgtagaaagatttgcagtgtccattttcaaggtaggagaacattcagaagtggcgtgtaatcagtaatagtcctgagtgcctggagtctgacagccctgcctttgaatccctgcttttttgccattcacagtccgggctaaagggctgtaattgtatattaaagttaattattttaaaacttgaaaaattaagagaggttgacacaatcacatgggcaaaatgcatgaggatgatttttcttttcttttctttttttttttttttaattagacgaagtctcgctctgtcgaccagcctggagtccggtggcacaatctcaactcactgcaacctctccctcccgggttcaagcgattcttctgtctcagtctcccaagtagctaggattacaggctcgcgccactacgcccagttgatttttgtatttttagtagagacaggatttcaccgtgttggccaggctggtcttgaacgcctgacttcaggcgatccccccgcatcagcctcccaaagtgctgggattaccaggcccgtgcccagctgggttttctctttttaaaacagcagtttctctgttaggtctcatctctatctccaactggaggggagataaatctgtctctttgcaagtcttagggatggagaatattagattattgaggggagtatgctttttactcatccctaaattcccaaaacttagcagttcaaatccaagaaaaggaaattatttcctgctgatttgagttcagaataatatgtagggttttgctagtggtataccatgccatcaacatccagatgaaatatctttagtaaggacttgctaacctaggaggtgtagtttttgtttttagtgggctcagtggtggcccgtgtttgaaaagtggagccacagttaaacttgacttcagaattgtttgggggctaggtgtggtggcttatgcttgtaatcgcagcactttggcaggccaaggtaggtggatcatttgaggccaggagttcacgaccagccctggccaacatggttaa

SEQ ID NO: 586867 - DNA, 4001 bp, Homo sapiens
acaagcatggtgtttatgtaattttcttttttgtggaatggggtcttcatgttgcccaggctggagtgcgatggcacagtggagtgcaaatgcacaatcactgcaacctccaactcctgggctcaagtgatcctcctacctcagcctctcaattaactagcactactggtgcacaccaccatacctgtctaattttttgtatttttttgtagagatggagtctccctatgttgccaggctggtctagaactcctggcctcaagcaatcctccagccttggcctcccaaagtgttgggattgcaggcgtaagcctccatgccctgccttacgtgcattaattacaatacacagaattacaaaacaaaaagcaatgatattgaaatggcatcaaaatgctttaaaaacaaatttctgctatactagtatagatgcttattttcaatgcatgaaataacaagaccctatcataatttcttttcttttctttttttttttttgagacagtctctcactctgtcctcaggcgtgacctcggctcactgcaatttccgcctcccggattcaagcgattctcctgcctcagcctcccctggagctgggactacagacgcatgccaccaagcccagctaatttttgtatttttagtagagacagggtttcaccatgttggccaggatggtctggatcttttgaccttgtgatccgcccgcctcggcctcccgaagtgctgggattacagccgtgagccaccgcgcccggccgactctatcataatttcaaagcagtaataaatgtaagtgacagcttaagataccaccttgtagttgctgcacaaactgggtttttttgcgtctcactctgtcaccaggctggagtggggtggtacaatctcggctcaatgcaacctctgcctcccgggtttaagccatgctcatgcctcagcctcccaagtagctgggattacaggaacgcgccactactccaggccaatttttatattttcagtagggacggggttttgccatcctgtccaggctggtctcgaactcctgacctcacgtgatcctctcgcctcagactcccaaagtgctgaggttacaggtgtgagccaccatgcctggccctgcacaaactgttatctggaactatcatttacactcaccctcacagtttcaggcactgctaaggctgctccagcaatcaggaaaggaaatgctatacttcacatagagaaaaataggggtgcattttgttcctacacaagctcattaccccaccctggttaaaaaaaaccctgaattaggctgtatagtggctcatgcctgcaattccagcactttgggaggcccaggcaggaggatcgctttgggcttggggccaggagttcgagaccagcctgggcaacatagcaagacccgccacccgcccccccaaccccgccgtctctacaaaaattaaaaataaaattttaaaaattagccaagtgtggtggtgcagcgtctgtagttccagctactcgggaggctgaggtgggaggatcgcttgagtctgagaagttgactgcagtgagctatgatcgtacccctgtactccagcctgggccacagagcgagaaaaaaccctgaattagagacacgctgcggccgtccttcctcggagagacccgcccctcctcagaggcccacccggaccctcaggccaacgccgacccctctccacacggacttctgcagcctcagtttccctcctcagacgcccccggctccaatcccggctcgggcacttccttcccctctggcgtgtcttggcccgggtcccggggctcctgcgaggatcacacaggaactcacttgaagtgtccggcgcagtgcactccgacggggagccctgcccggtccccgcggcgaaccagtctcttcctcgggtccccctctccccaagcgcgcaggcgcaatccgcgtcgccgactcacgcggctggtttcaggtttctggcgaggccggtgttcggctggcggctagctgggactagcggaacggcggagtctcgattggcagtgcctggacaggcgcaagggccggcgcgggctccgggcgctcccggcatccctcgggcggcggcggcggcggcggcgaggcgaagcgaaggaggagtgtgtgcggcggggccggcggcgggtaaaggcgagaaggctgcaggagaccgagggggagccgggccggtggggccgccgccgccgccatgcaggaaatcatcgccagcgtggaccacatcaagtttgacttggagatcgcggtggagcagcagctgggggcgcagccgctgcccttccccggcatggacagtgagcgcggggcccgggcgggagggcaagagcgactcgaacccgggacccgctcctctgtgatcccgggactccctcgcctcggtcctgagacctcccccggcttcctctggatcctgggacccctcccctttggtcgcaggactcctccctctaggtcttgagagtccctcccacctcctccgggtcctgggatcctcccctttagttaccgaactccctcatctgtggtcccgagactcttcccactccatcctgagacctcctcttctggatcccgggacgctccccttggtttcaggactcctgactcccaggcccccatttccaccgtctggggactccttttaccctcactcggactcaggagttcactgcctcggatctttggccctctgcggctgttcaaaggtaatctgtaggagggtagaccttgtctgttcgcttaattcttgaataagggtgggttatcctggattggaactctccctcaacactctcccaactgcaggagagtactaggatatcacacccgctacgttgagcgtctcttcttgatttcatcaaaactaggcggttggaggagatgtgctgagggaaggaccacctttctgtaggagaccccagctagactctcaaactcccttctaggactcactctcctgggagctcatccctagtttttggcccgtccctacttttttctggaccccaactctgagttattcatcacacccagcagctggtgtggacccttggcctgaactcccttcactgctccccttcatatggtggctcctggcttcccacctcctactcggtgggatatcttgtactttaaaagaaaccagtagttttctttgtgtcttctttcctatctggacatacttgaaatctaatgctataaccttaaagtttgggggcttgtggaagtcactgagttcaatccacagatggggaaactgagacccaagcgggggaagggacttgctgacaatcactcagtgcatagcagaggcgggcaagctctccagtgttgtgtgctgtcgcccacaactaccagcggggtctcccaccgctcccagcagcctcactcccctcaggcggtcacaccttctcatgcacatgtgacctctgagtctgtccctttatgtgtttttgttgttgttgtttgtttgcttttgagacaggggcccctctgtcgcccaggctgggtgcagtgacgcaatcatggctcaatgcagcctcgacttcccaggctccagcaatcctcccacctcagtctcccaagtagctgggaccacaggcatgcaccaacacgcctggcaaatttttttgtgtgtatttcttggtagagacactatttcatcatgtttcccagggttggtcttgaactcctgggctcaagtgatccttttacctcggccttcggaagtactgggattataggcatgagccactgcacctggcatatatatatatatatatatttttttttttttttttttcctgcctgtcccacaactttacatggtgatagttctgtacaagatagtttcattggaaattaattaagtcttcaagaagacaagatagtgcttataaggagacatcatcagaccaccctatttgacacaggcacaaacaccatcacc

SEQ ID NO: 586868 - DNA, 4001 bp, Homo sapiens
agagaacttaaggcccaagtttcttaaagcacaaaaggatggcattagagttttttttaaataatataattttttaaaatctcatcttctaatttaaatgaaaaagtacaaatattgccagtctgaaataactcatgtcccaaaggaagaaaaaaatattcattctaatttcctctgaatttaactggactatattttttaaacgacttggcctttaaagtgcataatttacttaaaaggaaacataatgaagatggaaaatacagctttattttctgtgttgggagacttctcttttgtttcattgtcattaactttcaatatttctacatatcaatgcattcccggataattaaggggctaaaatgggccctgctgtttcatcaattccacatttgcctaggatcataaaatgtttcattatgttattagtccagagctctttttggtgatttctaaatctcctcccagacccctctctctagcacacacacacgcacatgcacacgcacacacacacatcacccctttctcaagctgctaaagcaaaatgcctgataactcttaaaatgagagatgctcaaggaccgcagctttaatattttctcctcttagcacccctacccctcctattttctgaatgtgtccccaaacttacaaagcagctcttaacagacacaagggtgagttaacactagagtgtatataaactgcatgtgtgtgttcctgtgtgtgtgtgtgtgtgtgttgtgtcacattatgtcatggagaaaggggtgtgtgtgtatggagaggagagaggaggtttcactttccatctattaagaaaggagttgaatacattcctctcaaaaaatgttttcttaacttattagaaacaacaactcagaaactctaaatatctagtaaattagtaacaaatatatcctaaatttatgtgggtcaaattaaaagtttaagggtctatgtactgggcagttctttaaatttgcattcaaatgagagatgggactccaggtgtgtcttctaaactttggacctaaccatttctggaaccattcctgggctgtcaggtgggaagacgggtgccagtagttccgtgagagacgtttcatgtcagctagcactgggaggaacaagcccccacagcttacctagaaatgccagctaagagtcatgggctgacaggctctggggcaatcagagaatcagagagaggctgggaaaatgagagctgcttgttcaggctgccttactttctttgcacctacccagccagagacacacctactaaagctccaggttttacaaaaagcaaagatgcactctccagcccaccctgtcttgctctccagctggtagctggaacacggtccaaatacatgcttaacatcacaaaaacttctttcctttcacttacctaagcacacccgaactaacctaacctgaaaccccaaaaatatgcctcccttggcctctggagcaagtcagttttgaaagcagtcctatcagcaaagacaccaggcagcctctctcacccctaccaccatcatctgctggcacccagaaaagtggcacagggtgaaggcaaactcgatcgaagagccctccgagaaatcgtacgttcctctcacttactttgagttggaaacgtcctctctggcgctcagtctgcctttgttgcaaggggcgaggttgctaccgctgagtccaggtacccggctcgctgcagctcctgcttgggccgctgctgctctccccgccttctggacggatgactcactggtctctttcttcccctctctccactttggattttcctctgctctggggctctcttggcgggatttttggactggaaggcggggaacctgatcctgcctttgactcaattacgccctgacagggagggaacggaagggaaatggagaatgggagggatgagaggagcgggccaggaggacgaaggctgggcgagggagggagagcgctttgcactcgagagctgattgggaagcttattaaaagcagaatactccaggggcagtctctccctgcggagcaagaaaacggatttgaaccaagaggccatgagatggtaccttgttttgtttttagcagagacgaaacacaacatttcttttccaaactccacccatgatctattcttcagatgagtgcaaagccactttgccaaataggatattttaaatggacaattgatggcattttaggttacatttttggccccccacaatcctttaatgatattcagaatggaaaagcactctcttcaaaccagcctcttcttccacccacgaaagccctctctaaacacagagacagtaaggtgtcagtcacatctcacctgcaaagcacaaaatgtacaaagtactttttctcaattgtcacaaagagtgacagacgtctcaaagttcccaattaagtgctacttacctttagggagagctctttccttttttggtttccttggtgcctttagcaacctatttagtaacatgcctttgacacccaagaatttagaggattcgtcaaagtagctcaaactctgaggtttgtaaaacttggaggctgggctttgcgtctctggaattgtcatttcattcaatacaggaaagacgctaaggcaatgcataggtaaatatttatgataaagatgagataaaagtattgtgtaaaaggattaagatgtattatacaaattcacccaaacattttcgaaatgtaaatttcgagattttctgccacttatcagcttttcctgctccgtggctagctccttttacctacttttacctttactggtcagcttatcatttgatggcgtccttcccaaattggttgtaaaatagaccacatttttcataattctgaggttacatcccttcatttcaatttgacaaatatttattaagcaatttgtttacttagaactatccttaaatccccaaattagaagcattgtcttgtggcaagtagtttttagggacttggggctcttctattgacagctacctgtagaaatgtcccttggagaagttgactggagccagacgtggctctacaaactcaatcaagcagtcaatcaagcttttcaaaaggaaaggcatcagagatgcacttacacacctacaatttatcccccttcccaaactcttcatatacataccacatacaattctcaaatgaaataactaaataaggaagctgtgttcctttctcctacacacaggcttcaggttacctgttttccttttgtgattccacttctgtgtgaagcaagcagtgcttgttttaatcagatttcacctgtataaagtgtggagaaacgcacattagcatttttttttggcatttttcccagtccctttaccaaaaaagatatctcagcattctattaacactccataggggcaaagtttctaaggcattgaacaaagagctatccattttctttctgttcttcagctttatgttaacatatacaaatgtaacatacagctagctaccagttaggtgaacaatgctggcttgattgaggtgttctctatagggctgataaagtaagcatgagattcccatgatttctactcaattacatatgttacaccaaaaatatcaccctttattcagatgggtatatactaaaattgtatacatcagtgattatcaattgggagcagttttgccctccaggaaaagggaataatgtctggaggtagtcttggttgtcgcaacttggtggaaggggttgctctggatctagtgggtagaagccggggatgctgtaaaacatcatacaatgcataggacagcctttgttaccagaaagcggtcccggtccagaccccaagagagggttcttggatctcagttgcaagaaagaattcagggcaagttcatagagtaaagtgaaagcaagttaattagagaggtaaaggaataaagaatagctagctactccataggcaaagcagccc

SEQ ID NO: 586869 - DNA, 4001 bp, Homo sapiens
gggaccacaccatctcttcttccataaccaaagtaagacggtaaaaaactagttttaggccgggcatggtggctcacgcctgtaatcccagcactttgggaggccaaagcagatggatcacttgagatgaggagttcgagagcagcctgcaaatatggcgaaaccccatctctactaaaaatacaaaattagcagggcgtggtagcttgcgcctgtagtcccggctacttcggacaaaaattagccgggcgtggtggcacgtgcctataatctcagctactcaggaggctgaggcaggagcatcgcttgaatctgggaggcagaggttgcagtgagctgagattgcgccgctgcactccagccggggcgacagagcgtagagcgagactccgtctcaaaaaaaaaaccaaccaaccaaccaaccaaacaacaaaacccaaaaaaactagttttaaacatcttaaatattcaaagtattttcttctacttttgctagaaagtagtaaaaaagggactccatccaattgctgtaaatgacaccattcaaaagataccaagacaataaaaactctcaatagtaaaaagggaaaatgccgttttccttaaccctttcagatcaaaaagtaatttttcaaaaatacataggctaaatatcaagagcaaatgtttaaatataagcaatatttttatttttaataaggaataagttagattatttaacttatattttcaatcttcaaaagatactgagaaaactttacttccgtcctctattattggtctggggaggcgggaatcacaaagctcaacgatgctagtataatactgtgtatggtcaagggcctattttataagctgttaaaaatttaacgctaaagctttactagaccagtctctttaaaacgtgaaaaagtattcactactaagtcatatcacctccaccataaaaactactgtactttttaaacaaaaaataaaaactagccaatgtttgctgcccattcattttacaggcattaactgtgtatccttctcataatcagatttcagaattaagtgattattcttcgaggtgtaccttacccaagataaaaattttccccagcttatttcccattcccaacccccgccaagactaaggagcaaccacttcccaaagtcccacttcctttttcattccccagacctacagggtttccaacgccccagtcttgcgcaatatccgtaggagcagcagccgcaaccaccgcctcctaagccgggaaacaaccctagagggaacattgtccagcagaaaaataaaaagggcgggggttgggggggtgggtaacgtaggaagtcgacttctggtctcacgccttcggatctgaccccctcacagtgtgctaaagcaatagtgtatctagagcaatttcatgaacaagacttttaaccttcacctcctctcaagactgcctgcacaagcagagggcggaaagtagggggtggcggaggcgggggggcgctgggaaggttatctcccagttcagggcttcggcccgtagcgtcgcctccgccccaccaggactattgttcccaagttccccacccccaccccggataggaagtgatagtcacatcccctccgccttcggcaatatcccctggggagtccgaagtcggctggcttccttcaggataattcccccacccacacttatcccctgaacctatagtcacacggaccccaagaccacctcaaacctgggcctcaggagaggagaagcgggacgcgggtaaatggaaattaggtaaacccatgagattccttatgggcaatcctttcccaagcgttggagatcatgactgcgaccccagaaacggcctaagtcctaccctgcccgctttgagaccagctagagcaaagggatcccaggagttagtgccaacctcaatacccccgttcctctgtcagccacgatctgcactcctcccggtcacagccagataccttgcctcgaccctcctgggaggagcgaactgcgcggggaggtgtggaaacgcgagcccccccccccggcctgcacctcacttgcctacggctcccggcccggtaaacaataggtggtcgcgagccacggtgcaggctgcgggctcggccgcgcggccgctcccttcgcgtcccgggaacccgcgcgggggtcgcgaacatgggagaagaaaggaggccacggggggaggcgctctcgcctcccgctggcctccgagaccacccggctcacccggctggtgcgcgccccctccgcccctctcctcacagaggtacacaaagcactggcggcccggccgggagaggcggcgatgggctccggcgccggcaagaaaacgcgacagcgaggggagagactcaccatgaagtcccgggcgaagttgtcctccccattgtggtcaggactcttcatggcctggaccctctggatgaatttcctcaggatctccacttgctccatcctcccgcgtccccccggctgcggtcgctggcccccccgccgcccgcccgcccggcacagagcccgctccgtcttccccagctcgttcccccagcacgtccctccctcccgaccccgccaagccccgcggctccctcctcctccccaccgccctaggcggcggctgcggcggcaccggctgggctcccgacaccacaacttccaggagcagccgccgctctcccacagtaccaggcgagccgctgcgctagcgccaaccccaacccccagcttgctccatcctccttccccgccctcctcctccgtcggagacgccgccgccgccgccgccgccgccgccgcctcaggaacacagctagctctccgctcgccctgcccccccttcccggttcctcctcccccccaccccccgccagcagccgcagccgcagccgcagccgcctctccccacgggcgcgtccccgccgccacccagatgcgcggcctcgcgctgcggctccgccccaagcgctgcgcccgcagatgcatccccgcccgcctcccggccacgcccccaagcccgccccgccggccccagccccgcttggagtggctggaaggcacttcagcgggcggcctggagacctgactccatttccggggcgtggccccgcccggggtgctcagaggtcggagtatcgctgggaggagagttggttcatttggaggagggaatgcgactctgagcgggccaagccctagtgggtcagagtaggattctgatggaatttgcggtctcaccgcctactagggaggaaaagcagttttcaggagtcccgcaccgccgccagccgtgggctgggactacaagtcacggtctgtggagtccaggagtgggggcgggcgggaggcaggctgggagctgtagtagtgtcaccgccacgttcgcagcaggtagatgctcatcttgctaacggattggtgagagtggacagcaattaggctttggcaccttggagcgtggctccagctaagggaagcgaaacgcttcctgggtgagaggacttttattctttgctcatcctcttaaacctggcgagtgagcgcctgaggttcggagtgccttcttcacagacgacgcgaatgtggggtcttcgtgtttgccgaactgaagggaatttgccttcctgcctttaggttcgcagcagttcataactgaataagagactttcctccatagaatggactttataaatctattaatttttttttttttttttttttagagctaaggtcttgctctatctcccatgccaaagtgcagtgctatgatcacggctcgctgcagccttgaactcctgggctcaaggcatcctcctgcctcactacgtcaccaagcccagctaatacattttaaaaatttattatttatttatttatttatttttggtagagaagggggtctcaccaggttgcccaggctgatctcgaattcctgtgcactagggatcctcagcttccgaaagtgttggg

SEQ ID NO: 586870 - DNA, 4001 bp, Homo sapiens
aaaaagggaaaatgccgttttccttaaccctttcagatcaaaaagtaatttttcaaaaatacataggctaaatatcaagagcaaatgtttaaatataagcaatatttttatttttaataaggaataagttagattatttaacttatattttcaatcttcaaaagatactgagaaaactttacttccgtcctctattattggtctggggaggcgggaatcacaaagctcaacgatgctagtataatactgtgtatggtcaagggcctattttataagctgttaaaaatttaacgctaaagctttactagaccagtctctttaaaacgtgaaaaagtattcactactaagtcatatcacctccaccataaaaactactgtactttttaaacaaaaaataaaaactagccaatgtttgctgcccattcattttacaggcattaactgtgtatccttctcataatcagatttcagaattaagtgattattcttcgaggtgtaccttacccaagataaaaattttccccagcttatttcccattcccaacccccgccaagactaaggagcaaccacttcccaaagtcccacttcctttttcattccccagacctacagggtttccaacgccccagtcttgcgcaatatccgtaggagcagcagccgcaaccaccgcctcctaagccgggaaacaaccctagagggaacattgtccagcagaaaaataaaaagggcgggggttgggggggtgggtaacgtaggaagtcgacttctggtctcacgccttcggatctgaccccctcacagtgtgctaaagcaatagtgtatctagagcaatttcatgaacaagacttttaaccttcacctcctctcaagactgcctgcacaagcagagggcggaaagtagggggtggcggaggcgggggggcgctgggaaggttatctcccagttcagggcttcggcccgtagcgtcgcctccgccccaccaggactattgttcccaagttccccacccccaccccggataggaagtgatagtcacatcccctccgccttcggcaatatcccctggggagtccgaagtcggctggcttccttcaggataattcccccacccacacttatcccctgaacctatagtcacacggaccccaagaccacctcaaacctgggcctcaggagaggagaagcgggacgcgggtaaatggaaattaggtaaacccatgagattccttatgggcaatcctttcccaagcgttggagatcatgactgcgaccccagaaacggcctaagtcctaccctgcccgctttgagaccagctagagcaaagggatcccaggagttagtgccaacctcaatacccccgttcctctgtcagccacgatctgcactcctcccggtcacagccagataccttgcctcgaccctcctgggaggagcgaactgcgcggggaggtgtggaaacgcgagcccccccccccggcctgcacctcacttgcctacggctcccggcccggtaaacaataggtggtcgcgagccacggtgcaggctgcgggctcggccgcgcggccgctcccttcgcgtcccgggaacccgcgcgggggtcgcgaacatgggagaagaaaggaggccacggggggaggcgctctcgcctcccgctggcctccgagaccacccggctcacccggctggtgcgcgccccctccgcccctctcctcacagaggtacacaaagcactggcggcccggccgggagaggcggcgatgggctccggcgccggcaagaaaacgcgacagcgaggggagagactcaccatgaagtcccgggcgaagttgtcctccccattgtggtcaggactcttcatggcctggaccctctggatgaatttcctcaggatctccacttgctccatcctcccgcgtccccccggctgcggtcgctggcccccccgccgcccgcccgcccggcacagagcccgctccgtcttccccagctcgttcccccagcacgtccctccctcccgaccccgccaagccccgcggctccctcctcctccccaccgccctaggcggcggctgcggcggcaccggctgggctcccgacaccacaacttccaggagcagccgccgctctcccacagtaccaggcgagccgctgcgctagcgccaaccccaacccccagcttgctccatcctccttccccgccctcctcctccgtcggagacgccgccgccgccgccgccgccgccgccgcctcaggaacacagctagctctccgctcgccctgcccccccttcccggttcctcctcccccccaccccccgccagcagccgcagccgcagccgcagccgcctctccccacgggcgcgtccccgccgccacccagatgcgcggcctcgcgctgcggctccgccccaagcgctgcgcccgcagatgcatccccgcccgcctcccggccacgcccccaagcccgccccgccggccccagccccgcttggagtggctggaaggcacttcagcgggcggcctggagacctgactccatttccggggcgtggccccgcccggggtgctcagaggtcggagtatcgctgggaggagagttggttcatttggaggagggaatgcgactctgagcgggccaagccctagtgggtcagagtaggattctgatggaatttgcggtctcaccgcctactagggaggaaaagcagttttcaggagtcccgcaccgccgccagccgtgggctgggactacaagtcacggtctgtggagtccaggagtgggggcgggcgggaggcaggctgggagctgtagtagtgtcaccgccacgttcgcagcaggtagatgctcatcttgctaacggattggtgagagtggacagcaattaggctttggcaccttggagcgtggctccagctaagggaagcgaaacgcttcctgggtgagaggacttttattctttgctcatcctcttaaacctggcgagtgagcgcctgaggttcggagtgccttcttcacagacgacgcgaatgtggggtcttcgtgtttgccgaactgaagggaatttgccttcctgcctttaggttcgcagcagttcataactgaataagagactttcctccatagaatggactttataaatctattaatttttttttttttttttttttagagctaaggtcttgctctatctcccatgccaaagtgcagtgctatgatcacggctcgctgcagccttgaactcctgggctcaaggcatcctcctgcctcactacgtcaccaagcccagctaatacattttaaaaatttattatttatttatttatttatttttggtagagaagggggtctcaccaggttgcccaggctgatctcgaattcctgtgcactagggatcctcagcttccgaaagtgttgggattttaggcgtgagccaccgcgcctagcctataaatctttattcatctttgtaaacttctatcagagaatatattctggtctaactcatcattttacaaataaagcgacttcctgacatcccccagcgtattcttagcagagccgtaactagaagttattttactttcacaacagtggcctctcacaatgtgacagaactgaaggatttgatccatgaactgactttcgtcatttatacccacaaacctttttttacagagcagattggtcagcgaatttggttataataggaaatatcagtggtagaatactttctcagatgaaagttaggagcactatggaatttagtgaaaaactcattgaagaaaataggtgtaggccgggcgcggtggctcacgcctgtaatcccagcactttgggaggccgagatgggaggatcacctgaacccgggaggcggaggttgcagtgagctgtgatcacaccattgcaccccaacctgggcgacgggagtgaggccctgtctcaaaaaaaaaaaaaagaaaagaaaataggtgtaacaggatatagtttatttact

SEQ ID NO: 586871 - DNA, 4001 bp, Homo sapiens
cttccctgggacactccacgcccatgtgtgcttcatgtgtaggtgaagggcggcacctggcctcagagcaaacaactctcccataaggtgactggccaggtcaagccagctggaggaaggaatacaaccccagcaagaggccactggtgcacagctgggccttctttcctgatagggggcaaggcaccaggaggaggcagagtgagcaaggcccccaagcctcccatgcaggactcccccgtgctccagcatggaagggtgagggcttcacctgggccctgggggcacagtgactgggctacatcccagaggtgcgggaccagcacagacactccctcccaggactccaaggcaggtgagcaaggacctcctttcccagcgcctgtgttccttctaacagagacaagcaggttagggagtgtgaggaaacctcaaggcaagggaggaattcaggggactctggcttgagggaggggagcgtcaactcaggagtccagggagactgtgtcaagactcctggttctctgcagtttttgtttgtttgggattttgacgataaagcactactggagaccagaagggcctagaggccgagaggaaggtgccggagcccagctgcactgaggtgggtgcaggcggcgctgggcaacggcgaaggacccccctccatccccgcctgcgtttgcttctgcaccccgtggacaccgattatcctaacctgtcatgtgtaattctggccccgaagccgcctggaaacattggctttatggtaaatcttcttaataaacaagattagcaggaaaggaggtgccggggactggaggttttatgggtttaaaacaggggcgtccgcctgggaaagcagcggcttccactccctcgctgccgtgaagctgccgccctccctttcctcccgcggctgccacggaggaaaaatgtcctctgatttcggcggcgctgcccgcgggggggtgcgggggacgcaggtagaagcgggtgcagcgggacatccgaggcccggcccctcgcggcacacgcggcggaacacgagcggggggcgcacccacgccggaccagggccgcgcgctccagggccaggggagtgccgagtggcggggctcggggcgtgaggcccaggagccggggtagaggcaggaggcggcgccggggaggaaactgaggcaggggcgcgagacctgctccgagcccccagtgaggacagagaggcgcgcgacccgtggccgggggcttgagacccagagcctgggggtgtcgcgctggaaccccgagacccccggagcccccgacccgctcgccaaggcgcgctccccactcactcactgaggcacccctccccacccgccccgtcactcaccgagacgcccctcccctaaaccccccactcattcattgaggcgccccttcccccacgccccgcattcattgaggcgcccctccccccacgcccccctctcattcattgaggcgtccctcccccagaacctctcagaggcgcccctcccccaacgcccccactcatttattgaggcgccttccctgcatgccccctcactcagaggcgcccctccccgcaaccccctcactgaggcgccgcccctcccccccgaacccctcacagaggcgcctctccccccgacccctcagggtggcgcctctccccacccagaccccctcacggaggcgcccctctcacaacgcccccaactaattcattgaggcgcccctcccccggcgccccccactcacccagacgccccgggagctgccggccgcgggggacggacgaaggggcggcaggcaggacgcgtggcggcagcagcagcagtagcagcagcagcagcgggagcggcggccccatccccgcggcctggccggcggcgctcagtccatggccgcgcgggaggcggcgggaggcggccgagtccgggcccagggaggcgcgcgccgccggctcctcccgccgcgcctctcgcgctcttgcggcgacgccgggccgagcttcagcaccggacagcgcccggccccgccccggccccgcccccggcggcagggccccgcccccggacgcgcgtccgccctcaggccacgcccccggccagccccgctcgccccggccacgccccccgcccgcccggctcccttccctccccactcgcaggcgccgcggcccggagccccacgcccggccctggactccccggccccggctcgcgcccctccccgctcggaacgccccgtccgccccccgccccgcgcgtcccctcccacctgcattcctgccccccgcctggccctccgatcccctccccgcctgccgccgctccccgcccggcccggtgctgggggtcgcactgtccctggggacggcgggggcctaagccgcgcccttggcccggacgggaaggcccgaacctactctgctggggacctgggcaggcggcctctacccgcggggccccgcgcgcgtcgaattaacgccttccaaccgtttctttaatttaaacgtaacgggccacttgcgcatcggggcgcgcggaggtggacccagtcgacctcccctgcagcgcgggcggcgcccaggctcggtcccaggaaagctcccggagggcccagggcgtgggctggggccaggcgggctctggggcagagcagggtgaggcctgttgcgggcctggtctcctcgccgccgtcccgcccggggtcctgggggatgtcgcgtgtcctcctcaggagacagtgccacttccaagaggtcctaagacaaagggggccagtaggggcctccgggtgggagggagcctgcgcttctccacagcccacctccctcacacgctaccccaggaccaccccctgccgggtccctgtcctggcgaccccacctgggcccccaacctccgcacctgcttctgccttggacagagaggcctgagccctcccgcgtgccttcctgccacgttctcattccaaggacatctgctcggcgccctgtgggttttctcctccatgcctggccaccagggccatgccttccgcgccccttaccagcctgggcaaggctggcacctgtggacagtgaatgggggctgggatggcagcggggaggttccatcgtagcccaaacatctgcaattcagagttggatattggggctgactgtcttaagtgccctcctcacggacacctctgtcctcagacctccgtcatctccttgctggggcccctcaccctcccatccttcaagaaagctcctctttgtttgtcgcagccacctgtgcccggagggggtggtgggtggcagcttatccttcacacccagacgcccaggggaccacctccccgtagaaagcaccttcttgcagaatgcggcagcatagaggtcacggtagctcccgggcagcccttccctcctacaaagtcaggcccgtgtgtaaacctgcggatcctacaaaaacagccgctggttgggagaaggatggcagcaaggactggatagatggggctgcttctgactcattatttgtagtagactagactctaatttttaacacagcagcgcttgcctcaaaacaaatgcaacccccccccccagcaatatccatccaggaaaaaggctgtaagcccacagcgaggcgcaccccaaatgtgggcttggtggtgatactgtttggacatttgtcctgccctaatctcctgttgaattgtaatccccagtgttggagttggaggtggggtctggtgggaggcaatggcagcatggcggaggatctctcctgaacggcttgagccaccccttggtgatgagtgagctccgcgactccctgttctgatcatttaaagccatgtgatacctctccctaactctctgcctctccctaactctctccctctccctaactccctcaactctctccctctccctctctccctttccctaactctcctcctctccctctctccctaactctctccctttccctaac

SEQ ID NO: 586872 - DNA, 4001 bp, Homo sapiens
ccactggaccattttaaaaagatgaattgtataatgtgtgaattttatctttttttttttttcaaagagatccgcaacatgctctgggcatgtggttttgaagacatacaaagcaatactctctggtttatttccttgctactgtgatatttacttacataatttaattactaagaggacctgccttctttgttaaaatagatctacaatagaaatgtgaattcaacagatgtttgatgaccacgtactttttaaagctgtcttcccctctccagaactgactataaggttttagaatcaatggagaccagagattcccttgcatgtcttatgtgtcaactatgcatcacaccaccccaagcactttcataaagcctttgaaatttaaattatgtccgtgtgtgggggtctatgggcaattatcaccgtatttgcaatgtaattttcatttattagaacttaaaaatagtttctgtttgtaaaggttactgtgccaagagcagcaccatctattggatgaaaatgtacgcttaatatctactctactatgaaccatctaaaattgaaaaattgggagcctctgaaaagaattaaatatgtgtactcacaaagcgaagtacaacactttgtaactttcaggttaatgcgtaaacccattatattctatcgcgatggaaaatcatgaaggaaaaaaagcatttctttaataaaacgcaaaagtccaatcttgcacttctcgaaaatgactggaaaacttgagtctgcatcgcaggtaaagggaatgcttaaactggctattgctgaatgcaatttcagttttaaatgtaacctggagggtgcagatgaaaaatgaaatctgtgaataagtatatcaacctgcagctctcctctgactttggcagcactgaccaaacctagagatttagatggaacttttttttttgtaagtaattgcgcagacttgaatatgactaaattgaaagtaataaaaaaaaccctgaaaagtcaggttggtgcttgtgcctgttactacctttcaggtgtgtgtgtgtgtgtgtgtgtgtgtctgcaattcacaccagacacgtgtactttccatttaagcccatcatacctatagcataaaaatgaacagcaaaaaagacagtacagtacacagccccgcaccacagctgtatttctggtcatttatcttcctatgtatatctaaaaggcgatttctacactttgcaaaagaggagagaagaacggtggcggcagggatccgagtagccctccgtctccagtagctccgtctcctggggcccggggcacgaatgcccgcgggccgatggaaggggcgagggcgcggggcggggagggggcgcgcaaatcccacgcagctgcctgcaccgcgcggccgcccgctccgtgggagcccagttggctgtccctttttcctcctggctagatggcggcggcggcggcaagtcgcggacacgctgaaatgctcccaccctcatcccaccgatcccggagctgaaaccccaccgagctcttctcactcacccaggcggcaaacacagaggagctgaatgcaagcgaggaaacgctttaggattcgcatttccagacggtctgcggcccctcgccgtgcggctcctctgcttctcagagtggagagggagggggagcgaaggaaatgttttttttgtttgtttgttttaatcctccagtgtatagatcgaagtgagatcgtgcgtgcgtatgtgtgtttgtgtgtgtgtgtgtgtgtgtgagagagagagagacagagacagagacagagagagacagtcagagacagcgagagaggaataatctggagaaagccgcacggtggtggggcccggggccgctagccgaggcgcatgtcctccggcgtgcgggactttgcctctttcgccggctgcggcggccgcggtctgagcgctccgagagcagcgaagcctcagtgccgggtgcgcgctccagcccggctgtgcgcgccgcggctcctggagggggcgggggcgcaggaccgctccgctgggagcgtgcctcggacccggggtcgcgcggggggcggaggggcgcggctgccgctctgggtccggatcccagggtagcaattcacacaccgacaatcctccctctgtccgctgccagtggtttcgctgccctggagttagagggatccgctggggtttccagtgttcgcagaacattggaactccttcatcacttcggaagggaagggaagggaaggccggacacccattgtcccgcacagccagaggttgacctttgagtttcacctctaagagtttttttcattttattgttttctgcagatgcttaagtgggtccaatcagaatgcggtgggggcgcctgggtacattgtttccctcccttttttctttccattttcctaataaagcagtagaccccattgcctttgggagagttgactccaaaaaatctccagccctgattgtgaccagtctgaccctgccctttccctagaccccaacgaaactgccgtgctgggcacagctgtctggggggactttcaacacggcggtggtcctgccagaccgaaccacacaagtgcctcctcccacagggtcgaacgggaagattttttattgcttgattgaagggtatgcaaaaaatgtataatgcataccttctgctgccttagagctggaaatgtcaccctcatgtgctcttttctttggtggtgttcagaattagactgtgagcgccttgatggcagggagtttacctttattactataaccccagatcctagcaaaatggccttaaaaaaaatcaataggtgttccctgaatatttgttgaattaatttgaagccaaaaggaaataatgagaaggtaattggtggtagtctctacactgaaaatttatgagattttcatttatatgatatcctttaactattagtacatgtttttcgtatatgagacccactttagagccttttaggagtcccatctaaggcacagaaagccaagttgtggaattatcccatgtattcttagtaacaatttgaagtaggtatctgtacagtgtatactcttgtgtcctgttcttgtctcaaaaatagtattctagctttaaaaattttaaagaaaacttcctgcacataaaattgggttctgaatgtatttcaagtgttactacgagttcttgctaatatcccagcctgtgaacatttggctaaatgtgcaagctaatggcagtttgctgttgcttcaggaatagattatagtcatgtaataacagattttgaaaccatttagtgtttattcagaaacacatatcaatattaagaagttgatccttgatcttattctttccatgaacagaaatagaaatgctacaacttttacaagaattatgatggggattgatggctgctcatgtgagtttccatataggaagaaaatttgggggccatttttttttgctagcattacaagaagtatgcaggtgtataaactgactgtgcactgagagttcagagaaagttttatttaatattgactggagtaggcaggaaagctttcctagagatgtgtagttaaacaagaaggactagcagggaaaaaaaccatgtcaaaggcagtgaggacaggaaggaaagaagcagatgtcatatgccattaaaaaaacagtgtgaattacatttgagcagattgagtggggtcagactgtgacaaacattgatttcccagtggagcagcttatatgtgaaatacaacacaggagggaccacaaaagaaactcctaagaacttctgctatttaggggaagcttggtttgcttaggggaattatggtgttccagtaggttccaattatcaaggataccccagtagcctgcaagaataatccaacaaccaccataaccctgagttttctcttactggacaaaaaaatcacatcacttgtcaatcttttgaattagatcaccaaac

SEQ ID NO: 586873 - DNA, 4001 bp, Homo sapiens
accagtggctgtaacagccgaattagccataattcactggctcacacagtggagatctggctctcattcataccaaagcatttcttggtaatgacctccatatttagagatcaggggaacaactttagtgagcagcaaccaatccactcaaacagtctgccttgtgctttatgcctgactttttcttgtgcctacctcagcaacccccaatgtaaaactgcttttatctttgaaaattttttgtcaactttgaaactattttagtaacggattctactccaagcattgctatctgaatccactggcatcctggaaaacaattctgcgaagaaaagacatttgccttggtccaggttccatgcaaaaccatttttttaaaaaaatggatccaatttggttctgtattcttagatggcttcttgaaatcttatctttaacctgttcatgattatcccaagttgcatttcttttcgtgaacctgaaccctcagaactgggtaattgtaaaggcctctcttctcaaggattccatgaagacctagatccaaaatgctgatttcaatggaggtgaagggatagacaccgcaacagtgaggcctagagagatcttttatgccagattacccaggtgcaacctaaatgcaactgttatcaatggtctgggtaacttggacatgtttcttgccctggatgtgcaaggatctattccctccagggattatcctgatgggtttacgaacctcagttgagaaacaacagaagctgagacaattttacgcaggtgaggagatgctgttttcctctttgcaggttgctgtcagttccttggaacttgactgcttttctcaagttgtccgtcactgttctcttacgattatttctcttaactgtgttacgttttgttttttccctctgcggcctcccttgctccctctccactagctcactggggatgagcaggaaagggaattctctagccaaggggatggtggttgggtggaggcctgtaggggaagctgcccgtttcaatcctcatccacctcctcaccctctgactcttcgccgccgccgctgcccccaccacgtcgctcataaagcttatccctctgtcgttcctggatttctttcatctcatccgcataccggcaaaaggcgcctccgaacttgccccaggctttgaagggtacggtgatggcattgcggtaggacggcttcacctcgctcactcgcagaaacaccccgtatttgttgcagcccacatcgaagaagaagcgcttggagtccacggtgatggaggtgccctccgggagctctccatacaggccgccccctgggcccccggcgccgcctcccgggccgcctgccagctcgtcgtcctcgcctccgtagtcgtctatgagcttcgccagcgcgtcgcggaactcgatgaggccctgcgcaggcagcgcgatggtctggccgctctgcaagccgcccggcccggggcccgcgccgaagccgccaccgccgcggttgaccgtttggcggatgcgcaggaagcggccgcgctggttctccttgaggtccaggtagtacttgcggttctcacgcaccaagaattcgctcttgagcgcgcgccgcggcccgccgccctcctcggcgccagccgccagctgctcggggctgctagggcccagctgcgcgtagtgttctatgaagtcgcccagcgagtcgcggaactcggcggccaccgccatggacagcgtgaggcggctcttggaaccgcccgcgcccacctcggcgatcttgaggaagcggcccttggcgttctgcttcacatctaagtagaagcgcttgttctggatgtccagccgcttcgaggccagctcctgcgtctcttgctcgccgccgccgcgggacgcgggctggaacccgcacggcccaccgccgccgccgcgctcgctgccgctgtcgccgtccgccatcttctaggccgccgcctcgccgccaccgcccgccgcgctcgcgcccccgccctccggctcgcgctccggggccccccagcctcgcccgcccggctcgctcacgcgctcccgccgctcatcgccggccgccgccgcccccccatcgcctccgcgccccgcccccgcgacttccgtgcagccctagccacttccggcgcgcgatttcccgtgaagtcactccgtcccgccctccgcggcctcgcggccggaagcgccgcggcggcgtggcgcagaggggtgacgtcaggggccgcgccgggcgggcggcaagctgagagtaggctagtgttactgctcggtttctagccctggggacttgccagccttagcgtgactcagccgcccgctgcgtctgtctacgcgcctcttcccgtgacacttttactttagactccggtgtcgtccacttccctccttctcgcttccggggcgttagctgagcatactcaggccccagcctgctcgcgctggttgtgtgctgggaacagagttccagtctatacactggcgaccggggggagggagatcctttggagcactcggaagcgggttctgaccagcctgtggggttccctagaggaggcatgagctgactctgaagggcaaactgcagttggcctggcaactctggagaagagccacccagcataggagacggcagtgcagaggcacccagggcctgatgctgggagctcagagcagctgggggtgtgtatgcctgaagaatggtcgtagatgacactggagggtggattagatcaaggaaagccatttgcagtgcgggagagttagtgcctaccccagagtctggagccaccgtatgtgatcaggttcacattttggaaagatcactgtgggaacaatatagaaagaagatgatttaggatgaggttagatttgggatccagagatcagttaactgtccccacagttagccatattaaagtggttaaggaaattgactgccaatctttagtttctttatcaataaaatgaataattcctatgaggtctttttgttgtaagcattgaggtgtaacaagaggcagaattggaatagtgttaaaaagtgtaggctctgcaactgcactgggtttgaatctgtgaccttgaccagttacttgattttccaaagccaaaatgtcctcatccttaaatttttttttttttttttttgagtcttgctctgtcacccaggctggagtgcagtggcgtgattttagctcattacaccctccacctcccgggttcaagcaattctcctacctcagcctcctgagtagctgggattacaggcaaccgccaccacacccggctaatttttgtatttttagtagagatggggttccacaatgttggccaggctggtcttgaactcctgacctcaggtgatctgcccgcctcagcctcccaaagtgctgggattacagatgtgagccaccacacccagcctaaatgtagttattcatagatagtgaatccaacaatggacttgtaaagaacacaaataatagataacccaatataaaaggtgaaagattttaacagacacttcgtcaaaaaagccagtaagcacatgaaacagtgctcaacattattcatcattagggaaatataaattaaagtcagaatgaaataccaactagaatggctaaaattaaaaaatgtaacatcaagtgttgagaaggatgtgaagaaactggaactcatacattgctagtaaggatataaaatggtataaatgctttgggaaacagtttggcagtttcttatatacctttcataaaataagacccaacatttccactttttttttttttttgagcagtcttgctctgttgcccaggttggggtgcagtggaacaatcttggctcactgcaacctctgcctcctgggttcaagcaattctcctgcttcagcctcctaagtagctgggactatagccatacccagctcattttttgtattttagtagagatagggtttcaccgtgttgct

SEQ ID NO: 586874 - DNA, 4001 bp, Homo sapiens
catgaggtcaggaaatcgagaccatcctggctaacacagtgaaaccccgcctctactaaaaatataaaaaattagccgggcgtggtggcgggcgcctgtagtcccagctactcgggaggctgaggcaggagaatggcgtgaacccgggaggcggagcctgcagtgagccgagatcgcgccactgcaatacatctccagccctcaagctgggtgaatgcttaacgagtggatggaggtgctgcctctgcaatacatgtgggcgacagagcgagactgtctcaaaataaataaataaataaataaataaataaataaataaataaaaatacaaaaattagctgggcatggtggcgtgcacatgtaatcccagctactccggaggctgaggcaggagaatcgcttgaacccaggaggctgaggttgcagtgagccaagatcgtgccattgcactccagcctgggtgatggagtgagactccgtctaaaaaaaataaatcaaaaaacaaagatatgttcaaggccgagtgtggttgctcaagcctgtaattccagcactttgggaggtcaaagcaggaggattgcttaaggtcaggagtttgaggccaggctgggcaacacagcgagaccctgtgtggtggcacatgcctatagtcccagctacttgggaggctgaggtgagaggattgcttgagcccaggagttcaaggctgcagtgagcgatgatcacgcaactgcactccagcctgggcaacaagagcaaaattctgtctcaaaaaaattaaaaaaataaaaataaaaaaaccaaaaacatgttcacaaggagttgttaagtacgtactgttggctactttcctaatgtttgaacctaacaattgcctaaccaaccccttttcaatagtgttgtacagtctgattttcgacagatccctcaatagtcgaggctcccccaggccaatggggcatagtcatttcatagatgattagaggcttggggatgggggggagggaaccttagtaaccctttatttttggaatggaaaaaaaaagtagtctgacgggaccaaatattttaaaaactaaactctttgccaaccctactcggcaggcaacgaaggtgtgcttctaaacacctctgcgcagggctgacgaggaggactcgaatttcagcttgcacagcagcacctccatccactcgttaagcattcacccagcttgagggctggagaaagcactctgagtctgcagcccgtccactcctactctgggaaatgcatacaaagcaagcagtccccagagcccgcgtggcgcctagtaggctcccagtgagcggcgacgcaggacacaggggtggaacacgtgggctggacccacagaaggcaggcgcggcgaagcagtggcaccgtgaagggcttcagggccagtgttcctctgacggagggacaagagtttagggagcgtccggggcaaagaaagggaggagtgggaagggggcccccgggggacagcgccgcgcggggaggaggggagcgctcgggcgcggcgcctccggacgactggccgggcagagcggagcggggagcggggagcggagagcggcgcctgcaccgccgaagcgcaggacccactgggttccaaccgtgctcccgctggcacgatccataatggaggcgccgcgggctctgaccactgcggggccgccttcccagtccgccttcccagtccgcactgcctcttggggcggggccctggggctggggctggggccagggccaggccgaggagccccggcggccgcggggaggccgcgcacttacccggagcctgggagcgcgggcgcggcgtgagctgggcggcgaggtggccagcgctctggttgggacgcaagagagcggcgaaggccacttggatgagccagcggctagggcggccaggcaaaagcagcgctttccgcgcggaggaccagatgcgctccagccgactcaccggcggccgggctcgcacacgtgcggcgcagcgacgcgccgcggcccgactggacccgccccgggggcggagtccgctccctgccgccggccccgcccccggcccacccactcggagcggcctgcaagccagggagcgccccaacgcggactcccagcctacgcgcgttcaccctggaccttcctcgcgaccgcgcctgagtcgcaccagcggcagagagcgatttcaccaagcatctaagagttctttagatctttaggaagtctaaggcagcgattgcctcctttggtgttatattctaagtgtttccttcacatagttgtggccctttcacgttgcaccgaccacgcagttgacaataatggaaagagaatcactttagggactaaatattgttctacatttgatcctgggaatgtagtggatctaaaagcaccatcttcctacttcttaccgctctggcttgatggcttgccataggatctgcttcaagaaaccggatcataggttttttttgttttggtttggtttggttttgacagagtctcgctctgtcgcacaggctggagtgcggtggcgtgaacacagttcactgcagcctcgacctcccaggctcaagcaatcctcccacttcagtatcccaagtagctgggactacaggtgcatcccaccgcacccaggctaatttttttgggggtggggggtagagacaagatttcactatgttgcccaggctctaatagtttttttgctttttgtttgtttgtttgttttttgagacggagtcttgctctgtcgcccaggctggagtgcaatggcgcgatcgctgctcaccgcaacctccgccacccgggttcaagcgattctcctgcctcagcctcccgagtagctgggattactggcgcacgccaccatgcccggcttattttttgtatttttagtagagtacggggtttcactatgttggccaggctggtctcgaactcttgacttcgtgatccgcccgcctccgcctctgtgttgagattacaggcgtgagccaccgctcccagcctctaatagtttttccgttttgttttattttgtttgagagagagtctcactctgttgcagggttcaagcgattctcctgcatcagcctcccgagtagctgggcctacgagtgcttgacatcatgccagactaatttttttgacggggtttttgcctgttggccttgaactcctgacctcaagtgatttgcctgcctaggcctcccaaagtactgggattataggcatgagccaccatgccctgcccaatttgtttttttgttttgttttttacacaatgaaatatactattaccggccgggcgcagtggctcacgcctgtaatcccagcactttgggaggccgaggtgggcggatcatgaggtcaggagtttgagaccagcctggccaacatggtgaaaccccgtctctactaaaaatacaaaaaattacccagacgtggtggcacgcgcctgtaatcccagctacttgggaggctgaggcaggagaatcgcttgaactcaggaggcggaggttgcagtgagctgagatcgcaccattgcactctagcttgggcaacaagatggaaactctgtctcaaaaaaaaaaaaagaaatatattattaccatacaattcagcaattacactccttgatatttacctaaaggagttgaaaactatgttcacacaaaaacctgcacaagtatgtttatagctgcattattcataattgccaaaacttaaggacgggccgggtatggtagctcacgcctgtaattccagcactttgggagcccgaggtgggcagatcacgatgtcaggagttcaagaccagcctggccaagatggtgaaacccccatctctactaaaaatacaaaaattagccaggcgtgatggtgggcgcctgtaatcccagctactcaggaggcggaggcagaaaattgcttgaacccaggaggcagaggttgtggtgagccaagatcatgc

SEQ ID NO: 586875 - DNA, 4001 bp, Homo sapiens
tcgaactcctaagggtccttccatggccctgggcccccgagggtcagggaaaagagtgaggccgggaccagtgtgaggaggcctctcccctgcctgagcgtagagtccattctcaacagagacaaagctgccacgtgcagggatgggtgtggaggcccaggcggcagggccctggggccggtgtgcagcgtgggtggggagtgacgcccaccaggacggccccccatgggggtgagctgtgtccaaagtagctgggcggcagctggtgttgatagtggcataagggacgtgaagagcagcctgggaggcctggcttggtgcctgcgcgggggaaggagggtcaagtgagtctgcacagcttgggcccagccctggcccccctgcccctgcccctgtcacctcatccccaaagcaggtcccctcctcacccatgctcgtgctctcggtgcctgggggctggtgcgggacggctggagcctaggggcagggctgggagagagcaaggatggtcagagctctgcagggcatgtggccatcccagtgtcagggggacgtggacagggaccaggtctcaccggtgcttatgtcggcgcagcagatgaaggaggtagacacagccaaagaggaggactcctgagacccccaagatcccggccaggtctgcccgcagaatgggggcaggagtcggcggggcagagagccctgggcacggagacaagaatcagatgggtggccagttcccgagcccctccctgccctcctggacccctcgccccggccccacctgggtctgagctgggcgggaggctcccacaggcctcccaggagccctcagggaaggacgcaaacttgcagcagaaggtggtgttggcgcaggggctgctggccccagagccttccaggatgagagagatgctgctctgggtttcccagcgggcctggcgagcaggggcccattgccggatgccacgttctgggtgcaacacagccagcgtggtccccccagcaccgttggggcccccccagctcacagtcaccagggagatggagccagaccccaggaacccacaacggatggtgaaggacgagagctcggtggcctccatccgaacttgaacccacacctccggggtccctgtggaacagcagcaaggtcggtgggctgttgtcctacatcaccctccctgcagcccctgcccctctctggtgccggcactcacccgcagtgacacacaaggtcagcagcacccagggcaggaccagggtccggtgccccatggccccctccagtccaggttctgggggctgcagggccggcacctgtgcctctgttctcatcgcaggaagtcttcatgttgtcagcagccaaacagccacttccttctctcctctcacaccttccccagaggtggtgagcacaaagtggctgattcccttcttaaagtgacagtgagggcctgctcagtccccaaggctgtgcttccaggtaacaaggcagggcggcacaggtgggtgagaacccagccctggctaggcctggggaggccaggggaggggcagagaagctgtcaggggctagaaggactccccttccctggacagcaaggggtgccgggcttccctaagaaagggctctgtcccgcccctcacccagctaaggaatcggaggagaaagcccctgggagtgggaagccagcagggaggacctgagagccagcccagcatgcatgacccactaccaatctgatgtgggtcccacgcttacacctgcaatgcaggcctcccccacaacccccagcctggctcgcccactacccactcatacctcctgatctaccctgaacgcaccccatactgggctctgccccaggcgctgtctcctcgtcataggtgatggcaactggcttctggctgctcgggcccaaagcacagccaccagtgcctcttccctttcacttccaacgcaccaagattgtgtcagcaaacagcagtcctctgccctagcagtgcagaagccaggagttgaacccatgtctctcaccaggttaagctgcctcgctaagtttggatgtgacctcagaaacagaggctactccagcaatacaagatactttatttttcggcttctacctatgccacccaatcccttcactgggcctaacttagtgaatcaaattaagtatatttccctccaagttgccccaggattctgggctcctttgcacactacaggttttctctaaacgccctgggtttatctatcctttggtgaattttcaactcttcttatttctctgccctgtcctgaccaaaaatcttcagtgcctgtttctctctgccatccaaatcccacacacatctaggggtgaatcggtgaatctgcgctgatgagtgacacgttttgtgaatcctttctaggatctcagtatttcatcctatcccgagggaaggctctaaagagctcaaggaagacctcacgatgtctatgtgtgagaagaaacctttcaccccttcactatcacaccccatcatccaagcacacactcctctttcatcccataaaccccagtcagtgtcacctggagttataaggatgcggtgacttacctagtaacggaagactctcagtaatctgaaaaagaaaaatcccttcactttataactgaggagataacaccaacaagtcacttccagcagagctcatggccacagtgcaagttaaaaaaggtaaagccttattgaaaataatcttaaaacaattattcaatattaacagacaatgcccagcagtgccatgtgggaggcaagccacccagctgccaaggcaagagaccgagggcacaagctgttccagtataataaagaaaatacatagaataagaatagttatactagaaatagattatagctatgattatatatattactaatcattagtttatagcataactctttattccaatattataataatctttgttctacaattataacctaggaaaaaccaggccatacagagataggagctgaagggacatgctgagaagtgaccagaaggcaggagtgtgaaccctctgtcatgcccggacagggccactagagggctccctggtctagtggtaatgccagtgcctgggaaggcacccgttacttagcagaccttggtctagcagtggtgccagtgcctgggaagataactgttacttagcagaccgggaaagggagactccctttccctgggggagttagagaagacgctgctccaccacctcttgtggaaggcctgacatcagtcaggcccgcccacagccatccggaggcctaaccgtctccctgtgatgctgtgcttcagcagtcaccctcctgtttcactttcatgttccgctctgtacacctggctccaccttctagatggcagtagcagaattagtgaaagtattagtctttgatctttctgagaagagcatagaagaagtaatgatgtaagctgtcctctctctctccgcctcggctacctaaaaggtaaagacccctgtctggtggacacgtgactcatgtgaccttatctatcgatagagatgactcgcactccttaccctgccccctttgccttgaataccataaatagcagcgcggtcaggcattcagggccactactggtctccgcgtctaggtggtagtggtcccccgggcccagctgtcttttcttctatctctttgtcttgtgtcttcatttctaccatctctcatctccgcacaggaggagaaaaacccacagacctagtagggctggacatctacagtgccacccctgaaaagcactgctctgcatcacttaccaggctgggcaaaggcctccatgcctgctacctaagctggcctcagctcgtccagcctggcctgggcctggccagtgggaggtgctgctgagaagccagagccctgggctgtcctggacggccagcagggggcttgctggcatgaacccttcacagctgagc

SEQ ID NO: 586876 - DNA, 4001 bp, Homo sapiens
taggaactcttgacctcaggtgatctgcccgccttgacctcccaaagtgttgggattacaggcatgagccaccatgcccggctggaaaataaaggtttttaatgacagtgtttcacaaactaactgattatcagaattatctgggaatatcattgaaaaaatatatttttggagctcatcccagacttgctaaacatattttaccttgttcttttaaaaattatttcttagtattctttttttttttttttttttgagacagagtctcgctctgtcaccgaggctggagtgcagtggtatgatctcaaaactgcactgggccaggttttgtgttttgtgtttttaactttaaaatatgtttagtgcgccaggccgcagtcgctcatgcctgtaatcctagcactttggcaggccgaggcagaaggatcacttgacgccaggaggttgaaagtagtctaggcaatataatgagagccctgcgccccccctccccgcccatctctattaaaataataagaaataggccaggggcagtggctcacacctgtaatccaagcaatttgggaggctgaggcaggcggatcacttgaggtcaggagttcaagatcagcttggccaacatggtgaaaccccatctctactaaaaatacaaaaaattagccgggcgtggtggcatgcacctgtaatcccagctacttgggaggctaaggcaggagaatggcttgaacccagagggcagaggttgcagtgagccgagatcgcaccattgcagtccagcctgggcaacaagagcgaaactccgtttcaaaaaacaaacaaacaaacaaacaaaaacacaaaaccaaaaacctctgtctctcttccctcccctcccctcccctcttgctctgtctcttccccaggtgattctgatgatgagccaggtttggaaaacaccaatcgaccaagtcacctacctgaaacttactcccaccatcagcatccctggcttaaatgtccacctatgcttaaatatctctgatcacaaggaactgactacctcctgaaaaatttccattttgcactgggcagctctcacttctgtgggattgacacctccctccatgaggtttccatctgtctagctccgtgctatccttactctgccaagacacatcacattcctgttccacatgacagcccatcagatatttgaagcagcaagaatattcccccaaggagaatatccccatcctctttaactgttcttcctgagagtgtgttcggactcctcatccaattgctctaaaagtaactgaaacctgatcccacttaatgattacatttgatgtgctgcaaattgcccctgccttgtgacatccttcttcacctctccgttttactttggttttctctaaagtcatagacaaggacactctgtctcatcacacaaggtaaaatgcactcaaatgtccaatctgcatgcaaaaacccagggctttaaggcgatgaagaaggatcccatacctctcttggacctctctgaaatcacatatgggtagatgatccagcagacaacagacacaatcaaaccacttttttcctgtctgacttttcaactaaagacagccattccacttccggtgtcttggtcttatcactgtaacttgagctgagactttacttccatgtctccccccaccctcaggagtcctcagggtttccactaaagccccctttcattgagcctacaagccttgctgggaggcacaggcagcgtccaccccgatgatgtcctcccgccggcatcccgcagccttcgccttcctggttcacctgtcgcttacctgtctcgctctctcacctctgctggtcagcaggtaatgttttcgctttcttctgggtttgcttttcagccccccagtgcccccttcttcctcctgcctcgctgcttggtgggaagtgtagttctggccccaggtgtcgggtttggcgtcctgagaaagtgaaaggaaagtgcaatccctcccacctgccctgagtccggagctgcctcagggtacaaagcgccaggtgagggcggccagcacagggcagggcgcagagccggctttctcaccagccttcgccggcctagcggaaagccctcacaggaaggaacagccagtgaattaaaccagtgctggcccatacgacactgcccctgctcctttcttctactttaccttgtcttgtgggcttttgcgtcctttgctctcaatttgtcctggtgtcccttgttaggaaacaatttcagaatgtatctcatgtagtaacagcgactgttttgcaaaatgtttgggtcagttgtacatgtgcatattgtactgggtgatgtaaaaaaaaaattttttttttttttttggagacaaggtctcactctgtcacccaggctgaagtgcagtggcaccattcatggctcactgcagcctcaacctcccgggctcaagcaatccacctgcctcagcctcctgaatatctgggactacagctggcctgagggttgttagttgagataacaccaactaaaggaggatatagatcttaagtaatttattttattatatatacatattttttagagacagggtcttgctctatggctcaggctggagtgcagaggcataattatggctcactgcagccacaacatcccaggctcaaggaagcctcccacttcagcctcccaagtagctgggactacagtcatacaccaccatgccccactatttattgtttttagagctgggatctccctatgttgcccatggtggtttgacactcctgggtttggccaggcatggtggctcatgcctgtgatcccagcactttgggaggctgaggtgggcagatcacctgaggtcaggagttcgagaccagcctggccaacatggcaaaaccccatctctactaaaaatacaaaaattacccgggtctggtggtgagcctataatcccagctactctggcaggagaatcgcttgagcctgcgaggtggaggttgcagtgagccaaggtcgcgccactgcactccagcctgggtgacagagtgagactccgtctcaaaaaaaaaaagaaaaaaagagaagaaactcctgggctcaagtgatcctcctgccttggcttcccgaagtgctgggattacaaggcatgaaaccaccgtacctggccagattgtaagtaatttaagtctttgttttgtagatctgaatatctctttgtgaggagtcagagaaaggagatgatgcaaagagaaggaagcaaaaacaaaactaaaagaactttgaaggtatatgagaagaaaaagctgaaaagaaaatgtctgcctcactccctcaaaaattctaccatagagcaaaggttgacgtccagaaaacctcaagtttatcagtcccagatgctggcagtagaagcataaagctgaggtgaattttccttactattttttccccagagtctagaacagtaactgcctcccaatgtctatcacagggaccagattttctccactacataggatgtgatatgtaggcagttaaatggcattatagacacaataagcaaaattgaaacagagacaccctgttggataaaatatttacatcggtgtcctgtttccaaactgtgggctgagacctataaatgagtcatgaaatcaacctttgtgggttgcaaccagcattttcacaagaagggattaagaaacaacttcagaatgtatcttgtgtagtaacagtgactactgttttgcaaaatgtttgggtcagttgtacacatgcatattttacagggtgatgtaaaaaaaaaatgttttttttgagacagggtctcactttgtctcccaggctgaagtgcagtggcaccgtcatggctcactgcggcctcaacctcctgggctcaagcaatcttcctgccttagcctcctgtatatctgggactacaggtgtgcaccatcatgcccagctatttatttcatttttttgt

SEQ ID NO: 586877 - DNA, 4001 bp, Homo sapiens
gcctaagctcctgtatctctgtcctgtactttttctctttaataaccaccctccaggctcgggagccgatgcctgtaatttcagcacattgggacacttgaggcgggagaatggcttgagtccaggaattcaagaccagcgtgggcaacgcagcaagacaacatctttacaaaatctttaaaaatcagctgggtgtggcggcacccatttgcagtctcagctactcgggaggttgaggtgggaggttcacttgagcccaggcagttgagacttcagtgactcgtgatcgtgtcactgtactccagcctgggtgacaaagtgagaccctctctctcaataaataaataaataaataaataaataagcacctccttgtagttactggcctcccctcctttggttcccccctctccctcactccaccctgttagtctgaatgttactcattcttcaagacacatgcagaaagtattccccgatcccttccaggctccacacccaacagcatggcctaaatgcccggctccttcctcggtgctccatcttagctcacactccttaccacactgttctgaaagtatcttgactgtcccttctcctcaactggctaacttctagagagcagaaactgactgattggaaaggtcattaaatattcatatcctgaacatttcttaatcttgaggatatgaatcagtaactcttaaaagcaaaatgttatttatcattaaatgttaacaatataatcacatcttcttgcatctctggcaagtttcctggtacaacaattttaaggaacagactaacagcagttaaagccgcgcaatggctcacgtctctaatcccagcactctgggaggccgaggcgggaggatcgcttaaggccaggagtttgacacctgcctgggtaacattgtgagatcccatctcgaaaaaaataataaggaaaaacaaagcagttttagatttagagaggggaaagtagctctccaagccaaaaaccaactcccaaggtgctccggtaaactcgtcctgggaaaatttcctatttaatctcaaaggcaaaacgagcccacggacgcccacgacacatttcccaaccacaaggattggtcactcgcgctgagacaccgccagctgcctatgacctagcctccaaagcggcagagtccttccctctctctccctaaactgccgtgatgggcatcccccggctctcctcccagacggttcggaaatagggacttctgctcctaaccccggccccgcagcctcgccctcagccacggggtggaagtcaggaccataggcttcaaatcccctcccaactccgggacgcttctgtccccccagggcgacgcgggatcaaatcccggcgccctgccgcggccgggggctgtggtctgggtccgagcgtcccatcccggcgcgttccggggaggtcctgggatgggtcccgcgcgaccacagatgttgcttcggagccagcatcctggacggggaagtgggagccggaccgaggggagccgccggacagggaggcggccaggaagtgatccaggtcaggccgtcggggcacggccgggcgctggagatgccggcaacgagcacgttggacggagaggccgcgcactgtgaggattaagggaaccgagggcggcctgaaacggggcaggcggcgctgacggggccagaatatgggaagaaggacagcgggaggcaccgacgcgcaactgtcccggccgcgcggacgtcacggaccaacagccccgccacccccggcccaagatgccccgccgcgcagctcttagccccagtccgtccactccgtacctcgcccgcgtgtccgctggcgtccgagccgcagctcgcccgcgtctgcgccgtggtccaggtcaccgctcgcccacgtcgctcggcaggtctgggttccccagtccgctccagcctcacacacaccccctgcttgccccgcccccccggcaccgccagcgcacgcccgtaacgcacggcgcgcaaacatcacttccggggcctttggctgatgacgggaggaagtgcgagcgggatccaaaggcttacacagagtagggtgccgctctgacgcccaagagcaaatagaagagggtagcctccgcgctaaagctggggcgctggggagccccggagaaaccaacgtttcctagtctgtggctcagtccctacttccggctcccgatgcgcagcagcgggagggcgacgccggcaccgcggcgactcctggagccgaggccacggtggaagcgcgaatgggaggtggagcggagccactgcgccgagggacgcttcagaaactctgtttcagtccttcgcggatcctaggatgtgacaggtgttcgagttaaagggtcttaagccaatcgtttgatccaaaagcagctgaatctttaggaggcccaggcaggaggatcgcttgaggccaggagttcgagaccaccctgggccacagagggagagcccccatctctacaaaagaaattttacaaatcagccgggcatgatggcgggcacctgtggtcccaactactggggaggctgaggtgggaggatcgcttgatagcccaggaagttgagggtgcagagatccctccactgaactccagcccgggtgacagagcagagcgagaccctgtctcaaaaagaaaaaaaaaaaaaaaaagcgtaactgagacccagaagtgaaataattaaccagtgtcacaaagtatgaatggttgagtcacaaattggatactgtttactttctttatgtgattcccatgtaaggaatattaaaaacagtagctacatgctgattgctctgagtcctggatgccatctatggtgaaaggtgcagtcacagaaagaaagaaaagaaaatacaatgctgtggctcttagatagacctgggttggaatcccagctttgctaattgtcgctgtggtgttcttggacaggttgcccaatttttcagtcttctttttttcttttttgagacagtcgcgctctgtcacccagagtggagtgcagtggtgtgatctcggctcactgcaaactccgcctcctaggttcaagcgattctcccacctcagcctctcgagtagccggaattataggcgcccgccaccatgcccagctaattttttcgtatttttagtcgagacggggtttcaccatgttggccaggctggtttggaatcgtgacctcaagtgatccgcccgccttggccttccaaagtgctaggattacaggtgtgagcctccgcacccggctaatttttgtatttttactagagacagggtttcatcatattggccagtctagtctagtactcctgacctcaaatcatccacctgccttggtctcccaaaatgctgggattacaggcgtgagccaccgcgcccggccctaatttctgttcttgctcattattggtaaagtggagattaattgattcgtttctcaaattcttcctaggtgcctaatgtgtgctaggctgagggtacaacagagtataaaacaaaagtatggctgggtgcggtggctcacgcctgtaatcccagcactttgggaggcagaggcgggcggatcacctgaggtcagtagttagagaccagcagaaccaacagagagaaaccctgtctctactaaaaatacaaaattagctgggcgtggtggcacatgcctgtaatcccagctacttgggaggttgaggcaggagaatcacttgaacccaggaaacaggttgcagtgagccgagatcacgacattgcactccagcttgggcaacaagagcgaaactctgtctcaaaaaaaaaaaatgagaaaacaaacacaaagtacctgtgctgaggaggtggaggagccaataaacaataaatttaaagtagtacattacatggtgataattgctattaccaaaagacaataatatttactttaaagatcttaactgacttgtgatcatagaatcaggcaacac

SEQ ID NO: 586878 - DNA, 4001 bp, Homo sapiens
tcccagcactttgggaggtcgaggcgggcggatcacgaggtcagaagatcgagaccatcctggctaacacggtgaaaccccgtctctactaaaaatacaaaaagttagccgggcatggtggcaggcgcctgtagtcccagctactcaggaggctgaggcaggagaatggcatgaacctggcaggcggagcttgcagtgagccgagatcatgccactgcactccagcctgggcggcagagcgagactccatctcaaaaagaaaaaaagttttagtcatcatccagaggcagttactgtatatggtacatattcctatagtgttccctctgcattcattcaaatatttatatactgattgattactgcacgaaaggcacttgggatacaaatgtaagtaaaaataaatcatttcagtcattgcggagcttagtgtgtaatatgagagatatgactatgtatctgaaaggcctaaagaaaataaaacactattaatgctgagaaattaactttaaaatggctaactttaaaaaagaattcacatttatgtgaaataagctagataggtacatgaaatctgtggaactcttgtaacagagaaacaataacaagttagaaagtataaaaaagatatcagtcataatagcatcaatatgtaaacacttgtagaaaaacattttaatgagaaaatataatccacataaaaatatggaaatatacttaacataatgtgtgaaaataaatgttgtaacagtgtcaaacattccaaaatgtgtaagtttactacaaatggccataaaaatcccacaagactttttggaactcaacaaaatgaatgtcagcaaaaataaacagactcaattattttttgattttctaaattaattttctgaatttttatttgcaaactagttagaagactgtgaacacaagaacagacctgtcaaaccactacaggatacactgactcaaaaatgaatctaatgtaatatataaggtaatttaatgttagaagaaggaggggaaggggaaattttcaataaatagtgttgcaataactggtcagcaatctgacaccccctacattaattacaggtatctttaaaaagttaaagattttagagacaaacagaaaatggaaagaactaaaatgaagtattcatgaaagttctaaagagatgagtgtcatctaaggttacaaactgcagggaaagtcagaaaggaaacaaaacttaaaatacataaactgaaacatctagctagtttttaagaggctatctgtagccaaaatataaaagcaaataagggactagaaaaaaaaatctgaacaggacaatgaagtattttattaaattcagaaatagtactaacacaatttataaatctttgatagccaagcaggacaaggttatgagcagaccatgaccttgagcagaccgcaaaatgtgagcagtttgctagaaacagaaacggaatgccaaagggtatgtgcatttaaaattctgacatataccaaactggtctgacaaaaaggctataccatttacattcccacctacagtgtatgagggaatctggtctcccataacctcataagcatagcattatcgaactttaattttttgtcaatctgacaggcaaacaaaaaaaatcatttaacgtgcatttccctaaggttagccatctttagagatatttattagcactagtatattttctttgaataactgattttgctcatttttctatgtcattactattttcttttgatttatagatattcttcttatatatctttcagtactcaccttcatggtatgaagacgccatcattctaataaaagacttattagcatttgcaatctgtaatccaaggttcaccaactttcatatgattaaatataatgcttccaaaatgaatgtgaatgtcaatgtcagagttttaatgttaaatataacaaaacattatttgtccaaacgttagcttggacaaataattccaaatgataatcaactccctggaatacaatgtagagttgattgctgctggaatgagcagagcaagcaggggagcattctcaaggaatgagttctagacaacagtcttctattgtactagatcacgctctccttggttaagcaaaattgtaactctaatctgagcatgccattctccggaataacagctcaaaattacatacaagataatctggctaccgtagcctactttgtaccattctctatgccctcgcccagggaagcagcacaaatggtcaatttattcactaagttactgaccaaaaattatttctcctaactccacctaaggtaacagcaacttgcaacatattaggtggtctctgttaaaggcatttcttttctttacgctttttttttcttttcttttcttgacataggatctggctctataacccaggctagagtgcagtggcatgatcacagctcactgtagccatgactgcccaggctcaagtgatcctctccaccttagcttcccaagtagctgggactacaggtgtgcatcaccatccctggctaaattttttgttttttgttttttgttttttttttgagacagagtctcactctgttgcccaggctggagtgcagtgatgcaatctcagctcactgcaagctccgcctcccaagttcacaccattctcctgcctcagcctccagaggagctgggactacaggcacctgccaccacgcccagctaattttttgtatttttagtagagaccaggttttactgtgttagccaggatggtctcaatatcctgacctcgtgatccgcctgccttggcctcccaaagtgctgggattacaggtgtgagccaccgtgcctggccaacagagacaggatctagctatatttcccaggctggtctcgaactcctggcctcaagcaatcctcccatggtttgccacccaaagtgctgggattacagccatgagacaatgcactcagctcagaacttttttctcaaaggcatatcatagttttagctttgctgtagccatttcatccataatcacttgctgtggctgggtaaagtgatacacacatacacacacgcccacactggtttagagaaatacaaaacgcaatgcctagacgtgaaatgtatttattcagatttgttagatggcgcaatcaaataaatatttgtgttatgctctaagcttttaagaagtcttttgtatctaaaatataagacacatatgtaaatgacatccagctgagctggactggccaatgtactgaaaaagggctaccacatgtagctacaaggtctcaccctgttggccaggctggtctccaactcctgggctcacgtgatctgcccactgtggccttccaaagtgctgggattacgggtataagcccccatgcctgggctaaattctcaacagaaataatagaagccagaagataacctgacagtgctgaaagatattaaagtatgatggctttaaaaaaaaaaaaaaagctgaaagaaaaaacctgccacctagcatccagtgctcagtgactatttcctttaaaaactgatggcaaaggcctggcacagtggctcaggcctgtaatcccagcactttgggaggccaaggtgggcagatcatgaggtcaggagatcgagactgtcctggctaacatagtgaaaccccgtctctactaaaaatacaaaaaaattagccaggcgtgttggagggcgcctgtagtcccagctacgcgggaggtgaggcaggagaatcgcttgaacccaggaagcagccgttgcagtaagccaagattgcgccacagcactccagcctgggcaacagagcaagactctgtctcaaaaaaaaaaaaaaatggcctagtacgttggctcatgcctgtaatcccagcactttgggaggcagaggcaggtggatcacaaggtcaggagttcaagaacagcctggccaacacagtaaaaccccatctctactaaaaa

SEQ ID NO: 586879 - DNA, 4001 bp, Homo sapiens
ccagcctgggtgacaaagtgagaccctctctctcaataaataaattaataggcacctccttgtagttactggcctcctctcctttgattcccccctctccctcactccaccctgttagtctgaatgttagtcattcttcaagacacatgcagaaagtattccctgatcccttccaggctccacacccaacagcatggcctaaatgcccggctccttcctcggtgctccatcttagctcacattccttaccacactgttttgaaagtatcttgactgtcccttctcctcaactggctaacttctagagagcagaaacatgactgcttggaaggtcattaaaaattcaaatcctgaacatttcttaatcctgcggatatgaatcagtgactcttaaaagcaaaatgttatttatcattaaatattaacaatataatcacattttcttgcatctctggcaagtttcttggtacaacaattttaaggaacagactcttagttttttttttgagatagagtctagctctgtcgcccaggctggagtgcagtggcacgatttcggctcactgcaacctccgcctcccgggttcatgccattctcctgcctcagcctccagagtagctgggactacaggtgcccgccacgatgcccggcaaattttctttttcttttttttttttatttgtagtagagacggggtttcaccgtgttagggaggatggtctcaagctcctgacgtcatgatccgcctgccttggccttccaaatgctgggattacagacgtgagccaccgcacccggccggaacacactctttaacagcagttaaagccgcgcaatggctcacgcctataatcccaacactctgggaggccgaggcgggaggatcacttaaggccaggagtttcacacctgcctgggcaacactgtgagatcccatgtcgaaaaaaataataaataaaaacaaagcagttctaggtttagaggggggaaagcagctctccaggccaaaaaccaactcccaaggtgctccggtaaactcgtcctgggaaaatttcctacctaatctcaaaggcaaaacgagcccacgggcgcccacgacacatttcccaaccgcaaggattggtcacccgcgctgagacaccgccagctgcctatgacctagcctccaaagcggcagagtccctccctctctctccctaaactgccgtgatgggcatccctcggctctcctcccagacggttcggaagcagggacttctgctcctaaccccggccccgcagcctcgccctcagccacggggtggaagtcaggaccacaggcttcaaatcccctcccaactccgggacacttctgccccctagggtgacgtgggatcaagtccccgcgcccctgccgcggccgggggctgtggtctgggtccgagcgtcccataccagcgctttccggggaggttgtgggaggggccccgtgcgaccacagacgctgcttcggagccagcggcctggacggaaggtgggagccggggcgaggggagccgccggagagggaggcggccaggaaatgctccgcgtcaggccgtcggggctcggctggcgctggagatcccggcaactagcgtctgggacggagaggccgcactctgaggattaagggagccgagggcggcctggaacggggaaggcggcgctgacggagacggaatgtgggacgaaggacagcgggaggcaccgacgcgcaactgccccagccgcgcggatggcacggaccgaccgccctgccacccccagcccgagacgccccgccgccccgctcctgtagctgagagccgagcagctctcagccccagtccgtccgctccgtacctcgcccgcgtctccgccggcgtccaaaccaccgctcgcccgcttcgcccgggtaggtctgggctccgcggccagctcccgcctcacacccaccctcctgctcgccccgcccccggcaccgccagcgaacgcacgttacgcgcggcgcgtaaacgtcacttccggggcctttgactctggacgggaggaagtgcgagtggatccaaagggtcgagcggagtggggtaccgccctgacgcccaagagcaaatggaagagggcggcctccggggtaaaggtggggcgctggggagccccggagaaaccggcgtttcctagtctgtcgctcagtccctgcttccggcttccgacgcgcaacagctggagggcgacgctggctccgcggcgactcctggggctgcggccgcggtggtagcgcgaatgggaggtggagcggagctactgcgccgagggacgcttcagaaactctgtttcagtccttcgcggatcctaggatgtgacaggtgttcgagttaaaaggtcttaaggcgatcggttgatccaaaagcagctgaatctttaggaggcccaggcaggaggatcgcttgagtccaggagttcgagaccagcctgggccacagagcaaggtcaccatctctacaaaagaaattttacaaatcagccggacatgatggcgggcacctgtggtcccaactaccagggaggctgaggtgggaggatcgcttgatagcccaggaagttgacggtgcagagatccctccactgaactccaggccgggtgacagcagagcgagatcctgtctcaaaaaaaacataaccgacatccagaagtgaaataaattagccagtgtcacaaagtattaatggttgagtcacaaattgaatcctgtttacctgattctttacgtgattcccatgtaaggaatgttaaaaacagtaaatactaattcctctgcgtcctgaatgccatgtatggcgtaacgtgcagtcacagcaagaaaaaaaagaaaatactatgctgtggctgtgagatagacctgggttaaaatcccagctttgctaattgtcgctgtagtgttcttggacaggttgcgtaatttttcagtctattttttttttttttttttttttttttgagactctcactctgtcgcccacactggagttcagtcgtgcgatctcggcttactgcaacctccgcctcctaggttcaagcgattctcccacctcagccacccaagtagctggaattacaggcacccgccaccacgcccagctcatatttttttttttgtatttttagtcgagacagggtttcaccatgttggccaggctggttttgaatcctgacctcaagtgatccgcccaccttggcttcccaaagtgctaggattataggtgtgagctactgcgcccggcccgagtttctcagtctttattcattattggtaaagtagggattaactgattcgtttctcagattcttcctaagtgcctaatgtgtgctacgctgagggtacaacagagtataaaacaaaagtaaggccaggcgcagtggctcacgcctgtaatcctagcactttgggaagccgaggcgggcagatcacctgaggtcgggagttcaagaccagcctgaccaacatggagaaaccctgtctctactaaaaatacaaaattagccaggcatggtggcacatgcctgcaatcccagcaacttgggaggctgaggcaggagaatcacttgagcccgggaagcggaggttgcagtgagctgagattgcgccattgcactccagcttgggcaacgagtgaaactcctcctcaaaaaacaaaacaaaacaaaaaaacacaaagtacctgtgctgaggaggtggaggagggaataaacaataattatttacagtagtaccttggatggtggtaattgctattaccaaaagacagaataacatttactttaaagctcttaactgacttttgtgattacagaatcaggcaacacaccattctataaaccattctgtgaaacagaatgagtgtttcttttttttttttttttttgagttagagtctcactctgttgcccaggctggagcacagtggtgcaatctcggcgcactccagcctccaactccct

SEQ ID NO: 586880 - DNA, 4001 bp, Homo sapiens
aaaaaaaaattgggccgggcgccgtggcttacgcctgtaatcccaacactctgggagacccaggcgggtggatcacctgaggtcaggaattcgagaccagccaggccaacatggtgaaaccccgtctctactaaaaaatacaaaaattagccggacacggtggcgcgtgcctgtaatcccagctactaaggacactgaggcaggaggatcgcttgaacctgggaggcggaggttgtagtgagccgaaatcgtgccactgcactccagcctgggcaacagagtgaaactccgtctcaaaaaaaaaaaaaaaaaaaaaaaagcctgaatagcctacatactctaatactccttcacacttccaagacaaatccgacagatgggcatcttacaaaaatcagctgtctaattatccttcttgcatctgaattgcaagaaccaaaatctgtcctaatgataagtttgaagaatatcaatccagttaaccgtgatgccagaactttccttggactttactgcaacatgtaccagttgcattgagtttgattaaactggtagtaattcttcctcgctaacactaacctatacaagcaacgctgagacgcgcgattttgctcgggttacactgagattcttgtttctatgggagaaaaaaactgcataagacaagttttgtcttcctctagggcctgtaaccatcacggacaatcatgaaaagcaatgcctggagtcacagggggccagttctgctacatcccatacctaacgcgttaagcaaagaacagtttttttgtcaatgaccacaccacgttgtttaaaaaaaaaaaagaaagaaagaaaagaaaaaacagtcccccattacagccggctcctcccagccagcatcttcaaaactttctccacggaaagggcgaaaacaattttaagaatcctaacagtggcagaagtgtaagtcaaaaaacctgtcgaaaataagttgagaggccgggcgcggtgtcaccccagcgcttttggaggctgagaggcaggagaatcacttgagcgcaggaattcgagaccagcctggacaacacagtgagaccccatttctacaaaaaacttttaaagattagccaggcgtggtggcacacgcctgtaatcccagcattttggaggctgggatgggaggattgcttgaacccaggagttcgagaccggcctgggcaacacagcgagaccccgtctatgaaaaaaaaatttttttaaagaaaagtttgggggcaccaaagcggcccgtacaatcaagcatgcatcaaatatgatcgacttgaccgccgcgttcccaacccaattctcaaaaggggatcgagaggttcatgcaaaaaaaataaagggtccctttttggaaaaatggtcaaaatctccaagagcgcttgctctacgagcgctcccgaggagggcggcgggcggcgtccgggaagaaagccggagggtggagttcacttttccctctagccggcgagcggcgaggccctcctccatcgagagccggaaccaggcacgcgccgcccgggccgtcagggtccggtgggggcgcccgcccgcggcccccgccccgcgacacaggcccaggcccaccgcctacgcgagaccgcggcggacgccggcctgcctgggccccagtccgggcccaacccccctccgcgcccgatcccgcggcctccagcccggccccggccgcgcactcacccgtctcccaccaccacacacttgatggcctgcatcagggccgctcgctgggccgcggcggcggcggcagggcgctgagataggaagcggcgggctcggggcgcggcggacgggcgcgcggcttgcgggcggcggggcgctgggtgccggggccgctgtccacgccgcctcgccctccgcggactggaagccgatgcccggcagcggccaccacccaaagctgaggaaaactgcagagaaacaggaaatggccgctccactcacatccggcctcccctcccccgcgccggcgccgccgctcccaggttccgggcggggccgctcccgcccgcgccgctcccgcccgcgccgctcccggagtttctctggacttcgggaatgctcggaagcgctcgggcccactcggctccggccgcggggcgtggcagccgccatcttggcgcgctaaagcggcctgggcgtggccgggcctgcaggtcccttccctgggactcagggctttaagaggaacctgtcagctcggcgcggtggctcacgtccgtaatcccaacactttgggaggctgaggcgggcggatcacctgaggtcacgagttcaagaccagcctggccaacatggtgaaacactgtctctaataaaaatacaaaaaattaacggggcgtggtggtgggcgcctgtaatcccagctactcaggaggctgaggcaggtgaatcacttcaacccgggaggcagtggttgcagtgagccgagatcctgctattgcactccagcctgggcgacaagagcgaaactccgtctcaaaaaaaaaaacaaaaacaaaaacgaggaacctgtcagacagggcgcggtggctcaagcctgtaaacccagcactttgggaggccgaggagggcggatcacaaggtcaagagatcgagaccatcctggccaacatggtgaaaccccgtctctactaaaaatacaaaaattagattagcagggcgtggaggcgcgcgcctgtagttccagctactcaggagcctgaggcaggagaatctcttgaacctgggaggcggtggtttcagtgagcccagatggcgccactgcactccagcctggagtcagagcgagaccccgtctcaaaaaaaaaaaaaaaaaagaggaacctgtggtggctgggcgcagtggctcacgtctgtcatcccagcactttggttgggcggcccaggtgggtggatcacaagttcaggagtttgagaccagcctcaccaacatggtgaaaccccatctctactaaaaaaatacaaaagttagctggatgtggtggcaggcgcctgtaatcccagctactagggcggctgagacaggagactcgcttgaaccgaggacacggaggttgcagtgagctgagattgcgccactgcactccagcctaggagacagagtgagactccgtcttaaaaaaaaaaaaaaaaaggaacctgtggttgcaggagccatgttccttgtcactaactcctgcttgaggccattggagggcattgactccccctgtttcattatctttatgtgataactatctgcaatgacattaggtccttttagaaaattcggaatctaaaactataaggaagaataaaatcatacaccatacgtttactcagcaataaccatgtccattcagccaaaaaaaatgtgttgccggccaggtgtggtggctcacacctgtaatcccagcacgttgtgaagccaaggtgggtggatcacctgaggtcaggagttctagatcagcctggccaacatggcgaatccccatttctactaaaaatacaaaaaattaaccggacatggaggtggatgcctgtagtcccagctacccgggaggctgaggcacgagaatcgcttgtaccggggaggtggaggtggcattgagccgaaatctggccactgcactccagcctgggcgacacagcaaaaaaaaaaaaaaaaaaaaaaaaagtgttgcatgttctcctctgtcgcatatgcattttctgttacttgtttttaatgtatttagtgctatgcctcgtgctttgtaccaggttctggagataatggccattagacggtgaaagtgcaaatattttggtatatttcctcttagttatcttttgatatgcataatgaacgttttgtaagcaaaatcaagaaatcatacagagtcggtgtgacttttttttcttttttataaaatagaggcaggatctcactatgtcgcccagtctggtcccgaactcctgggctctagcgatcc

SEQ ID NO: 586881 - DNA, 4001 bp, Homo sapiens
caacagagtgagactccgtctcaaaaaaaaaaaaaaagacaaaaattataaaaaggcccccaaatacaatggaaaagtgagttgatatttggggcccaggggtggatatatgttttgtaaggtctgacatttacataattcttctttaataaaaaacaaatagaaaattacaaacacacaactgctaggtctcctcccagggtcttagaagcttgaacttcagaaatgttgttccccccacttccccccacccctgcttttcccacagtttccggagccggattcgaaggcagaggcagagttagcagtatcatgaaacaggagaaaatgtaagcagagagaatatgattgactcctttccaataactccttcttaagcccccagaagtccctgttacacaaaccttatctgttttgggattttcagaaagcatttctctccgtttggtcatcctcccttggccagaccagagggtgcccacttgttcacacgctgcccgcttccgaatcccagaaggcggagcctggcctgtttgtgagaatgggatggactcgttttttaaaaggccaaggggagtgcaggaaaatccgaccgggcggagcacgccctgggtaacaagatctgtttttctggaagtgcgaccggcctcttctgccccattcgctcctctgtgacacaaatacttggggaaagcgcagggctcggacagcgagggtgtggggcgctggctggtgctgctcttagagaatgttttctcttgttctcaaggaagggtccagtttctgatgaaaaacaagctcaagtcccagcggcgagtacagggagtgaggtcagtgctgcgctgacgacatgggtggagcgacctctctgctccaacaggacaatgtggaacccattatcatttccagcaggagggaaaacgaagcgcagactttacacactcagctctctcccctccttccatgaatcctatctttacagccccagcccgagccacgctttcaaatgcaaacataattcaatcagatttaattctgacctgctagctgctggagaggagaccgacttgccccccagcaaaagggactttcaagactggttcctgtctggaatgcacaagaggtggcctatattaaccgcgggacacgagcaatcagattcttctgtgcaattcagattagccaaacacttgacaggcgacagggcagggcaggatggtccgcagccccgccagggccctgccaaccccaccaacaggctcctcctgcgaggccccaggagctcggctcagcatctgttatcttggatgcagtatttgtcgaggggctggaaatggtacataaatagccgggaaacaatgctttgagctggcgcacgagtggggatcgggctgcaaccgggacggggtatgtgcaggggacgtctcgccggcccaggtgggagagcgcgcggaaccctgcgccccgctcccccgctgcgccccgctcccccgctgcgcgccccggacgaagctccccctccagggcacagccgggaaaactgagggccgagagtcccctggagttgggggtccggggcccacgcggacagccaggctcaggagctctcgggggtcggcagcgcggacccccggatccccgcaggctgggccgcccttgcccgcgctagccggcctccgggtaccgccccccggtccaggccggggcccgacagccagtcggttcccatggcaactgggcaaacctgccctccgcgccccgaccagcggccgggagtgtccccgagcgcgccccgcggcctccgcgccccaggtccccggcagcggccgagcagcgccccttacgagccacccccggttccgcagtcactcctcgcgcaccccacactcacctccggcacaacccgccgcgccgccacgttcccgcgctgctcccacccgccgttggctggggccggcgcccagacccgcgcgtgccgcggcgcctcctgccggcggcgcaacgggcggggcggggcctcaaggggacggggccacaaagggtggggcgggggagaacaggtgggctggagctgggcctcggcgcccaataggcagaaagaaagcctcgaggaggcggggtctccaggagaggggcggggccaacctgctagaaaaggcgggctgtgctctggcgcctcctgccggccgcccaatggacggggatgcagcctcgagggggcggggcctcaccggagaggcggggttttgaagaaaggggtggggctggttgtggagaggcgggacttgcagcccacccacagactgcagcttaaggagggggggtccccggaggaagggtgggaccagttctaagtccctgagctgcttgtgggctctgggctcctgcggttgggtgggctatttcgagacagcaccttctagtagcccagtgagtgggtgtaggggagggtagagctgtgcccccaattaataaacatcttctaagacatcgaaaaggaacaagggaggaatttcctctcccctaccatctgtctcccacccagagttttaaaagacaaatcaggtcatggcattcctgcttacaattatgcaaaaaaatgaccaggtcagctctggggctctggccccaactgctctccctggggacttgtttaaaaagcagctcgtgacctcggcactttggctggggttttccctttgaggaatgtgggctagacctgggagattcaggtggttcggaatatcaatatgcagaatgtgggcctcgggagtgaacctttttgtggacagctatcgtggtatgatttccgtagtcatgaccccatattcgcgatggaggtcggagcagacattgatgagtgtgggaacagacatttattgaccacctgtgtgccaggccctaggcaactttacctaggtcacctcacttaatgctcacatcaattcttgtgagacagagatgtctgagacattccaggcctcccctttcctccacctatcacctgctaatcctaaagtccacctcctaaaccttttctaataaaaaatagtgcctcaaagtcaacacagagagacagatttgagccaggctcctgtctccttattgatcaactcacaatacggacaaaaaaagcttttgtctcaaaaacttaatgcagtaagattggctttttttttttttttttttttttttttttttggagacagagtcttattctattgccctagctggagtgcagtggtgtgatctcagctcactgcaaccaccacctcccaggttcaagcgattctcctgcctcagcctcccgagtagctaaggttaacaggcacctaccaccacgcccacctaatttttgtatttttagtagagacggggttttgccatgttgaccaggctggttttgaaatcctaacatcaggtgatccacccacctcagtctcccaaagtgctggaattacaggcatgaacctctgcacctgatcaagattggcttctagcagagcaagcgcagaacccttttgttcagtaatactcccatttttcagatgagaaaatagagacgcagagaggtcaggctgctggaggtagagacaagaactgagccaggaatacaggaccctctgtatacacaccaacctcctcgcctaccccaggaagggatgcttgaaaggaatgacgtgcttgaatatttcattcaggtgcgcatgaagagacaatggtcagagctgaaggagagcctgggttcaggcctgggttttcctcctgagatattcctcaccctgctcctggcccatctcccacagtccccacatccttcttccacaggggtcggataactacaacccatgggccagatctgggctgccttctgtttttgtaaataaagttttattcaaacacagctaccctcatttgtttagatattatctacgactgctttcctgcaaccaggattttacagccccaaatatctaaaatatgacctggccctttataga

SEQ ID NO: 586882 - DNA, 4001 bp, Homo sapiens
tcaggatttcagaggattgcgtgtattcatgggaagaatgaaccactataagcattctgggaagcaccacgttatccaaacaatggtaactcctaatttcctctttttcattaagatagggtacagttatcaaccccaaacataaacttgatgtgtatcaccaggcagtctcttcctactaactctgaatatgctcaagtagtaagcatttaacactagaatacaagttataatgcccagcacaattttaatataattttaacctttcagaggaggatagttttggaaggcaaagaactctgactgctgaagaatgaaacacgaagtaaagtctgtaagtggcaagaacctaaaacaaaacaaacagcctagcccaacaaaaataagcaactcctggatggtgactgtgagataacctatacactcattcattcagtgcagaaatgtgtgaacagcttctatgttcaaggcatactgcatagaaacagtcataagtaggacatggctcctgccctaaagaaatccaaggtcaaaaaacggtgttgtcagataatacttcacaataatagtgtattattttaatacaggagtcggtttagaataatattgtattaccagagacagaaaaacatgagctaataagacacactgaaatacattaataaacatactgtaagagtttaccaatgaaatctgttatccaatttctggaatatgattaaagttgcaatttactttctggaaaagaattaacttatgatacatgttttataaaggttgttccccccccacaccacacaatttgtaaattaggtgcttttcagcttgacacgtagggcgtggcacgggacttctcacactacctcagccacacttggatgagctcttacaagtctggacattcaggtttccgagcacaggccagttaactccctaattctccctaaatcctgaaacaacactgccacccctgtgtgccgtcacccccgtctacttaaacacatatatccaggctaaagcatgccaatcacatcttccacttctggaaatctttcagaaacgaaccacagaggaaacacctctctcccaaaatgtattctcttcctcatattagaagctagattacctgaaaatgggctaaagctgtgcaagcgcccaaggccaggtattcagttcagtgcggagagtctaatgactttaagtctgaaaaaccattcctttaactggcaaaaaaaaaaaaaaacacaaacaaacaaaacaaacaaacaaaaaaccctggcggagatgcttaaaaagcagcggctctagcacaggcaaggagtggaaagaaagggaaggaggggagaggggtggagtgaggcgcggggactgcggcggcagcgggttgccccaggtcgcgggcaccgcccgggcgggaacttgggcgccgtggacgaaaggtgcggggtgaccttcggacgaggccaactgagaccggctgccgggcgcaggggacctctccgcagccgctcactctcgggggctcactcgccccacagcggcgaacgcggtgccccggattccagccgggctcatctcgcagctcgtccccgggcagaacgtgggatgtgcaatctcggcagcccgaacccgcgtcagggcctcggcccgccgccgcccggacacacccccgccgccgcccgggtggccccagtccctccccgggcggcccgagcgggcatcgctcacctgcaccgcgagccagtccgccgccccgagggctccggaagccgcggctgcgtggctccggccggagggtactcggtccttgtcgcctggaaggccccgcgccgggagcggtcgaaggaggagtctgacgggtggcgggggagcctgggcggctggaggaggaggaggaggaggaggagaaggaggaggaggactccgacgctttgctctggggagatccaccctcctcctggcggctctgcagcagccgccacagatcacttccggggcgctggggagcggggcggggcagctggggagcgacttcctgtccgtgggctgagaggagggtgatcatgggcctgggccgcagaacagtggctcggagggcgcaggctgcccggcctccgccccctgcaagctgagggctgtccgcgctgtctttccgacggccccacccccggctctctgagctccgcgaggtgaagtcatctcccgggggctcgggagtggccgcgggcctcgcggaggttcccggatctcggcgtcgttgccgcggtgtccttgtctttcttttggggaccaggagggggttcttgggggaaggaggggagagcggaggccgccatcttgcttctagagggtcagctcatgttccctgggcgtctcagggttgaggccgctcgtgtggcgtggccgggggtattcagagcggagctggcgacgtggcttgtcacgggccaaatcccaggaggcgggtcagccgcctaccctggctggagggtctcgtggctgccctgggcctcatctaactgctgatcccctggagaattcgctttctcggacggtctgcgagttctttctgaggggtgtcggacccccctgcgactctgcaggtgtcggtgtggcactgagatcatcttgcggccccatggcactgtgatttggtagcttgtgagaagtagtttcactaaatccgtaaatttaagttagcagctacagattcttatgtcttgacatttattcgcttatctctctttgctccccacaaattgagtaccaactatattcctggtatgagccattcaaggaatgtccagtctagtgggcagacatacatgaaagcaaatcattgctattggaagtatggtttatcaagatgtacagcgtgaagaatggatagctttactaacgtaggttagagttttaaagataaataggcattttctactacaaaaataggggtgggatggcaaatccggatccgaacagaaaggagatgcagcacggggacaaataatttgttgagaagaatgagtaataattacaggtcttgaagttcaaacttaggttgctgaagaagatgaggctggagaagaaaacaggagccaaatcacgaatcgtctatgccttggtgaggcaatgagtggacagattacaatttaagctattcttctgttggtagagaacagataacttgggggggtggaggtgggggggcagagaaggataagcagagagcccacaagggggccattgcagaagccagtaagagaaaacttaaggaccctgtgtgaatggtagtgagcatccaaaggagatggattcctaaaatattcaagaggccatatcaactggtaattggttgctaggggcagctgccagataggagaatggaagaggcaatgatgatgccttgttttgctttgagggaggggcaggataagggtgtattttactaaataagataaggaagagttaggatgagtcctgggaggggacatttttgcagaaaaaaaatgagttcagttttggagttgatgagtgaagtaagagtggtgctgtctaatggtggttgctatatgggtctagagctctagggaggagctgggctgaagttggaaacaccacaggtttagatgaccataaccaagctgactgcagtcttacgtcattgagcacagtttcaaaaccacttctcctttctccctgcctttacttgggaaaattactgaaatactgcattaaaaaacccaatatggtgatatgtgtccatccatagaccaatattctaatgtttaatggtcttctaaggaccctaaaggtcaggtttagcagaaactggatgtaacagtggtaactattaatagtatagcatcattaactcataaaatgaaatattatctatgtttatattttaatattttaatttttttcttttttattctgtaggaattgctccattccaataaaaatattttaaatttaatcattgacaacagttaagctggcca

SEQ ID NO: 586883 - DNA, 4001 bp, Homo sapiens
acaatcccatgcccaacacaaggtgatagggactaaactgaatggaatcaaactgacggtctcagcagccctttacagattgctattattacatctacattgcagctcggaaactgaggccagtgagtgctttataatcttgggatcatgatcaggattttcacccagaccagaagagtccagtcaagagctgggcaccacagcaaagtgtcctgctgagtagacaactgctggacttcgcatccccacagccccacacagcatcaaatgctttctggaaaaaggtctggaattctcaaagaagccccagaggcctgcaccctccctgctggtcctcctgagctagtcctcagtcaagaggaacccacccagctccttccttccagacacagcagcatccagggcagatgtgggttccagtcccggatacctctgacacatcggcctgggaccatgagcaagttttacctctccctgaatctcactctggccagtcgaacactgggagggtctgctgagaagctggacctggtccctattctggccagggagcgtgaacccatgtcccattggagggggacagtcaggaccaacacaacaggacaaagaagtggccctcaggaactgggtccacgagagacaggattattaaggggggattctgtgcaggcggaagcctgtggtccttctcaatttgatactggagatgatcaggaaagcctcagcttctcccagaatgaattgagaggaccttccttccactatagcgaccaagatctccacctaaggggcgctcactggaagtttgctgaaatcccaaatcagcatgctcctgatttcagaagctgccatccacctttgcacttcaacacaaaatccaccacatcctaggctccagccctggaacaccaaatgaagccacacaagttctgcacaccaagacctcttcaatggaaggaaaatgaccactgagtttggtccacccttttcccacctcccgtaccaaatcccaaatcatcaaaacaggcccaactctgcatcttacagccagggaaactggggaccaccaggccagggccctccatcaccaatgtcccccccagaactggccaggctcagtcaccactcagtggaccccagccctcagcaagcactcttccccaacagcctttacacacattctctctctctctctctctcttactttttcttggataatttctttagcaaggtacttcaaaacaagcttttagtttaatctatttccattttgtgagcaatggttcttcctagagtcctgatttcttgccgaagaaggcattaggagaggatggctcagagagtcgccccgcttcccctctcagccagttccaggacacacacaggcgtccacacactgaggggccctgggaggaccagctacccagtccggagtccacccgcccacgcccctgtgagtggtgggcaggcactcaatgccaggacagagagctcactaccttacagacagcccaccctgggggataaggggtaaagagccagacctggtccacctcttctcgcccaccctgaggcgaccccagaaccggggcgtggggggacatcacaactagaaggaccgggggctgccggaccctgccgtcagaagaccccggagggggccctgtgcctcccttgcccgccagagtccttcgccttcagcttctcccgggtggaaccctcccgcagagcctgggaatcccgccagggtcactgtgcgcccctcccgagctccggggcaagggaaggaccgcggcgcaggtgcgggaaggcgcgggtccacccgggtccggtgaaccccgaggagtgggggcgcccccggtgcgggccgtcgcccccttaccgcagagcagcagcagcaacgggagaagttgcgggcgccgcagcgctccagtctccatggctggccggccgcagctgggtcacgctcggtcccgctgggggcgcggctgggggacgcccggttggggttggggtggggcggggcctcagggggtccgccctcaggccgcacccccagaccacgcctgcggccgtgccccgttgcctccagatgtggggtgcagtccctgcaggcgcgccgggtgggagggatgggggcggctggagtctcagcggggtgagaggggggcgagggcagggtttcgagctggggacaagctggggtaaggtggggtgccggctgatgggctctgagggcggggctggggtgctgagctgcaaaggagctttttgggagcagattgtaggggcagactgggaggtgagctggggtgagcgtgggggccggctgacggtgggctgggatgcaggctggagagacttggggaacttccgtccaggctcaggggcagagggtgggggtagaccggggagggagctgaggtgaggatgaagcgctggctgatgatggcctagaggagtctgggggtagactggaggaaggtggacctgggagtgggctaggtgtgccctggccgaaagtagaccagagtccagagctgcccccaggcagggaggggaactttgagcagagatacatctaggagccaggtctccaaaggtcaggaaagtgcataaaagaggttggggggtgtgtgtgtgtgcgtctgtgtgtgtgcgtgtgtgtgttgttcatggagtacgtgtgtgtgatgtgcatgtggggtgtgtgtagatgcatgtgtgtgcatggagtgtgtgatgtatggtgtgtgtgtggcatgtgtgtgtttgagtctgagacaaggtgtgtttgtgagtgtatgcttgggaaacagtgtgtatgagagagactggagggtgtggcaactacacacacagagacgtatcacacaccaagaaccaagccacaagcaaaccaagggacaggagagtatctggcaccaccaaagacctggccttgaagagtgtcagggtccctgaggcgaaggagggcctcagtttctccagccacaggtcacttggccagatgggtcacctctgtcaccctcagcccctagcacaggccctggctccagtggacacttaatggtgtcttaagaattgtcactggtcaggacttccgagagccagctagaggcacctctctgccctccagggcccacccaccacccctgggggcacatgctggtctgaggttggggcacaggcccaggctcctacatggatgggccctccactcctctgagccgtaggtactgctaccttcccaggagctgagctgaacttctcctggcttagaaagacccactttatttaacaagacccttattcgggagaagaactttctgtgcttttttactgaagaaattctgattacagccagaattaattcaaaggagtcaaaactaattaaaattgatcatttgtcctgccttctgcctgaggggtgggcagcaggtgtaggggtggccacagagcctctagtgagactgatggtgcccacagccaggccttctgcccacaggccaggggtcataaaacaagctgaccagggcagcagggggctggcttacacacacgcacaccctacaccagccaagacaaaccaagaggatggtccaggcccaggtgtccacccacatcccacacagactcggccctacagctctctccaggagagtcttagtctccactcggtcccacagccccaaaggcggttgcacatagcttgcaggctggaacagtaggatggggttgtcaggtgggaggggggcagccagttcccccaagcctgcaccagggagcaatgctccctttcctggactccccaccctggctctgcagtggggaagccctggccattctacagagttgggttccaacacctctcctccatggaaccaaccatgccccaacaaactcccagggagttgtgtctactgcccctaggtccctctaaggcagggccctcacttctcctctctgtgcccagtggtgcccatggcctctgcagggca

SEQ ID NO: 586884 - DNA, 4001 bp, Homo sapiens
gcctaagacaagttcatatttcacttgtttttctccttctttcaacccccttcctactcctttgatggggaagattccaaaatcacaaaggtagttccaaggcagaagaaaggggaaataaacagtcaaataaatagtcaaaaagtatgggtttccaacactggaaaaactgacaatcaaacttccttcaataaaaactggctatgcagttacgaaatgtgtttggaaagtcccaaaaagaaataatacagtattagaatcaaagagggttaataaagcatacattatctgaggtaaccacattcagagtaattaaaaaataaaactaaataggtatattgacaaggtatacgacaccctcccaggcagcaagaaacatgagtatgaacgcaaataaatactatagatctatttatacagaaaccctcagcaattcttgtcgcagactgcctggcagccctcatgtcttcagtattctgtgccatgaaaaagtaaccgtcaaggataatagaaacataatttgacctacttttccctggattcctgcaaagtctataactccagttcttgtttattccgacaccacatcttggggacacatttcctcacttactttgcaggcaatcctaaatgccacacatgttaaggtcacttgtgggcaattcctaaactctctgggtcaccgactttaagaatgtcccatcacacacagagaatcctcagaacatcttctgagatggacctgggatggaccattttccacctgagatggaaaatgcctaggaaaagagagatgcagcctcgagaagctgaagaccgacatcagttcagacccttccctacccaaaggagggcgcatgaaaacaagtggttatccctcactctcaagtttacacaaacccatctctgaaagagctagaagtctcccagcaaggtcttgttttaagtcagacaagactgcattttaaaaattacagccaaacgggaaagaaaaaccacattgatgcagcttctcattaaagaccacttaataataaatttttaaaagatgagtagaacccaccaaaggtgccgccaaaccctggtgagcagggaaatctgagtaagtcagctctgtgtcctgaggccctggcggggcctcctaggtggcttcttaaagatcccaggagacaatcagcagaccttcctgcttctcttaaaaatacaaaacatgcctgacctgctcaggtcattagatgcacttagaactcaatgagggacactccttcaccaggaaatcgtatctgaacacaccatcaggaagtcaatattgaaggttcttgggggcgtgcaccctcctgctcaagagggtgtccaggagtattaagtgctggagacaccggaacccaggaactggaagctcacccaagagcttccgactcctgggtctgcccctcggcggtggagaccaccaaaaccagtctcgatgcccagagcttgcaacagcacctccaaaacaagcacacacgtcgcatgcgtcctgcaaacagggatgccgctcgtggggcctgaagcttgcggttgggacagggctggctggctgttggacgctggacacctgcagcttcccctccgagaagaggcaaacagctcgtcttcagccgatgcccggtcccgcagcctgaatctgggggccctggggttaagtcaggtgcagcctggtgggggggaggtgtgggggcgggggaagccgtcgctcagggggtggcacctcaaaacccgccgtcccgggcccctcttcagccgagtccggcagaagggcgtcccttccgccacctccccaacttccagacgcccccctcagcggcccggggggtgggcgcgggctccacgtgcgcgccgcccgtgcccactcggacagggccgggccactcacccggcccccagcggcgctccgcttcctccgcagcgtgagcccgctccgcagcagcgcgggcaggtccctcagccgcggccgcagcgacgccggcggctgctcgcgctcgggctcccgggcgctggggctgcggcgcagggggccgtctgccgccaccaccgccgccgcggcggccagggccgggctctcgcacggcggctgcatcttgacggagcccacggccatcctcatgccctgacggcgctgcggcgccgggggctcctctccaccgcgctcgcctccgcgcgccgtccgcgccttcgccaggaagcgagagggcgcgactgcggctcgggcgcggggcgcgctgccagccgctgcccattggcgcgcgccgcggcccccgcgaggctcagccccgcgcgcctcccctcccctcctctctcctcccctccccgcccaggtgcgcgggccccgccccgccccgccctttcgcctgcgaaagctgcctgggacctgtccccctcggatctcccactcgggacccgggaggaagagggcaccttgggcaccggctcatccacaggtgcagaattcccagaatctccggcaaacccgctcttctgtcctgtccctgtccccctaccccttaggctgaaaagtcctgcttcacttcttcgaatagccaggggttgacttggacttcaaccaagtgtgctggagagtcgtccgccctcccgcgcgttttgcacagcctggcccctcatcgtaatctttactcctgggaactgttttggccaaggaacttcaaaatagacacgctacaaggcaaacaccatgaggcaaaattgctttgcgccgacccttcttggcacacgcatccttaaaggacgaagggagaaaacttttgttggttatgataggtgttgagcagagtagctgcaagtctggtgacctgaaggtgaatctctgttagcatgtcagaacctgaccttccctgaaagcccgctgctgtgatgaatgtgcttggtgaactgtaaaggcctgccgtggtgtgaatcattgtttacacccttccaggaggcaggaattctggatcattgagagtgaaactattccagcagtgccttaaacgccagggagtgtgaatgttcacatctcagctcaatctgtcttcaacaagggccagccagggtgttgacttctcatcagtggggcgctgggatccccatctttgtctaagacttacaaaagttgaataagcttattcacatttttaaaaaatgacaagaatcgtaggaggtcagggtccagagttggtttaccattgtgccctcagccactcacatggtaggtgcttggcaaatatgtataaaaacatgccatgtaacaaaaaaggaggaacgaactgtgacctctgcccttaaggaaggtaagacttaacctaggagtagacaaacatccagaaaaacaaagatattgcacttgtactcttgctaattgccaagtaagtgtaggtaagaccacttcaggccacaggagagagaaatgcttctggcctgggatgggcaaagctaaatccacgaaaggaaggaagtttaaactgcaccttaagggtgagtggggaagattcaaccaggcagaaggagggtaggtgtccttcaagtaaggaagaaagacatgaggccgggcgcggtggctcacgcctgtaatcccagcacgttgggaggctgaggcgggcggatcacgaggtcaggaaatcgagaccatcctggctaacaaggtgaaaccccgtctctactaaaaatacaaaaattagccggtcgtggtggtgggcgcctgtagttccagctactcgggaggctgaggcaggagaatggcgtgaacccggcaggcggagcttgcagtgagccaagattgcgccactgcgcgacagagtgagactccgtctcaaaaaagaaaaaaaaaaagagagaaagacatgagaaaaacacaaaggtggtatcacacagaactcactgggcactgaaaatatgtcatgctagtgaagggaaagatgacataatgaagaagtaagagaagataccagaatggatgctagtaacac

SEQ ID NO: 586885 - DNA, 4001 bp, Homo sapiens
gcccaggcatcacccccacggtggaaggtttgcccccaccgtgactgatgactggagtcctgctaggctaggggggcaccagacacacccacacagccggctccttccacccaggccctgatgcttgagagaggaactcagaccgaggtgagccctgctctgatgaagataagtccaggggtaaccaaaccatcttcctgtctgccaggccccagctcccaccagccactctcacaaccttgggctcaggctgagccactccacctctaaggaggctcttcgcagtggggtctctaacctcagggcttcttaatggacctcccaattcatgcatgcacacccaggcatgtgccccacaccccaaaccccaagtccatgcactcacacccagcatgcgcccattgctctcacaccccttcactcaccccattgggcctgactttgcactcgggtttcttccagtccctcttccggcagcttgtctgctgcagcttaaattccagcctcacaaatattccagctgggaagggctgcggacagacaggcaggcagaggatggccggtagccagctgagggtgcagagcaagccctggtgtgatccgcacctccctcacgcagtcacattccagcaggctggacagtggccttttctccaaagggctggggctcagagcccaagcacttctgtcccccttcgtgggaatgcgctggtctcctggggtacgaccctccccgctcctgcccgggccatgctactcaccgtgtccacggcgctctccacactggtctcctggaaggcccactgcacgggcgggtgcttgtgaaattcctccagggccacctgcaggccccggcgctgggcttccgtgagctcggcgacgcccacgcccaccgcacccagccacagggccagagggatcagcagccgtcgcatgcttccgtgtcaccctggccctgcgaagcgggtgtgcgcccctcagctctccgagccagcccgagccgcctcctcccgcgccctgctctggggggagggtggggagcgggggcggggtccaggcctgtagaacgctgggcacaggtgaaggagcctggaaatggccctttctccaaattgaccttagggtccgcctggccctctccgttccctcccaccctgcccgcgctgttccctggggcctgcagttttagcaaagttccctgcccacgctaggaatcagtcagttcgcactcccaccctacacccctaatcttgcccattgtgtctctccctgggtctccggcacgacccactctcctccctgccgtccccggagcccctctctcctttccccgctcagccttctccccaaccgctactccctccccgtccagaatccccctgctcccacggggttccccccacgtccccgaggtccaggccagccgggggaaggggcaggggccggaggccgaatacttttgggaggacctaaacacgtgggagggtccggacgggtgggagcggcgggaggcctaatcctcccggcgcgggggctgccgcgggccaccagccagccccagtcgctaggaatgggggtctcgcgccgcccagcccttggctttcccgcttcaggcaaaatcttccctccttcctcttttttctggggccttccccacgacccctcttcctagcccttctgatccgtcccctgatgcatgactggggccaccggaggggctgaccctcccggagagccccgtcggtcctggtggtcttgggaccggagagcgacagatgtggaaaccgaggcccctcagtgaagagctgccagggtggtcgccttagagcaaaggcgttcctcattccgcctgcgcagctgcccctccgcccggctgccgccccagcccgcttcccctcctcacgtccttccctgcgcctggaggtctcccctgaccgtcccgcagctgaaatcttggcctcgctgtccgcctcttcccgctcttcttctcgcggggcggcccccacctcctcccacccccacctcctggaccccctccagcaactctggctcctcccctccccagtgggaccggcctctggggcgggatgccctcccgcgccctccctccccatcccacccccctccttcccctcgatccagccctcatgaccctgaccctggccgcggctgcaggcggctcgcccaggcgcgcagccctcggtcccacctccctctggctcgggcctgagcattccgcagcctcggccggcccgggcctcttctccgctgctctgctcccccaaggactttctgtgccccactcctacccaggcagggctgccctgtcttgggtcctttacgggggaccattccccagcgtccctgagacactcatcctgggatttcttcccctaaatacagacattctcaaaccaaatgagacctcgaggtccctacacctgatcctgcctcccactccctgagccacactgagaaggaaggtctctcctttagggaggactctggcgcctgcaaccttgatcgacagcaaagatgtccagtgtgtatcctgcatctgcctttcctgaccattcctcgtgccccattctccgtgggatagattctcatggggagtgggggagccttcgggtgtggcagaacggcatgatggaattcataaggtgagcagaaactcaaggaaaactgtccaaataccggctcgactcctgggtacgctggagcaaggatgaagaagctctgagactttgcacgtcagtaaccaccaacaccatgcctctggttcccacaccgcagggatcacctgaagtagaggatctcatgtaacttcatggctctctctgaacttctgtttctttatctgtaagatggggatcagaaactctgtcttaaggagttgttttgaggattaaatgaagaaacatgaaaagcaactgatgtccagtgccgagcacaaggcttttgtcccctacttacgcacccctaaccaggattctccacttagagctgagaatttcctttacagtgtgctctgggggcaccagaaagaaactcggcttccattaaccacttccaggtgtctgaaatcccaccactacttagggtacttcactccccagctgtgagctactcagccgcccttaagcagaaagagatgggatccgtgttccctgaaagctttagatggggttagagagaaaagatgcacccaaagatgtttcccagcccaagaacttgaaggaaaccaaaatatttcaccccaaaaaatacttctttgacacatttcaaggtggctgttcagaatggttggaaatagaataaccaaaaagctgtctttttgtggagagatttgcatctgtagaggaaatctgcattgatgtagccaggctttctccgaggctctcccttgtctaactctaggaaagattaactgagaggctgacacctttacagatctgaaagaaacatttaccctcagttctttctgagggctgctacctgtgaggtgtcatctacctaacaagactccctttgccaaccaggcctcctcttccctcccttccataacctgtcttgccactatctgagcccccatatttgtataaactcaagatggtggataagcttctgtatcccactgaggggttggggtaatcactttgtggttctctctcatgtatgttaataaatatttcctgttaaagccgaggcaggaggattgcttgagcccaggagttcaaaggtgcagtgagctctgatcatgaaactgtacttcagcctctctggacagagcaagaccttgtctctaaaatataaatgaatcaatttattctattaatctgcctttcatcagttgatttttcagcaaaccttcagaaggcaaaggggaagttttcctttggcccccacagacccatgctgggggacgtcctgaggatgggtgaggagagaaatcttccaggacaaggtaggacttgagctgagcaaagcgggaaactcat

SEQ ID NO: 586886 - DNA, 4001 bp, Homo sapiens
agcccaaatgtgagggactgtttatgggatggtttaagaggcggctgacaggtcagagctgtgtatgcaagccacaggggaagatggggggttgcaaaggagacgtgagtagggcaggcaggggggcagggtgaggatcgagatcccaaggcacccctccactgtagatggaacccctttgcccagaggcaaagcactgagcagggaaccaggcactgggctcccaggtgggcatactccaagagcttggctgccctgggctggagagagcctggagccaggcactagggccagctgctgtggggatgaggagggaggcgacagacggaggggctgctcctcccagctgccaccagccagaagaggccaagatgacctagttcctagtgccagtggtggcagggggtgggggatgcttaaaggctgggcctggaggctgagacccttctcagagctcctctgccttcccagcccacagacctcactgccagctcccactccacctccctccaagcctccaagcacagaaacccacctagggatgcccaccgccctcccttccccattgtcatggtaactgctgagctgggcctcatcagacccagggggcctggaactggcactgctctcggtggtggcgcgctgagcttgctgggaagctcacaggggccaccacacatatgtgtgagcagagtgcctgccccccaccctgctccaccccctcgcccatgctagccacttctctgcatccaggagcccggggcgcccaaggggtggggaactgcagctccgcagactttggactctgtttcctccaggctccacttttccccctcccaccctcctcctccaggcagccagtgccccttgacctttgagctttccccctcttcctctagagggatttcaacccctagtttaaagaggggaaactgaggctctaggagcagggagctgcctaaaccctgtacatgaggaaggtggtggcaagaccaagatggtgggccaggggtcaggcagctcagccctgggacctactgagaagagtggaacaaggggcccctgaaacctccccaaatcgagccagggaccaggggaatccccagatgtcagtgcctgtgagaagccctagactcaagaccctgctctgcctgccacttggagccagcatttcacttctctgaacctcagttttctcatctgtaaaatggaacggtgagaactgcctttcggggtggttgagaggattaacgggatggctcaggtgtaaagcccaaggcacaagcgacagttactaccctccttccctcccccacagtcctgcacctgtcctggcctcctgacctgttctcacttttcatgccagtccctcctacccgagtgcacagcaggaagcccggggacagcccctgggccccagcatgtgcttcaggtgcacactccggggcattaagggctctggaactactgaggaagacccttcctttgcgggggacaccccaccccctccaaccccaccccgggggcagatcaccaagacgtctcccctggcatgtcaccaggctccagctcctgtcgtatcaaagccccttcccctcgtgagccgcggatcgctgacaaattctcgccccctccctagttcccagcccccagccctcggtgacacttccccgccccccggttgtcaccccgtctggtgctcgcagaaaatgtcactgtccccattttccccgccgatcccccaccacggccgcactcccgcaccctctccgctgctcttgtgggtggaccccggaaaggtcaggcgtcctggggggcagtgcccctccccggaaagttggggctcccacccccggccgcgctcacatgtccttggcgggaaggttcttcccctccacgatgcggatgtacagcgagctgcgcttggccatcgcggggtcccggctcgggggaagccagacaccggggtccggggtggcgggcggcgggcgctggactgggcgccgcaggtggggcgggccggggaggaggcgggggcgggggcggggcggcgggggcggggcttcgctgccactccactcaccccgcccccgccccacgtgcgggggacactgcgcccgggccggccaatccgcgaccggggttccccagggcggggaggggccggccggggccgcagctctcattggccgtctggggcgtgaggggcggggcctgtgaggaggcgctgacactcgccgggcagccggcgcggtggctcgaggggggcgcccctggaggagcgggtgggggacactgcaacctccacctcccggtttcaagcaattcttctgtctcagcctcccaagtagctgggattgcagacacgcgccaccacgcccagctaatttttgtattttcggtagatacggggtttcaccatgttggccaggctggtcttgaactcctgacctcaggtaatctgcccacctcggcctcccaaagtgctgggaatacaggcatgagccatcgtgcctggctgtttttatgttttttagaatcagaagaaaaaaaatatgtattttttgtattggttggtttgtgtgtgtatgtatgtatgtatgtatgtatgtatgtatgtatgtatgcatgcatttgaaacaggggcttgctctgttggctgaagtgcagtggtgcaatcatagctcactgcagcctcaatctcctgggttcaagcaatcctaccacctcagcctcccatgtagctgggactacagatgcataccaccacgactggctaattttttttatttttagtagaaatgggggggtctcattatgttgcccaggctggtctagaactcctggcctcaagttatcctcctgccttggcctcccaaagggctgggaccacagatgtgagcccaccatgcctagtcaaacaggagtataatagtaatgaatatgtaataatgaatctgacctgactggtatcagtcagtctttatgccaaagcagttgtaaaatacacatttgaatatctttttttttttcttttttttggggtggagtctcgctctatcacccaggctggagtgcagtagcgcaatctcagctcactgcaacctctgcctccctgactcaaggcattctcctgcctcagcctcccgagtagccagagcttcagggacctgccaccacgcctgggtaatttctatatttttagtagagatggagtttcaccaggttggccaggctggcctcaaacacctgacctcaggtgagctgcccacttcggtctcccagagtgttaggattacaggcgtgagccaccgtgcctagccgtatttgaatatcttaacccatataagtcaaacatgcctagggctcacaaaagttacagtgcatcctggcacaggagaggaggcagctcttgagtttcagtgcatgcttttgatattcactataggtcaatgtcgttgaaagaaaaagtgtttgaggctgggcacagcggctcacgcctataatcccagcactttgggaggcttgagatgggaggatcacttgaggccaggagttcaagcccagccagggcaacataatgagacccccccccacctttgctacaaaaaataaaaatattagccaggcatggtagtgtgtgtctgtagttcgagctactcagaaagccgaggcaggaagattgcttgagcctaggaggggaggctgcagtgaggtatgatcgcaccactgcactccagcgtgggcgacagagcaaaactctgtctccaaaaacaaaaacaaaaacgaggccaggcgtggtggctcacacctgtaatcccagcactttgggaggccgaggtgggtggatcacctgcggtcaggagttcgagaccagcctggccaacatggcgaaaccccatatctactaaaaatacaaaaattagccgggcgtggtggcaggcgcctgtaatcccagctactctggaggctgaggcaagagaattgcttgagaacccggg

SEQ ID NO: 586887 - DNA, 4001 bp, Homo sapiens
gtagcccaaatgtgagggactgtttatgggatggtttaagaggcggctgacaggtcagagctgtgtatgcaagccacaggggaagatggggggttgcaaaggagacgtgagtagggcaggcaggggggcagggtgaggatcgagatcccaaggcacccctccactgtagatggaacccctttgcccagaggcaaagcactgagcagggaaccaggcactgggctcccaggtgggcatactccaagagcttggctgccctgggctggagagagcctggagccaggcactagggccagctgctgtggggatgaggagggaggcgacagacggaggggctgctcctcccagctgccaccagccagaagaggccaagatgacctagttcctagtgccagtggtggcagggggtgggggatgcttaaaggctgggcctggaggctgagacccttctcagagctcctctgccttcccagcccacagacctcactgccagctcccactccacctccctccaagcctccaagcacagaaacccacctagggatgcccaccgccctcccttccccattgtcatggtaactgctgagctgggcctcatcagacccagggggcctggaactggcactgctctcggtggtggcgcgctgagcttgctgggaagctcacaggggccaccacacatatgtgtgagcagagtgcctgccccccaccctgctccaccccctcgcccatgctagccacttctctgcatccaggagcccggggcgcccaaggggtggggaactgcagctccgcagactttggactctgtttcctccaggctccacttttccccctcccaccctcctcctccaggcagccagtgccccttgacctttgagctttccccctcttcctctagagggatttcaacccctagtttaaagaggggaaactgaggctctaggagcagggagctgcctaaaccctgtacatgaggaaggtggtggcaagaccaagatggtgggccaggggtcaggcagctcagccctgggacctactgagaagagtggaacaaggggcccctgaaacctccccaaatcgagccagggaccaggggaatccccagatgtcagtgcctgtgagaagccctagactcaagaccctgctctgcctgccacttggagccagcatttcacttctctgaacctcagttttctcatctgtaaaatggaacggtgagaactgcctttcggggtggttgagaggattaacgggatggctcaggtgtaaagcccaaggcacaagcgacagttactaccctccttccctcccccacagtcctgcacctgtcctggcctcctgacctgttctcacttttcatgccagtccctcctacccgagtgcacagcaggaagcccggggacagcccctgggccccagcatgtgcttcaggtgcacactccggggcattaagggctctggaactactgaggaagacccttcctttgcgggggacaccccaccccctccaaccccaccccgggggcagatcaccaagacgtctcccctggcatgtcaccaggctccagctcctgtcgtatcaaagccccttcccctcgtgagccgcggatcgctgacaaattctcgccccctccctagttcccagcccccagccctcggtgacacttccccgccccccggttgtcaccccgtctggtgctcgcagaaaatgtcactgtccccattttccccgccgatcccccaccacggccgcactcccgcaccctctccgctgctcttgtgggtggaccccggaaaggtcaggcgtcctggggggcagtgcccctccccggaaagttggggctcccacccccggccgcgctcacatgtccttggcgggaaggttcttcccctccacgatgcggatgtacagcgagctgcgcttggccatcgcggggtgccggctcgggggaagccagacaccggggtccggggtggcgggcggcgggcgctggactgggcgccgcagggggggcgggccggggaggaggcgggggcgggggcggggcggcgggggcggggcttcgctgccactccactcaccccgcccccgccccacgtgcgggggacactgcgcccgggccggccaatccgcgaccggggttccccagggcggggaggggccggccggggccgcagctctcattggccgtctggggcgtgaggggcggggcctgtgaggaggcgctgacactcgccgggcagccggcgcggtggctcgaggggggcgcccctggaggagcgggtgggggacactgcaacctccacctcccggtttcaagcaattcttctgtctcagcctcccaagtagctgggattgcagacacgcgccaccacgcccagctaatttttgtattttcggtagatacggggtttcaccatgttggccaggctggtcttgaactcctgacctcaggtaatctgcccacctcggcctcccaaagtgctgggaatacaggcatgagccatcgtgcctggctgtttttatgttttttagaatcagaagaaaaaaaatatgtattttttgtattggttggtttgtgtgtgtgtgtgtgtatgtatgtatgtatgtatgtatgtatgtatgtatgtatgcatttgaaacagggtcttgctctgttggctgaagtgcagtggtgcaatcatagctcactgcagcctcaatctcctgggttcaagcaatcctaccacctcagcctcccatgtagctgggactacagatgcataccaccacgactggctaattttttttatttttagtagaaatgggggggtctcattatgttgcccaggctggtctagaactcctggcctcaagttatcctcctgccttggcctcccaaagggctgggaccacagatgtgagcccaccatgcctagtcaaacaggagtataatagtaatgaatatgtaataatgaatctgacctgactggtatcagtcagtctttatgccaaagcagttgtaaaatacacatttgaatatctttttttttttcttttttttggggtggagtctcgctctatcacccaggctggagtgcagtagcgcaatctcagctcactgcaacctctgcctccctgactcaaggcattctcctgcctcagcctcccgagtagccagagcttcagggacctgccaccacgcctgggtaatttctatatttttagtagagatggagtttcaccaggttggccaggctggcctcaaacacctgacctcaggtgagctgcccacttcggtctcccagagtgttaggattacaggcgtgagccaccgtgcctagccgtatttgaatatcttaacccatataagtcaaacatgcctagggctcacaaaagttacagtgcatcctggcacaggagaggaggcagctcttgagtttcagtgcatgcttttgatattcactataggtcaatgtcgttgaaagaaaaagtgtttgaggctgggcacagcggctcacgcctataatcccagcactttgggaggcttgagatcggaggatcacttgaggccaggagttcaagcccagccagggcaacataatgagacccccccccctttgctacaaaaaataaaaatattagccaggcatggtagtgtgtgtctgtagttcgagctactcagaaagccgaggcaggaagattgcttgagcctaggaggggaggctgcagtgaggtatgatcgcaccactgcactccagcgtgggcgacagagcaaaactctgtctccaaaaacaaaaacaaaaacgaggccaggcgtggtggctcacacctgtaatcccagcactttgggaggccgaggtgggtggatcacctgcggtcaggagttcgagaccagcctggccaacatggcgaaaccccatatctactaaaaatacaaaaattagccgggcgtggtggcaggcacctgtaatcccagctactctggaggctgaggcaagagaattgcttgagaacc

SEQ ID NO: 586888 - DNA, 4001 bp, Homo sapiens
gtagcccaaatgtgagggactgtttatgggatggtttaagaggcggctgacaggtcagagctgtgtatgcaagccacaggggaagatggggggttgcaaaggagacgtgagtagggcaggcaggggggcagggtgaggatcgagatcccaaggcacccctccactgtagatggaacccctttgcccagaggcaaagcactgagcagggaaccaggcactgggctcccaggtgggcatactccaagagcttggctgccctgggctggagagagcctggagccaggcactagggccagctgctgtggggatgaggagggaggcgacagacggaggggctgctcctcccagctgccaccagccagaagaggccaagatgacctagttcctagtgccagtggtggcagggggtgggggatgcttaaaggctgggcctggaggctgagacccttctcagagctcctctgccttcccagcccacagacctcactgccagctcccactccacctccctccaagcctccaagcacagaaacccacctagggatgcccaccgccctcccttccccattgtcatggtaactgctgagctgggcctcatcagacccagggggcctggaactggcactgctctcggtggtggcgcgctgagcttgctgggaagctcacaggggccaccacacatatgtgtgagcagagtgcctgccccccaccctgctccaccccctcgcccatgctagccacttctctgcatccaggagcccggggcgcccaaggggtggggaactgcagctccgcagactttggactctgtttcctccaggctccacttttccccctcccaccctcctcctccaggcagccagtgccccttgacctttgagctttccccctcttcctctagagggatttcaacccctagtttaaagaggggaaactgaggctctaggagcagggagctgcctaaaccctgtacatgaggaaggtggtggcaagaccaagatggtgggccaggggtcaggcagctcagccctgggacctactgagaagagtggaacaaggggcccctgaaacctccccaaatcgagccagggaccaggggaatccccagatgtcagtgcctgtgagaagccctagactcaagaccctgctctgcctgccacttggagccagcatttcacttctctgaacctcagttttctcatctgtaaaatggaacggtgagaactgcctttcggggtggttgagaggattaacgggatggctcaggtgtaaagcccaaggcacaagcgacagttactaccctccttccctcccccacagtcctgcacctgtcctggcctcctgacctgttctcacttttcatgccagtccctcctacccgagtgcacagcaggaagcccggggacagcccctgggccccagcatgtgcttcaggtgcacactccggggcattaagggctctggaactactgaggaagacccttcctttgcgggggacaccccaccccctccaaccccaccccgggggcagatcaccaagacgtctcccctggcatgtcaccaggctccagctcctgtcgtatcaaagccccttcccctcgtgagccgcggatcgctgacaaattctcgccccctccctagttcccagcccccagccctcggtgacacttccccgccccccggttgtcaccccgtctggtgctcgcagaaaatgtcactgtccccattttccccgccgatcccccaccacggccgcactcccgcaccctctccgctgctcttgtgggtggaccccggaaaggtcaggcgtcctggggggcagtgcccctccccggaaagttggggctcccacccccggccgcgctcacatgtccttggcgggaaggttcttcccctccacgatgcggatgtacagcgagctgcgcttggccatcgcggggtcccggctcgggggaagccagacaccggggtccggggtggcgggcggcgggcgctggactgggcgccgcaggtggggcgggccggggaggaggcgggggcgggggcggggcggcgggggcggggcttcgctgccactccactcaccccgcccccgccccacgtgcgggggacactgcgcccgggccggccaatccgcgaccggggttccccagggcggggaggggccggccggggccgcagctctcattggccgtctggggcgtgaggggcggggcctgtgaggaggcgctgacactcgccgggcagccggcgcggtggctcgaggggggcgcccctggaggagcgggtgggggacactgcaacctccacctcccggtttcaagcaattcttctgtctcagcctcccaagtagctgggattgcagacacgcgccaccacgcccagctaatttttgtattttcggtagatacggggtttcaccatgttggccaggctggtcttgaactcctgacctcaggtaatctgcccacctcggcctcccaaagtgctgggaatacaggcatgagccatcgtgcctggctgtttttatgttttttagaatcagaagaaaaaaaatatgtattttttgtattggttggtttgtgtgtgtatgtatgtatgtatgtatgtatgtatgtatgtatgtatgcatgcatttgaaacaggggcttgctctgttggctgaagtgcagtggtgcaatcatagctcactgcagcctcaatctcctgggttcaagcaatcctaccacctcagcctcccatgtagctgggactacagatgcataccaccacgactggctaattttttttatttttagtagaaatgggggggtctcattatgttgcccaggctggtctagaactcctggcctcaagttatcctcctgccttggcctcccaaagggctgggaccacagatgtgagcccaccatgcctagtcaaacaggagtataatagtaatgaatatgtaataatgaatctgacctgactggtatcagtcagtctttatgccaaagcagttgtaaaatacacatttgaatatctttttttttttcttttttttggggtggagtctcgctctatcacccaggctggagtgcagtagcgcaatctcagctcactgcaacctctgcctccctgactcaaggcattctcctgcctcagcctcccgagtagccagagcttcagggacctgccaccacgcctgggtaatttctatatttttagtagagatggagtttcaccaggttggccaggctggcctcaaacacctgacctcaggtgagctgcccacttcggtctcccagagtgttaggattacaggcgtgagccaccgtgcctagccgtatttgaatatcttaacccatataagtcaaacatgcctagggctcacaaaagttacagtgcatcctggcacaggagaggaggcagctcttgagtttcagtgcatgcttttgatattcactataggtcaatgtcgttgaaagaaaaagtgtttgaggctgggcacagcggctcacgcctataatcccagcactttgggaggcttgagatgggaggatcacttgaggccaggagttcaagcccagccagggcaacataatgagacccccccccacctttgctacaaaaaataaaaatattagccaggcatggtagtgtgtgtctgtagttcgagctactcagaaagccgaggcaggaagattgcttgagcctaggaggggaggctgcagtgaggtatgatcgcaccactgcactccagcgtgggcgacagagcaaaactctgtctccaaaaacaaaaacaaaaacgaggccaggcgtggtggctcacacctgtaatcccagcactttgggaggccgaggtgggtggatcacctgcggtcaggagttcgagaccagcctggccaacatggcgaaaccccatatctactaaaaatacaaaaattagccgggcgtggtggcaggcgcctgtaatcccagctactctggaggctgaggcaagagaattgcttgagaacccg

SEQ ID NO: 586889 - DNA, 4001 bp, Homo sapiens
tccttggccaatatggcgaaaccccatctctacttaaaaataacaaaaaaattagccaggcatagtgtcacatgcctgtagtcccagctactcaggaggctgaggcacaagaatcctttgaacctgggaggtggaggttgcagtgagccgagaccacactgctgcactccagactgggtgagagacactgtctcaaaaaaaaaaaaaaaaaaaaaaaaaagagagtgaaaaagagtgataggcgaagcatgcacttgtaactttgtaactctaagataatcaggtagtaatcagatgagtgagactctcatgggtaacatgactccttttacaaatagtctgccatcatcaaatacaacctgcaaaaagaaaaaaaaaattcccattatacagctcatgttttttgtggtttgtctgtttgttgagacagggtctcaatctgccacccaggctggagtgcagtggtgcattcacagctcactgcagcctcgacctcctggcctccattgatcctcccacctcagcctcctgagtagctgggaccacaggtgcatcccagcatgcctggctacttttgtattttttgtagagtcagggtctccctatgttgcctaggctggtctctaactcctggtctcaagggatactcttgccttagcccccgcaaagtgctgggattacaggtgtgagccactgcatccggcccgcattttcttattgtctctttaaactgcttaaaatcaaagaagccataggaattgagtatgtgagctctcagaaatgaaatgaatgtgtataaaatatggttttgtttctaaattatctaactgaacttggttattgctgcacctaataatcttctattaagaaaactaggatacgggagaaagaacactggcctgggagataagactcctgagttctactatgagcaactctacccacaaagccagtgacccggtcaagtcacccacctgctaaggcccagtctcttcccctagcaactgaggcagcaagagagaatccctgcagactgttcctgcattactaccagtctccagggcagatctaaggggggaatcagcagacacttaaatgagagaacagaggcgctgacggacgtttagaggaggtcgaaatctggagcacggaaaggaggaggaagggctgttaggggttagcggggagtggagacgacgtccgcagctgaggctggtgacaccctccaggcccccataagcctcgtcctcccagatttcccatgcagcgcctgttcggtgcagccggaccctgccctcaaacccaaacacacgtctctcctgcaagcgatcgagaccctccccctgccccacactctaaggtccccaacacacggtgacttcactcaggcccttctcgctccgggcccgaaaacccaagacctacccttctggggctccgcagcctctgccccacggctcccgagaggccggggcggggctgctgtcgctggcgcgcgtctgctcgcgaggtcccctcctgtccacctcactaaggttgttctgctcccgaggggcccgggccgggcctaaggggcaaatccaggcgggtgtccttcccgggacccagatccgcctccctcgggctcaccgtacagcggcagcctgggccaggccgccaggacacacacgggccaggcccgcgtcccgccgccccttcgcctccgccgccacctccgccacctcccgtccggcccctctggccccagcgccgccggctccggggctcaagctcgggggtccccgctcaagcctccacccggcccgcgcgaaccctggcctgcacacccccgcgcccgcctaggtgctggcccgggcgctcaacctccagccccgcaggctccgcgattctcgtccactggaggccaaagcctgggaactagagcaagcggtgacctgaggacgcacaggaagcgagggcagtgcagcggcggcgcgcatgcgcgaacacgcacacagagagaggtgcacacgcgcaggagtgcaccggaagtcagcctccggggcccacagctggtcccaggacaagcaccctactctatttcccatgagcctacgcgccccccaagtttaggggccgttttaaatgtctctaccctgcctaaaggttaagaagctccaggctatgagctttgggagctctgaacccctgattgaacttcgcatttgtctttactcccttttagggtcaagtccagggctgcctgactgggtcctggagcccaaggcctctgggttagaaccgagtttcccataaagagaaggaaaggaaagggtgtatcgtggtcactgcgctgaaatgctaagagaagtttcactcaaatactaggacaggataaatgcccagcgatgctttccaaggaagagaaagaaaatagaatttgtggctgggcgcggtggctcacgcctataaatcccagcactttgggaggccgaggcgggcggatcgcgaggtcaagagatagagaccatcctggccaacatggtgaaatcccttctctaccaaaaatacaaaaattagctgggagtagtggcgtgtgcctgtaatcccagctactcgggggctgaggcaggagaatagtttgaactcgggaggtggaggttgcagtgagccgagatcgcgcccctggactccagcctggcgacggagcgagactctgtagcttttctagatcacacagcgaatgcctaaaaactgtagagaaatcaggaaatacacagatcgaacgaagaaaagagatacctgtgatctcaccttccccaggaggattatgtttagggttaggttatgttgaccaaaaagactcaaagtctgtcaagagttttattctgggcctcctacttgagtgaccatggctggtgacacagcctcagggggtcctgagaacgtgagcccaaagtggttgggttacagcttggttttatacatcttagggagacagcagttacaggcaaagacataaatcaatacatgagaggtacacattgggtcagcctggaaaggctttcaggtcactagcagattcaaagattggcagttggttcagagttaagcgttggctgaacagttggaaaacgacatgaagaaatgggccattgcggtggctcatgcctgtgatcccagcattttgggagggtgagctgggaggatcccttgaggccaggagttgaaggacagcctgggcaacacagcgagacccccacctctacaaaaaaaaaaattatccaggtgtggtggtgcatgcctgtagtcccagctactcaggaggctgagatgggaggattgcttgagcctgggaagttgaggctacagtgagccatgatggtgccactgcactccagcttgggcaacagagaagaaaagaaagagagaaagagagggaggaaaagagagagaggaaggagggaaggaaggaaaagaaagagggagggaaagaaaagaaaagcttgagttaagataaggggcattgtggaaaccaaggttcttgttatgtagatgaagcctcagaacaggcttcagagagaatagatgataaatatctcttattggatcttaaaaggtgtcagaatctccagaaaagacttcttttctgtaagggaaggagattctctacagaatgcaaatttcccccaaagagatggctttgcaggactattttaaagtgtgtcaaagaaaatatattatgggataaaatactatgatttccttcagggactgctatctgtcatgtgatgctatatcagagtctggatggagttgggtatcttactgatacaaagagcctgttctgtcagtcttatgatctgtattctagtgttaatgttggtcagctgtgcctaaactctgaagggaggagagtatgacaaggcatgtccgaccccctccttcccatcatgacctgaattagtttttcatgtttattttggatcttgctggccgacaggggagtccattcagtcagt

SEQ ID NO: 586890 - DNA, 4001 bp, Homo sapiens
acactcagcctgcaaacactcagaagggcctaaaagagtgatacagggtttcgccatgttggccaggctggtctcgaattctggcctcaagtgatccgccttccttggccaatatggcgaaaccccatctctacttaaaaataacaaaaaaattagccaggcatagtgtcacatgcctgtagtcccagctactcaggaggctgaggcacaagaatcctttgaacctgggaggtggaggttgcagtgagccgagaccacactgctgcactccagactgggtgagagacactgtctcaaaaaaaaaaaaaaaaaaaaaaaaaagagagtgaaaaagagtgataggcgaagcatgcacttgtaactttgtaactctaagataatcaggtagtaatcagatgagtgagactctcatgggtaacatgactccttttacaaatagtctgccatcatcaaatacaacctgcaaaaagaaaaaaaaaattcccattatacagctcatgttttttgtggtttgtctgtttgttgagacagggtctcaatctgccacccaggctggagtgcagtggtgcattcacagctcactgcagcctcgacctcctggcctccattgatcctcccacctcagcctcctgagtagctgggaccacaggtgcatcccagcatgcctggctacttttgtattttttgtagagtcagggtctccctatgttgcctaggctggtctctaactcctggtctcaagggatactcttgccttagcccccgcaaagtgctgggattacaggtgtgagccactgcatccggcccgcattttcttattgtctctttaaactgcttaaaatcaaagaagccataggaattgagtatgtgagctctcagaaatgaaatgaatgtgtataaaatatggttttgtttctaaattatctaactgaacttggttattgctgcacctaataatcttctattaagaaaactaggatacgggagaaagaacactggcctgggagataagactcctgagttctactatgagcaactctacccacaaagccagtgacccggtcaagtcacccacctgctaaggcccagtctcttcccctagcaactgaggcagcaagagagaatccctgcagactgttcctgcattactaccagtctccagggcagatctaaggggggaatcagcagacacttaaatgagagaacagaggcgctgacggacgtttagaggaggtcgaaatctggagcacggaaaggaggaggaagggctgttaggggttagcggggagtggagacgacgtccgcagctgaggctggtgacaccctccaggcccccataagcctcgtcctcccagatttcccatgcagcgcctgttcggtgcagccggaccctgccctcaaacccaaacacacgtctctcctgcaagcgatcgagaccctccccctgccccacactctaaggtccccaacacacggtgacttcactcaggcccttctcgctccgggcccgaaaacccaagacctacccttctggggctccgcagcctctgccccacggctcccgagaggccggggcggggctgctgtcgctggcgcgcgtctgctcgcgaggtcccctcctgtccacctcactaaggttgttctgctcccgaggggcccgggccgggcctaaggggcaaatccaggcgggtgtccttcccgggacccagatccgcctccctcgggctcaccgtacagcggcagcctgggccaggccgccaggacacacacgggccaggcccgcgtcccgccgccccttcgcctccgccgccacctccgccacctcccgtccggcccctctggccccagcgccgccggctccggggctcaagctcgggggtccccgctcaagcctccacccggcccgcgcgaaccctggcctgcacacccccgcgcccgcctaggtgctggcccgggcgctcaacctccagccccgcaggctccgcgattctcgtccactggaggccaaagcctgggaactagagcaagcggtgacctgaggacgcacaggaagcgagggcagtgcagcggcggcgcgcatgcgcgaacacgcacacagagagaggtgcacacgcgcaggagtgcaccggaagtcagcctccggggcccacagctggtcccaggacaagcaccctactctatttcccatgagcctacgcgccccccaagtttaggggccgttttaaatgtctctaccctgcctaaaggttaagaagctccaggctatgagctttgggagctctgaacccctgattgaacttcgcatttgtctttactcccttttagggtcaagtccagggctgcctgactgggtcctggagcccaaggcctctgggttagaaccgagtttcccataaagagaaggaaaggaaagggtgtatcgtggtcactgcgctgaaatgctaagagaagtttcactcaaatactaggacaggataaatgcccagcgatgctttccaaggaagagaaagaaaatagaatttgtggctgggcgcggtggctcacgcctataaatcccagcactttgggaggccgaggcgggcggatcgcgaggtcaagagatagagaccatcctggccaacatggtgaaatcccttctctaccaaaaatacaaaaattagctgggagtagtggcgtgtgcctgtaatcccagctactcgggggctgaggcaggagaatagtttgaactcgggaggtggaggttgcagtgagccgagatcgcgcccctggactccagcctggcgacggagcgagactctgtagcttttctagatcacacagcgaatgcctaaaaactgtagagaaatcaggaaatacacagatcgaacgaagaaaagagatacctgtgatctcaccttccccaggaggattatgtttagggttaggttatgttgaccaaaaagactcaaagtctgtcaagagttttattctgggcctcctacttgagtgaccatggctggtgacacagcctcagggggtcctgagaacgtgagcccaaagtggttgggttacagcttggttttatacatcttagggagacagcagttacaggcaaagacataaatcaatacatgagaggtacacattgggtcagcctggaaaggctttcaggtcactagcagattcaaagattggcagttggttcagagttaagcgttggctgaacagttggaaaacgacatgaagaaatgggccattgcggtggctcatgcctgtgatcccagcattttgggagggtgagctgggaggatcccttgaggccaggagttgaaggacagcctgggcaacacagcgagacccccacctctacaaaaaaaaaaattatccaggtgtggtggtgcatgcctgtagtcccagctactcaggaggctgagatgggaggattgcttgagcctgggaagttgaggctacagtgagccatgatggtgccactgcactccagcttgggcaacagagaagaaaagaaagagagaaagagagggaggaaaagagagagaggaaggagggaaggaaggaaaagaaagagggagggaaagaaaagaaaagcttgagttaagataaggggcattgtggaaaccaaggttcttgttatgtagatgaagcctcagaacaggcttcagagagaatagatgataaatatctcttattggatcttaaaaggtgtcagaatctccagaaaagacttcttttctgtaagggaaggagattctctacagaatgcaaatttcccccaaagagatggctttgcaggactattttaaagtgtgtcaaagaaaatatattatgggataaaatactatgatttccttcagggactgctatctgtcatgtgatgctatatcagagtctggatggagttgggtatcttactgatacaaagagcctgttctgtcagtcttatgatctgtattctagtgttaatgttggtcagctgtgcctaaactctgaagggaggagagtat

SEQ ID NO: 586891 - DNA, 4001 bp, Homo sapiens; identical to SEQ ID NO: 586889

SEQ ID NO: 586892 - DNA, 4001 bp, Homo sapiens
gcctgtaatcccagtgctttgggaggccaaggcaggaggatcatttgaaaccagcctggacaacgtagtgagaccctgtctctacaaaaaatattcaaaaattggccaggcatggtgaagcacgtctgtagtcatagctacttgggaggctgaagtaggaggattgcttgagcccaggagtttaaggttacattgagctgtgatcgcaccactgcactccaactgtcaacagggttgacagagcaagaccctgtttctaaaacacaacaaaacaaactctagtcatgacccactcaagacccactaataggtaataatctgcagtttaataaacattactgtacaggactttcggtccctattttaagtacataagcttttgtcctattctccaacagtctattggcaacacaccagccagagagagaatctttcaaaacgaatgccagatcacacttactgctctctgcttaaaatcagtggcttcctatctctgagtaaaagccaaagtccttgcaatggtctataacatcctacatgaggcgggcggatcacctgaggtctcgagttccagacaaccctggccaacatagcgaaaccccgtctctactaaaaatacaaaaattagccaggtgtagtgacactcgcctgtaatcccagctacttgggaggctgaggcaggagaatgggttgaaccaggaggcagaggttgcagtgagcggagatcgtggcactgcactcccgcctgggcgacagagcaagacgcagtctttaaaaaaaaaaaaaaatcttacatgatctgctactctagatctcatctcctaattctcttccctttactcacttcaatccagtcaccctgtcctccttactactcctccaatataccaaaaacacctctgtttcagtacctttgagcttgctgttttctcttcctgaattgttcttcctccggagaggcatgtgttcactctctcacctcagtccgtccttctctggccaccctatctatattgccactcttcaccccctctccccactatacacatgcacatagacttcctaacccctttccctggcttatttttctccttagcatttgacatcattttcacggttggcttgtttattggctcgtttattggctctcttccccaccttgaagacataaaatcaaagatttttttggtttggtgttgtgcactgctgcatccccaggacctacaacacttcctggcacacagtaggtattaagtatttgctgaataaatgaatgaacaagtggatagcatcctggctaagatgtccaggtctgaggatcaaatcgggggtccactacttaacagccgtacaaacttaaagttactaaattcccctaaatcccggattcctgtctgtaaaatgacattaagactctccatccggtaagattgctgagaaaattaaatgagataacctgtatcaaactgatcactgtacctgccaatcaggtgactctcaataagtcttactgatgctctagttaactattttcatttttagcgcgcataatcaacagaaagcgctatagaaacgtaagggaatgctttgcccttcataaactgactcctatgaacgcatctaaagcagaatcagtttggaaaagaaactcagttccctgtcccttctcttcggggagggtaaagaatgatacggctccctgaagtttgggaaggtgccctcgatcgcaggaaaccccagccctatcctcgaccgccccgcccctacctttttcagtcaccacgaagcactgcttcaccggccccacctgactgaacagttcctccagctgctcactgcgggccgagggcgggaggcggcccacaaataaggtcaggccggccatgagaccgggaaacccaaagcgcgtgaggacgcgagcaaactaggccggcgcacgcgagccgaaacgctggctttggtaggacaaccaagctcacacgccgagagattccggaagtgctcgttgcccaaaagagaccggaggaaaacatggtcgggagggggataaaaggttccggaatgaaaaaataatggcgccccggggcgtagcttctggagcggggctccgccccctgccctagcatcgccctcgccacttttgtgtaaacttggcatcaataatttctaccctagtgttacagcttttttagaatttgcctagcaggctttctggtttttgccggaaggcctccaaaaagtaattttttttcttaatatacaaaataaaaataaataatttctaccctgtttaaaaatctcacctccagatcctccccaaagttagcaggacaggcagaagaagtcgtttttgccccgggcgtaactcaggatctgatatactgtgggtgtttgatattttctgaagtgcctccacaaattcccagattacgtgcataaaacacaaccggaacactaacacgtagacatagatatatcatatacatcattcggacgattctcattttcggagaacaccagctgtctgtcacctcagcctcacaaacaaattgtagctactaaaatacacatagacacagatagtacacaattattatttcaataaatatatactgagctctaactatgagccaagcattagggataaaactggtgagcaaagaaatgacagggtccctgccctcatagagattacagtctaatggtggaaacagatttttttttttgacagggcctcactttatcaaccaggccggagtgcactggcacgatctcggcttactgcagcctcgacctcccaggttcaagcagtcctcctgcctcagcctcctgagtagctggaactacaggtgcaccaccacacccggctaatttttgtattttttgcagagacagggtttcaccatgttgcccaggctggtctcaaactcctgagctcaattagccccccttagcctcctaaagtgctaggattataggtgtgaaccaccacacctggctgggaagactattagtccaaaaattcttacaaataaatcacagcacacacactgcaggaccacatcaaacacactcaaagcaaacataacatccaacttatacacagagacctagaacccatgtcctcctagaaacagaagatctttgtctcaagtcagctcatcagacagacccaaagctgagagctcttaattggctaggaaatctgggtgctcctggttctggaacacagagagtgtttgccatgccactgggctcaggacctgaataggtgcaagagagctacaccttgcagaacaactagctcaaaaaaaagtacccaaggccattttttaaataattttttttttagcagactcttgctctgtcacccaacttggggtgcagtggcaccatcatggctcactgcagccttgatctcctgggctcaagcaatactgccacctcagcctcctgagaagctaggaccacaagtgtgtaccaccatgcctggccaatttatttatttttttgtacagacagttctccctgtgttgcccaggctagtcttgaactcctgggataaaccaatcctcccactacggcctcccaaagtgttgggattataggcgtgagccactgagcccagccaaatcattacttttaaatgatagtaacatggcagatagaaaactcaaaaactttacagttttagtaccttttataaggcactatggtgaaaattaagtttcatgatctcctcaagccccattcactttcaatacattttggatggctagacgactggttgatagtgatgggagtggagattagggggacgctaaacatcacatttatggagctctagttcgaagtaagtaatctatgcttaaaataaaacttcacgattattttttaaaaatacaactcacggccaggagcggccgtgatcccagcactttgggaggccgaggtgggtggatcaccagatcaagggttcgagaccagcctggccaacatgg

SEQ ID NO: 586893 - DNA, 4001 bp, Homo sapiens
aagtcatacagaactcacaaatcttggcaaggagtttggtatgaagagcaaaggaaactttggcacttgtgacaaaatggaaggaaaaactccaaagcatcatgaataaagcctacttattcttctaaaatagcaattctcaaaacttctgacctcaaaattattgaagacccaaaaatgcctgtttatctggattacattcagtgatattactattttagaaatttaaaatgagaaacgtaaaagaatacacaagcatatattccattagccatcagcataacgtcttcacatgttattcagcctctagaaaactccactgtacactactgaaagaaaagagaaaaaatacaaataacaccttagtctttctaatgaaaagagtgttcacccaagagttcccaggttacactgggaatgctataaaacaagtaattctgacccccagaaagataggtgaactatacattttaaaattttaattagtctcagatgtaacacgcaaacatcatgtatttaaactgaaagaaaagtggcatatagcaaaccaaattgccagaagcgacattcctacacttagtcttttttgtttttccattttgtcaggcaaacgttttgacagttgggccaaaattcctaaacaggatgataacaacgtaaccatctgctagcatttactaaaaaatacttctcgagtatacactagactggcttttcaacgtttcaatggtaagaactaatcccaaatgcttttgttatccatattttaccatcttttcaaagttttcaaaataatcacttaaaaagtcactttcaagtatctctccacgtttttaaaacccccagtgatatgtaattttacctgaaagtaatttacctacaattttttagagataggtgtttcatcaatactgtttatgcttgcaaacaagaaaaactatccaaaggaactgactcagtatctaaaccttttgtgtcacgttttcacttttggaagacgcacataaaacactaacaggttattagacaacaaataagttaatttaaaacagggatttattgagactttctcaagaaatctcactttccaaactggcctactgtcgcacattccttcacacaggtgaatcttttcgttatgtttttgtaatgggcttcaaatcaatctaaatctgtcaggatggccccacaatcttaaacacccaccctacagcgacctgccccgctctccctaagtgacactgtctcggggggtggggggggcgctctcctacccataggacaccaggccggcttcggcacttaatgcccgccaacgccagagatgggcctgacacttaggcagccttgcaaagtagaggacacacagaagttcacaggtaagtacgatctgcacagcggagaggaggagcgagaaagggagaatgacaatagcgagggaaggcgagggagaaaacggaataggccgaacacaaagagagtcggagccggggagagcctcgtcctctcctaagcggggaggccccccggcctacacccccgcccaccgcggcgcggtcctggcccccagagtccggctgcctcacgtacctccggcgcctgctcctccgctcgctcccagggcggccgccatggcactcgcggggcccggccttcagcctcccccaccaagccagctggtgggccgacgtgcctggtccgggcccgggtacgggtgacggaggacagagaagggagggggctgcaggaggcagaggcgaagccgggcgcttcgcggtccacagctggcccttcgcctccgcaggaagaaaacaacaaactaccgcaacatggccgcgcgcccgcgcccgccgcggtgcaccctgggatgatggaggccgggaggcgggcgggcgccggggcctgcccccgccgaggccgcagcagccctgaggccgccgccgtgtttcgggcggtgggcgtgcaacgcaaacacgcggcagtcacctccgcccggctcctgaaacccaaatgtttgaagcagggcggggacgactgctggccataggtcgattccgggttcagtcgtaaggcgctttgcagcagtcggcaaagcgaagctttacggcagcccgtctcccgttaggagccggggaggcaaggtccagcgtacggtccgggggaaccttaactgtcgtttctgtgcctggacagtaggttggagagtggggtctgaatgagctacagtagtgaacgccgacggcttgtgttgagggcaggaaagggtgcacacagctccggcaggtgcttccgcgaggtgagatgagtgccgcgcgcgccgggctaacgtgcacgcgcactcgtgcggcgcccgcgagccctcacttcctacaacccgagaccctccggacccgcgaccccggacccccgtccccttctccgcgcccggctgggcagcgggcagcgccggaccctgatgggctctcggcccttactgcccctgcgccttgcggccctgagaacaagacgtgagcaggacggatagcgcccggcactcatgtctgagtttgcattttgagcagtgagaaaggttaagaaacgaaatcctcatacttgacataaaggaaagggtgctgggtggtcagacagctgtggacgaaagggctcaggggttttggggtgtggggcccgggaaggcgcatctgagtggtcgcagtcggggaagggggttgattaagtacacaccggctgtaaacattgattccatatcggtcaatgtggggcttaggtgaggcgttctgacccagcaatgaaactggaaaggtaggcaggggccaggattccggactttgggacgtttttctgagtctatggggtctattgaaagattttagaaacaatttacatggtaagatttgtattttagaaaggtgactgatacaacaacgtagaggaccctgcaatgtggagaggcatgaaactggaggtccagtgccgtgagttaacaatcaagacgtccatacaggagatgcattggtggatgggtgaagagatgataaaacggtacgtataataaaatgctggccgggcgcggtggctcacgcctgtaatcccaccactttgggaggctgaggtgggtggatcacgaggtcaggagtttgagaccagcctgaccaacatggtgaaaccccgtctctactaaaaatacaaaaattagttgggcgtggtggcacgcgcctgtaatcccagctactcaggaggctgaggcaggagaattgcttgaatcgaggaggcggaggttgcagtgagccgagattgcgccacggcaatccagcctgggtgacagagcgagattctgtctcaaaaaaaaacaaaaaaattattcaactgtgagaactcactccccaaaaaaaatgttttgcaagcaactcattgaaaaatggtctctattaaaaagcacgttaatacatccatatttaaatggcttgaactctttatcacctttcattattttttgaactgtggaggatggcatgcctaactcagaaaatatttttcaggataattcagtggtgatcttcagaagaattccacaaaaaaccaaattaacagatgaaacaatctcataagccacttgaaactgaatttctctagaacaagagtctataaaattttttgatcaaacacccactggaaaaattttttagcgtggacacccagtatttgaagttcttggtaaattactgtgagtaaagatttaaccaaccccttgtccttatctatgaacaaacttcactttgtgttaactttaacttgtcatagaaaccttatgaaggcagagtgttcattgtggtataaaacaacattggttgtaggccaggcgcggtggctcacgcctgtaatcccaacactttgggaggccaagacaggtggatcacctgaggtcaggagttcaagaccagcctggcccacatggcaaaaccccatccctactaaaaatacaaaaattagctgggtgtggt

SEQ ID NO: 586894 - DNA, 4001 bp, Homo sapiens
ggctggagtgcaatggcatgatcttggctcactgcaacctccactttctgggttcaagtgatacttgtgcctcagcctccccaggagctgggattaaaggtttgcaccaacacagccggctaatttttgtatttagtagagtgagggtttcaccatgttggccagactggtcttgaactcctgacctcaggtgatccacctacctcgacctcccaaagtgctgggattacaggtgtgagccacgtgcctggcgtcaaaccagaatttttttttttttttgagacagagccttgctctgtcatctaggctggagggcagtggcatgatctctgctcactgcaatctccacctcccaggttcaagcaattcccatgcctcagccacctgagtagctgggactacaggtccgcaccaccacacccggctaatttttgtatttttagtagaggaggggtttccatcatgttggccaggcttgtcttgaacccctgacctcaagtgatctgcctgcctcggtctcccaaagtgctgggattacaggcgtgagtcaccacgcccaggcttcaaacccaaattttttttttttttttttttttgaggcagagcttccctcttgttgccctgtctggagtgcaatggcgcaatctcggctcactgcaacctctgcctcccggtttcaagcgattctcctgcctcagcctcccgagtagctgggattacaggcctgcgccactagacccagctaattttgtatttttagtagagaggggggtttcaccatgttggccaggctggtctcaaactcctgacctcgtgatccgcccacctcggtctcccagagtgctgggattgcaggcgtgagccaccgtgcctggccaaacccaacttctactctaccaagctacaggacattaaattgttaagcatgggaatgatgtgatggatacagtgtttcagtaaagttaacttttaaaaaggctggaggaagatatgctagattacgttttggggtaattcagttatgaatgagggaaacttggggccaaaatgacagaaatatgaatggaagaaatgaggaaatgagtcatttcttaacttgcacattaccttgcactttgtaagttcataaatttaataagataaacttcagtaaagtcttctgctgggtattcatctagagcattgtactgttcaattgcaccatataaagcgaatcgctcaactaattccttcatgactcccacagcaggaactccttgtattaataagtactgagattccaaattgattgtatatacctgaaagaaatgcagagttattaaacgtatttcgcaaataagcctaggacgaatctgcctctatttttttttaaagagaactttgaaaacaagaaataatctgttcaacccagtcagcaaaagaacacaaaatgaaatttctgccattccttctgcataaagaataacagtccatgtgagaggctacctaaggcatataacagactaccttcagtcgacatttttttccagaaattgagtcggtagaagtcactgggaacaatcactcaacgaatattcactgagtgcttacctgtgccaagtagtactgtaaacacagaagatccaatgactaaaaccaaggcctattctcgtggagttgatgttctaatacttgaccaaaggcgtcgtgagaatctttggtaactgaccgagggttcttcacgccagctctaacgagagacagatctgacggaagccttgtcgtgcctttatttccgtaggctggtcatatggcgctagcactcacataaagctaccgaggagagcgaatgaaaccaaaatcactttaccttcacagcacgaggccgtcgtccctctcgatatttggcccgtgtgtcgcataccgccctctggacgtggtgatcaaataaactccctagctccccgccgctcgacgccatcttgcctactttgatcctcgcagggaggacaacatccgccctactgagctcccttttatccaataagagagcgggatgagttaaggagtgccaggattggctggagaatcgacagcgtcggccatcgtttcctgcgtgcgaagatttgatgaacgaggtgccgcccccgagcggctcggcggagaggcgcggtgggtgacagaagctttcttgtcccacccactacaggcttacggcaggatgcgcagcggggagagggggcggggccgcagggggcggggccgatcgatctcctccggctccgacgtcctcggcctgccgggtcccgggtcctttgcggcgctagggtgggcgaacccagagcgacgctccgggacgatgtggggcagcgatcgcctggcgggtgctgggggaggcggggcggcagtgactgtggccttcaccaacgctcgcgactgcttcctccacctgccgcggcgtctcgtggcccagctgcatctgctgcaggtaacctgccggccccgagccacctgatcttcagcctggggtcggacgaggccgaagcctctcagggacgcggcgggacaccggctgccacccgggcgccgccgaagcgcgcagagatcagggtccctcgacggcagggcccttctgggtagtctctggatcccacaagtccagtgcagccctgggctcgtcttatcccaggtcttttcacttggtgaaactgaacctagaaacgtcctaatattctaccactgtttttataaatattccttattccaggctggaaaagctcctgagaagtggtttgtttttattattttaaaaggtgttttccttgccagccatttccagttaacctgcgctgctgccgtccgggccgcgagagcgggacgcagagttgttggcggagcccctgtcggttcccggggactaagcaccgcgtcccatgagcgggaaaggttaatacaatgatggttctgccctgcgtcgctgacgcggaacacagctgtagtgtgttaggaacacataacgtagttaagatcacttgaagctctgcgatcagtcgcccttctggacgttgtggttaggatgtttcacagttctaaccactggtggagatacagcgtccatattttcataattaaaaatagaggcacatggtctcacgagtttgagtgtacttatgggggcaaaaggacggcgtatttgaaatcctcataaatcctggatgcatggtacccaccagtggctaatctatgcaatgaatagagtttgcaataatttcaagcatcccttctttccacttgagttacttccccatacctaggggaagatatttttggtccactgaaaacatgagttcagcagaatcctcctatcatcgtcgttattattttttaccactaagtagacaatcttttggtttttgatgggctttatggctagagacaaatcagtcactgtcaccaagttccaggtagaagttggttcagtgctctgtcagcttcgatgggatttttcaacatgttttcaaatctgcacttaatagtaggaatgctttcttacagtaactctaatttgatcctaagatgtagttgttaccttacattcatcactgtttaagaatttagtggtcttgatctttgttttaaattttgagccttcgggaagtacttataagaattaattcatgcatatctttttgaaatgtaaatgtctttagccctggaacaaattgctgtttctgttcagcccatattagcagaataggtcaactttactttctaattatcaatgtaataagtttattactttatagattccataaatctatacatttattcctcgatgaattatataaatttatagaatttatgttttatagaaaatttggaaagcatggaaaattattaacaagaaaataagttacccataatcccagaacttagaggtgactaatgttgacagtttggatcaaatcttccagttttgtttctaatctttatttttaacataaatgaggtcctgtatacac

SEQ ID NO: 586895 - DNA, 4001 bp, Homo sapiens
cacatggtcttccatcataacctgacagtcacgcctttgagaccagcctcactcacttacccaccgttctcactgagagatcataccgggcaagaacttttgctaagagtcgcacggagcagcaggctgtcaatcaggctttgggttaggtctggttgccatcacagtagctgctccttccacttaaagattctcattatctcagaaaagcactagattgttcttgggaagagggcgtagtaagcacttttatctaaaaagggactagttacagaacattaattttccaaaattatttctaaaattccaccaaattaaacttctgctttacagacaaggctgccaccatgccacaaggaagttgtaaaagcactgtttaaaacctctaggagacgtttatttaggctaaatattttataatagatatcaaggtttttttaaaaacagaaaaatcttaaggattcttacaatttttaaatgcttgtctatcttaagtgctagcaccccgtagattatctcccgccatgccaatgattgttagcctattagagatagaaactattaacaggagcctactggacaatggtttctatttggttgggtataaatattttggggttgaaattctaattaaatagtgcctgtcgctgcttaaaagctctataggcatgaaatgttcagaagtcccagaagaaatacagaaaagagacattttttatttttccacatactcgatgtactagcttaaaatacatgtactacataatattatatttcttggagctaaattttatttcttctgtaatgtttatttttgatgcagggctgcataatgattccatttttaagatacctctaaattataagggattccagcctctacctggaaattaaagctgtgcagataaaatacaaagtcattaataaacatcacaaagataattctaacaagaagcaccatgtaaaagtaaggcaggaatcagaaaaatcatcaattactgacatattaaatcacactttcaaaagaatagggagctggaagcagccgctccctttcaggagggctgtatgacactgaatgaaatgccagggactcctggctggtgagcagcgggaactttgcggtcgagcggcgcggggcagccacagacctgggcgcttcaatctgtcaccagcctgcccgcaaagcccagcgacagcccccaacgcccccccggggacccatctggggggaccgggagcaggacaaaggtctgaaatccaagtcctaggagtaaagaaacaaaatgcgcaggttcaatttaaagtgcctgcggtaagtacggggagtgagggggaaagacaccggcctccaagaattctcaggcgtttagcacaagcaccagctcattaccaggagatgcgttcggggagtggggacatggagaatgaatcccaacttgtgactccattctccactaactttattctcgctccctggaccaagcgcatcgctggggccagggttgtcatggttcttgtttccaaggccccttggaagaaggaaagggatgagaaaggtgcgctggcgggcgcacccggcggcggcgagcgcggaggtgctgcggtacctaccatggtattcttgtcccggaacgtagtaggtggggttgcccgcaatatgcagggaaatgagcacctcgccctgctccccatccccttccagctccccgtggtgggtgcacaggaaaaagaagggcgaaaagcgggggtaatagccagccgccgcgcgcgccctcagcgtcgcccccagcaacagcgctaggaggaaagtctgccgggcccagccactgcgctccatgccgccgccgccgccgccgccgccgcgcgccctacgcgccgctcgctcattcagttttggagacgccgggacggaggagccacgcggagagaaggcgagaagaaggcggacgggagcggaacgggctcgggagcgggcctgggagcgggcccccgccgagaagttccgcgggagacggcggctcccaaagttactttgggccgcgggagcgcgggaccggggctgcgggcgccgagagcgcgtcgtctgccgcctccgtgcgccgccgccgcctctgcgcgacgcccctcggccaggcctgggaaagcgcccgccccgctccacaccttcttaaagccccgggcgccgcgtcccccccgccgccgccacacgtgtcccggccgctcccccgcccccgcgcgccgccccgcccgccccccgccctctcgggctggctcggcggcacctcgcgcggcgaggggcgcacgcgtccccggagtccccggccagcgcccggttcgcacccgggaggacagggaggggcgcccgccggggagcgggacggggacgctgtcgaggaccgctgagcccgcgactcttctgcgagggacgtcaaagccccgcagagggcacctcccgtccagctgtctgaaggggaaggccagcccctttggccgtcagtgtgccctgtttttcctgggaggatgcgtgagggaaggagaggggcggcagggacggccgctggcgccggtttctttgtctgagccggctgcgtcccgcgcccctcggggctcgcagtctgccagtccgggcggcccgcactcgttctgggaatccgcccgaggccgcgaaccgctaggggccctcgcgctcccttcccacccaggccccctgtccctcccgccgcggccgcccggcccctcgcggcagcgacagagcctcatctgtagaggattttaaaatgagattaagcgaaagtggaattggcagactcgagtggtgcctggaaatggtgatttgtgctgctcggttgtggggaattgtaaggcaggaagggctggcggagctaagatccgacaggctctcttcgccggactgttctgttattcattgcttctgggctcttcaggcagagatgggtgttgtaattttttaaatcagtgtttatttcctttaaatgtcggttatgaccaatggccctgaaatcgggggagggaaaaacgttcaggggagatgctggcagcggtgattgaagcgggtggtaatgagcggctgcacatgaactgcagggaagtgaaataatccataagcacgtttttaaccgaggacggctggcaggagccctgcggcatccggagatgggggagcggggttgccaggttttaatgcctctccccacccacccttggcttgccaccaagccagataaacccgcacgtacagaaatgagtagattataaaattggaagggatagtgcctttgcctgcatttgtggggcgaggggcggtgaaaatcagggtccaaggggagacctctgtaatcacttcgttgcaaaaggaagaaattgtttttcttcctcttactgagaccgaatgacaggtagaaagggcccatttctagctggcttcttgtttcccttacttcaaaatccccagaggcttaactgccatataaataatatacagtgtatacatatatgtatgtgcatatatatatatatgatgtggtaacaattgctacactgtagctctgcggggtgcaggctgtggggctagacgtactttagctttttaatcctaacaccaactggagaggcaaaaaatatccctatttcacaagggaggaggcactcagaaatgttgataacttgcccaaagtcagtgacaaaggctggatgcagggcagactggctggcctcagaggctcttgtcctgcactgccctgccacagtcgacagccctagctggagcaggtggtgttgccccaaacagaattaggagatactcgcccacagctaacaaggctgttactgccttcctgtccagtcatgtgaatatagccaaagacaaaattaatcacttgtagaaagaatccaaaactatttaatgtttttggcttacacttttaaaatgtttagttactatgcactgagcaccgtcctaagtactatacatactaact

SEQ ID NO: 586896 - DNA, 4001 bp, Homo sapiens
tgagaagctggacaaacagacactgagctccctgtttaacagatgaagcaactgtgagacatcaaagatgacgagacctgcccaaggtgacacagtaagccaacagcagaatcaagactagggaacaggtctttaaactcccaggccagtgttctttcctctaaagcgcctgggtttgcaaagatctcagagaaaaaggtgtctatagcttttcattcctagccccacaggggaggcactttcagcatcactaactgcagtctccgtaggaggctggaggacaagtgagaacagcccttctcggggaacaggagcagagccctgggtgctactcccggcagtctaacgccagaccaccgcctgcccagactgtgcccccattctgcccgcctgccctcttccacccacacaaattaggacattgcaggaaggaaggctctccctgaatccaaggaacacccacagcctgctgccctcggggcctgatcaccggctctgcctccctcggggtgctggagattactggggcaatagaaggggagggaagatgagactgcaatctcagtcccctgcccggtcctgccccaacctcgccaggggctgccccatgttcagctcttccacagctcaggggagcccagattcctgcacaggagcctcctccgcggaaggaggaaggaagcagttaggctcctaagggcccttctgtgcctgctcacaagctccagacacatccttctaaattccctagagcgcactctctcttctcagggaacacaaaggtcactcattcccagtgtcagactgtgcacagggaagaccccaggatatgagaaagggccatttccttccgccgggatggggacgcccgtgcacccctgttgtggcgtggtttgggagcacagcaaaggccagactctaccctggagactgcagagctggggatgaggctttttccagctcctcttggggatgttcctggggatacttccgcggctgcagcgcctgcttcggcccacactccggtagcccccaggtgttagagaaaactgcagtaataaagacacccctatccccatggcagagctcagacctctgactgcagagaggccagccttacctgtggggagggaagagaaaacagaagtgaggctctgagctcctctagggcagtcagctttgtgtcctcaccagccacaacccctccccccacaaagccacacgcaccagccataagccccacatcctgcctggcagagtgaccttaatggacattggattaataaatgaatgtgccccttcaacaaggaagcacactgctgtctttcggggtcactttcttccctggtaaggtcacggaacgaattctccattctgtggccagagtctgggctttccctgatggccaaaggccggcctatggcaggaactctggaatccctgctggctccccttcccccagcctcctcccgacaggaattccaggcctatttcccatggggctgcgcagggccagctggtgtgaccacgactccgtcagaatccccttccgcatcgcggctggccgcgggtggcagaagccccacaccgcccttttgtactgatgcgtgtcctccgtccacgctcccgggcacacgggtcccgttcttgcgagtgagccatttcgggtcccacgcacggcgcagctcgcggagcctgtgcgcaggtgcgctcccccacccccgcagatccagcagcgtccccccccgcgcactcacacacggtcgcgcacactcacggtcacgcgccccgcaggtggagcggccccccgcgggcccgcggtggccccgcgcccctgccccggccgtacctctgcggcgggctgtgcagggacgcggcgcccgtccatggagcccgaaggccggcctccgcggcccactctcgctccccgccccgccgcggcgacagcggcaggttcgagttcacaactgccaggcccgtccccaacctccccccgccgggttcccagcgccacgtgactacaggagctgccgagggtcagtcgccggctcccgcggccgcggcctgggggcggggagggactgccggggccggggcgcgggcgcccccgccaagagcgggccgggtcactcaagccactgccgcgccagggcggcaggcctcggagggtcggactccgttgccatggcgaccaccagcccgggtttctctgggactggccggagctcaagtttcccgaccctttgtccctgcggagcacgcgcgtccccgggcgaccgcgtggctggcctatggtcaccggggtgttcggccttagctgccttatgagaggctgggagcccgtcgggagacttcaaagagggctccggcaagcccccggagcgtcgttgcccgggcctttctcaggccgcgcaccccggccgcagtgcggacgcttgcggccgcggcggtcccgggacggcggtggcgcacctggaaggccctagcttccgatttgttccaaagtggagcacaaaaaggcccgatcctgcgaactttgaaaaggcctctcttcactcttttctagaaattaagaaagagcagaagttgctgggcttcctctggctgcgggccaagcgtggggcgacggccgaggtggccgttggcgcacgtggggcatttcgcttggaaaggctcagcagcctgtgtggcgtctgcggtggcaggtgcgagcctgtgcccatgactcacccactagcaggtggccctggctttccaaactaaacacttcctggggtttccagggtagtacaatttcatgtactttcatgcttttcaacacaggcaatttttgaattgtataattagtcgtaaaaatactttttaaatctattgcataaataggaaataggggaacataaaactcagttttacctcgtagagtcaattacatttaatattttggtatgttgcctccggtgttttctctacgtatatccatggcatgtctggcataattggaataatgccttgcgaagatgtattctgccttcttcacttaacacgatcttgtgaattttcttccattttattagatattcttttaaacatgattatttatggctgtataaaaggaatatattttttaaatgttttctaaattatcttccaggaaaacgtattagttttccctgagaaatgcccattttccatatacttgacaacacagacttttttaaaaaaaaaatttagtttgaaatggttatttctcatcttttgtacttgcatttcttagagtactagttagctggattgttttttcacatggttattttttgccagttttattttctcttgtgaatttgtttatgtccatttgcccacttttctatttgcccattttaaaagttggggagttggtttattgtttggggggcactcataaagtacaggtattaaagacttgtcatgtttgttgcagacgtgtttcctcgtacttgttaactttttttttttttttttttgagacagggtttcactctgtcaccagagctggagtgcagtagcactatcatggctcactgaagccaggacttcctgagctcaagcaatcctcccacctcggcctctgagtagctgggactacaggatcacatcaccacatccagctaattattttattttaatgtttttcttctgtagagatggggtctcactgtgttgcccaggctggtctcaaacgatcctcccgccccagcctcccaaagtgttgggattacagatgtgaaccactgcatccggcctaccttttcagttgttgatgtgagaaagttttgctttagtctatgtgctgctgaagcgagcataagaaagttttgttttatttttattttattatttatttatttatttatttatttatttatttatttattttgagatggagtctggcttgtctcccaggctggagtgtagagggaggtgtgatctcggttcactgcaagctccgtctcataggttct

SEQ ID NO: 586897 - DNA, 4001 bp, Homo sapiens
cagctggaggccggcgtccctgcgcttggaagtgggttccctggccaccggggttgacctctctcgctagcagggcccacccagctcactccccgcgtcttccatcccctctaggattcccattgtcccctactccagcactaggcaggcacccccagcccactgcgactcccaccacgaaggaccccagccctctctcagccaacacggccccgcccaccgtctcagacatcgtgcttcttctggtgggccaggagtctctcctcgtcgtcgaaggtctggccacagatggcacagcagaaggcgccgtcccggatgtggctcttgcggtgggtgatgaggttggacttctggctgaagctgcggtcgcagtcgggacaggcgtagggccgctcgcccgtgtggatgcgccggtgcgacaccaggttggacttctggctgaaggctttgccgcagtcggggcagacgtagggcttctcgccggtgtggatgcgccggtgcgccgccaggtagggtttgtggcggaaggccttgccgcagtcgggacacacgaagggccgatcgggggcgtggtcgcgccgatgcgccgccagatggctgccctgggagaagcggcggccgcactcctcgcaggcgaagggccgctcgccggagtgcacgcgcgagtgcgccaccaggtgcgtcttcttgccgaagttcttcccgcactcggcgcaggtgaagggccgctccccggtgtgctgccgctggtgggcccgcaggaagcgctccagccggaagctcctgccgcagtcgtcgcagctgtagagggaggggggggcttcgatcgggtcctgcgggtgctctggcggggcccctggcggcggctcctgggccggtttcagaggtaccgccggggtgggctcggccgcggactcctgggggccggctggcagctgggggctccccgggccgggggcggcctgggccgacccctcggatcgcttgtgaatcttgctgtgagacagcaggttgggtttgtgccggaagcggcggccgcactctttgcacgggtagggcttctcgccggtgtggatgcgccggtgcgaagtcagatagggcttattggtaaagcgcttcccgcactcggggcactggtggggccgctcgcccgtgtgcacgcggcggtgagcgatcaagttgggcttgtgccggaagcgcttgccacaacaggcacactggaaggggcggtcgacggcatctccaccgggccggggggcggtcaccgcggggcggcccctgggccggggccccagagccttggctgcggcctcctccagggcctcagctacgtgcacccgcttgtgggcaactagctggtcccactgggcaaagctccggccacagttgccgcatatgaagggccgggcctccggggcgggagggtggcaccgccgcagatgagctcgaagctgctttcgtcgccagaagcgtctctcgcatttgggacaagcgatgggccgctttgcagctgaatgggcccgcagatgcagaaccagggccacccagcctcggaagctctgcccacagaggtggcaggcaaagcccaggtctggggtggcagcagcatggacctggcggtgcagtgctaagaagggggcatggcgaaagcgacggccacactcagggcagggcaagggcagccgggcctggcaccggcgggtgtgaagccacagagccacccagccagggaagtgccttcgacagtgggcacagcgatgggccctgcctggggcttgggcaccagactgggccactgacgtgccttgttgcctcagcccgcgggactccttccccagggtctggggtgactcctgggagggcccagaaaggagtcggggctgggccaggcccatggccagggggcccctgcaacgacgttccagcatcggttcttcctctgctgagggtggaaaagcacagtcactccagagaccaactcactctgcccctgtttctcccctcccaacctcagccccggacaggagctgccatctatgaacccctagagccccggacatggagctagactactctcctgtttccttgtgtggtatgtattatttcaatcttgggtttttagataacatttcaaggatgtttgtcttatgtctttgttgccctggaaacttccagaagggagggactctgatactagaatccccctcatggcagctaccccagtgtcagacagggagtaaatgctccagtgctgaatgcacaaacattcctgccacaggactcaccagaaaatgtggccactgctccctacagtgccttatgctgccctctccctgtgtctgctgtttcctatgccacatccgagctgcacagcaactctgagaagctggacaaacagacactgagctccctgtttaacagatgaagcaactgtgagacatcaaagatgacgagacctgcccaaggtgacacagtaagccaacagcagaatcaagactagggaacaggtctttaaactcccaggccagtgttctttcctctaaagcgcctgggtttgcaaagatctcagagaaaaaggtgtctatagcttttcattcctagccccacaggggaggcactttcagcatcactaactgcagtctccgtaggaggctggaggacaagtgagaacagcccttctcggggaacaggagcagagccctgggtgctactcccggcagtctaacgccagaccaccgcctgcccagactgtgcccccattctgcccgcctgccctcttccacccacacaaattaggacattgcaggaaggaaggctctccctgaatccaaggaacacccacagcctgctgccctcggggcctgatcaccggctctgcctccctcggggtgctggagattactggggcaatagaaggggagggaagatgagactgcaatctcagtcccctgcccggtcctgccccaacctcgccaggggctgccccatgttcagctcttccacagctcaggggagcccagattcctgcacaggagcctcctccgcggaaggaggaaggaagcagttaggctcctaagggcccttctgtgcctgctcacaagctccagacacatccttctaaattccctagagcgcactctctcttctcagggaacacaaaggtcactcattcccagtgtcagactgtgcacagggaagaccccaggatatgagaaagggccatttccttccgccgggatggggacgcccgtgcacccctgttgtggcgtggtttgggagcacagcaaaggccagactctaccctggagactgcagagctggggatgaggctttttccagctcctcttggggatgttcctggggatacttccgcggctgcagcgcctgcttcggcccacactccggtagcccccaggtgttagagaaaactgcagtaataaagacacccctatccccatggcagagctcagacctctgactgcagagaggccagccttacctgtggggagggaagagaaaacagaagtgaggctctgagctcctctagggcagtcagctttgtgtcctcaccagccacaacccctccccccacaaagccacacgcaccagccataagccccacatcctgcctggcagagtgaccttaatggacattggattaataaatgaatgtgccccttcaacaaggaagcacactgctgtctttcggggtcactttcttccctggtaaggtcacggaacgaattctccattctgtggccagagtctgggctttccctgatggccaaaggccggcctatggcaggaactctggaatccctgctggctccccttcccccagcctcctcccgacaggaattccaggcctatttcccatggggctgcgcagggccagctggtgtgaccacgactccgtcagaatccccttccgcatcgcggctggccgcgggtggcagaagccccacaccgcccttttgtactgatgcgtgtcctccgtccac

SEQ ID NO: 586898 - DNA, 4001 bp, Homo sapiens
gacaatttcattcagctttactggcctatatttttcaaccctgttaagaaaatgcataaaaatgctgacatggttatcttcacactaccccacaaaaagcacctaagggttatcctgagagctttgttaaaaaattacatacattcagtacaactatgccaaatggttgcaagttttaaatgtaataagatgacagccaggcgcagtggctcacacctgtaatcctagcactttgtgaggctgaggcgggtggatcaattgaggtcaggagtttgagcccagtctggccaacatggtgaaacctcatctctacttaaaatacaaaaattagctggatgtggtggtgtgcgtctgtaatcccagctacttgggaggctaaggcacagtagctcgaacctgggaggcagaagttgcagtgagctgagatcatgcatgccactatactccagcccgggctacagagtgagactctgtttcaaaaataaataataaataaataaaatgtaataagatgcccaagtgccatttgaaaagttaaaggcatgagaattgtacagcataggcttcaaacctgccacagcagagaaacacctgttgctgctggagcacggccagcacaggtcatctggagcaatgtgacactgtgctgcaaccctgtccgcccgtcacaagaggcccagcacatacagcactgacatcatttggtgtgacaacatgggtgcaaccaagctcctttctcatcccttacctgccagtttcttttcttttttttttttttggagacagagttttgctcttgttgcccaggctggagtgcaatggtgcgatcttgggtcactaccaacctcaggtgatctgcccacctcagcctcccaaagtgctgggattactggcgtgagccaccatgccaggcaaggattacctgccagtttctgcagacgtgtgccaaatacacagcatagctggctagacaccgtaggcctaggctgggtacagtggctcatgcctgtaatcccagcactttgggaaggcgaggcggacggatcacttgagatcaggacttcgagaccagcctggccaacatggtgaaacccagcctctactaaaaacacaaaattagcagggtgtgatggtacatgcctgtaatcccagctactaggaaggctgaggcagaattgattgaaccagggagatgcaggttgtagtgagcagaaatcacaccactgcactccagcctgtgtgacaaagtgtgactccatctaaaaaaaaaaaattaactgggcatggtggtgcgtgcctgtagtcccatctacttaggaggctgaggcagggggatcacttgagccaaggagctggacatcagcctgggcaacacagcaaaacccccgtcttgatttttttaaaaaaatttcaaatgtaaatgttattgaacctaacagtcaaaatattattttcaacatgtaatcgatattttttttaaaagattgaagtttttgaaaacactaggtcatacactactatacacaaaaacttttgaaaaaaccaactaggtcagagtaggtggccacccggggtagccctaattgtcataagcattgtagtgagcgagactccgctcgcagagtttagaccggccactctcgatccatgtccgtcgccttcttgaaatcatctcgatgccacccggggcctcctcctccctcgggattccccaaaacgagcccctgacccccgagtttctccggagcacggcccgccactcgcccaccctcacgtccaaacgcgcccattctttacggcctgggacctcaccacggcagttcgtagtggccggcgctgccgggggccttgctgaaggcaggggcagggtcagagtcctgggcctccacctcgcccgcgccaccacagacggcctccacctccattctcgcgcctcctcttcccgccacccgaggcaccgccccttgacgccgccacgcaagccccgccccctggcttccgccgggcgcgagcggaagttacgtacccgcgcctctctgtgcctgcgaagagggttccggtggtgccctggcggccatcgctggaggccgcggttgctatgggagacctggcgcccggcctgggagcgacaggaaggcgagctgtggccgcgacgccttccgagaaagcaggtcgctctcggaacggacgtttgtgtgtggtttctgtggaagatccgctccgcggcggcgtgggaggagcagggcctggaggggttgcggccaaacgcgggcttcggtgttgggacacggacaacgctggcgtccgggcgctgctgggcagcggggtccggggatgacgtctggggctgcccgtgcccacttttccagattgctctgaatgtcctagtgagctgctcccgttgggtaggctcctgcgcctcaaccgcgctcggtactcgacgtttattatcagggaattctcggctgcaagatgggaattccacccccaccccattttgcagaggaggaaactgaaaccgtccttttgtcagatgaaatgcaatgttcattccaggaaaatagggactcaaggccggtgcggtggctcacccctctaatcccagcactttgggggacagagaccggaagagcgattaagcccaggagttcgagaccagcctgggcaacaaagtgagatccccgtctctacaaaaataaaaattaaaaaagtagccgggcgtggtggcgcgcacctgcagttccagctactcaggaagctgaggcggaggagtgcttgagcccaggaggtgcaggctgcagtgatctctgatcacaccactgcactccaacctggtctgcagcaagaccctgtctcaaaaaagaaaaagtaaatacttcaaccttgcaagggttttgagcattcttatgggctgtttttctacccaatctttcctcccatagcccaaattgtcataatattcaataatgatgatcccagaactttgggaggctaaggtgggaggatccctcaagccgaggagtttgagaccagcctgggcaacatggtgagaccccatctctacaaaaaaaattttttaaattatccagttgtggtggtacgcgacagtagtcccagttactcgggaggctgaggcaggagaatcggttgagcccatgaggttgaagccacagtgaaccatgatcaagtcaatgtactccagccccgggggacagagtgaaatcctgtttctaaaaaaataagaagaaaagaaagtaggtacttcagattcacaagtgctttgaccattctttgttttgtttcttgttttttgtttttgagatggagtctcactctgtcacccagactggagtacagtggtgtgatctcagctcactgcaatgtcaggctcccaggttcaagtgattctcctgcctcaacctcccgagtagctgggactacaagcgtgtgccaccacacctggctaatacttgtattttcagtagagatggggtttcgccacgttgaccaggctggtctcaaactcctgacttcaagtgatccgcttgcctcagcctcccaaagtgctgggattacaggtgtgagccaccgcgtctggccaagcagttggttttaacgatagtattaacgtatacagattcacaacttaacacagtgtttttctttccatgtaatttggaaaaaatgtttgaattggccatctctcccctattccccctttaaactgatggagcggtcttgtctgttttttcaatcattattcacaggtcttttatttttccggaggagaaaatacacactcctcttgaaatatacacttttcttgaaatgtctccgcggtttttccataggattgttcctttgtaatcttcatgttttccttgtaatcactatgacacacatccctcccatcacataacacagtttagaaactaatttttaataagtacagaacacggttcctttcataattctccaaaaacccccactctacaggaggc

SEQ ID NO: 586899 - DNA, 4001 bp, Homo sapiens
atcccagcattttgggaggcttaggtggaaggatcacttgagcccaggagttcaagaccagcctaggtaacatagtgagacccccgtctttaaaaaaaatttaaaaattagtcaggtgtgatgatgtgtacttgtagtcccagctacttgggaggctgaggcaggaggctcgcttgattccaggagttgaacgctgcagtgagctatgattgcatctctgcactccagcctgggtaagacgaagaccctatctctaaaaaaattttagaagtggttatctcttaagtatttttatgtccctgcatgcccaaatacgactaaactcaaggagagagaccaaagaactgatggtaatattggacttgggagtctaaagacttggagtggaatcttggctctattacatccaggctggctgagtttaatcatgtcacaggtcctctaggcgtcagtttcctcactgtaaagtaacaagagttagattgaggacttcaaaggtcccttacgtctctaacgctcacatatccacgaaacccacacccagggaagcagtgaaccccagaaagtgggaggttaaggttaggttggcattttgcttctgtctgtgaggtggtgctatgtatacctagggtggggggaacagttttagattggagtggggaagcaggctatggaaccatatacctcagtctggccatcaccagaggcttcattatctgaagagtacttcattatttgttgagtatttccaaaactgaaattccaagtataaacatgaaaagattctagaagcaactgtacatgatttggagattatctacccgaaggctctagttccaaaacatcacagaataaaaaaaaaaatatagattcctatctcaattgcatgacgcaacagctctgcgattctctgcatgaaacctcaatcttatctagataacgggccaataacaggtcctacgtcatgggatccttgtgagggttaaacgaaattaatacatatcagtgtgtgtgctttgcaaaacagcaggagatatgcaaatttcctgtgttcctctcgagaaaatgaggaagacacggagactaggaatgtctttcaggaatggatgtttatacttaattggtctgcaaaatttctctcccctagagaaaaacaaacacttctctccaaaggcagaagacaccctggtacccccatgagctgggaatggcagtcaagattaagatacagatgaaaaagcagaagaaattccaaatctcaagagggcaggacgtttatagggcttataggggtttgtggataaagtccaattgtcgtgatgtaggtgagagaaaaacgtttttcagtggggcttaggcctaaagcagacgtaggtgtgtatgtgaaatgggagggggagacgaaaaatctttacccttggagagcgagcatggatttgctagcgaatggatttggggccttaaccagtctggtggcgacagggaagggaacaaattcgggtagggaagggattacagtgatgacgaagatggggtctgcagacaaaggtgtggaacacggagagcaagagacggtgctggaggtcggtcctccggggggcgggcatggtgatgaggaccgagacagggggagactggcggtgaggcctgaaggggcgagtcccggaggctagagcccaggaaccggcaaagtcggaggacaaggactcgccccgcgatcccggcccgcccctgctcaccttgccagttgcgaagggcctcggacttcagcgtgaggcccgagggcgccaggggctgctgcagcaggaacaggcgaggcccggaaaccagcagcgagagcagcgcagtgaagaaggtggcggatggcacctcgggacacaagcaccagctgcgacacccgggccccgaggccgccatggccgccgtcgttcccgcgccccgcctcgacgccggctgccggtcctctgctccttccgcctcctcgcggcagtttcccttggcaacagcagaggagccggccggaggccacgcctcccagaggccccgccccatgccaagttgtccaatccggtagcgccgatcagccccccccccccccccccccgtgcgtgggaggccgggacggggggaggggggtcggggccacttccgggtaggaatgttccagcaccgtgtttgattccatcctactcgggctggtactgaaactgctcctataaactttaggaaattaatcagggaagaagggagggggaaaaacgaaaataaacgaagcttgcagcacactctgcgttcatcactaggtcaccttgctctccgacctgcttgctcatagctctgtgtatcagctatgataggtgcccatcgtctgtcctagaatcacgtagaccctgtcacaagattacaattccccttaactccatagataacaacttgaacattatgaaacgttttcccttggagatattctttcaggtcccgcataccagcataattactgacaccagttgttctgaaggagcccacagaagcaagactcaatggggactgcagtttccatatcctgaggatttcaacccccttaccctgaccagtcgatgaccccaattttccagcccctcacccttcacaatgccctttaaaatcccagcccggaactccttggggaagatggatttgttggtctccctgcgtctcctcctaggcaccctgccatctttaaaccctttttctgctgataaccctgcttcctcagtgtaactggtctgttattgcacagcgggcctaggcacctgttggtcctgtaataatacctcatgattattatgccttacagctcacagaactctttcatatcacgatcttcccatctgtattcatccctattacaccaaagaggaaacaggactagggagggccctgggtaattcagttacatggcaaagacagaattagaactcagttcctcctgctatggcccggaattggcctccagtacagccaggggcagctttatcttcatattgaagaaaaggggcaggaggctgggcacggtggctcacgcctgcaatcccagcactttgggaggccgaggcgggcggatcacgaggtcaagaattagagaccagcctggccaacatggtgaaaccccgtctctaataaaactacaaaaattaacccggcatggtggcgcgtgcctgtaatcccagctactccggaggctgaggcaggagaatcgcttgaacccaggaggcggaggttgcagcaagccgagatcgcaccactgcgctccagcctgggtgacagagcaagactgtatctcggaaaaaaaaaaaaggaaaagggacaggaaacgggagagggattcaatggaagggactcaaaagttagggatgtaatagaacactcataaccgagatctatttcagcactttacagtttgaaaagtgcttttgctggagaacagctgtttaaggtagaccttcctttttttttgacaagagtctcactctgtcacccaggctggagtgcagtggcgtgatctctgctcactgccacctctgccacccagatgcaagtgattcttgtgcctcagcctcccgagtcccaagtagctgggactacaggtgtgcatcaccacgcccagctaatttttgcatttttagtagatatgggatttcaccacattggccaggctggtctcgaactcctgacctcaggtgataagcctgccttgacctctcaaagtcctggaattacagacatgagccactgtgcccagcagtaccttcaagggtactacctttttcgctttctccagtgaccctgcccagtactccctcccctcacatggtagaagtatttggctccttccccacacacccaccctagtgttatcagctccttgcccttggctgcaggctttggtttgactcagctgtaactgctgccccccatagcttagaagctcctgctggctctgaaggaaggaggctaaattt

SEQ ID NO: 586900 - DNA, 4001 bp, Homo sapiens
aacacctcgcggtcccaactcctcaaaatgcagaggaggaaatcaagagaacagagacaagagcatggattcaggctgccaataaaggctggatcccaggttccatgttgatatttgaacaattagtgactttgaacccctccatttgattcatggttacttcctggctgcagctgttaaagctgccacctatgcatcccctcggattcagcaccgcatcgcacaagagttcccctacgactctaggcaccccgcatctctagccaagcttctttcagcccttaatttccccccggctctcgacggagaggtggtaaaaggatgagtaagcatgcagtggctgatcttggtcaaagagcacagaccctggcacaggcggtggaaagcgcagttggggagtgcatccagtgagcggcaggcaggtacaagcttcccatgacagatagtcaccccgttccgcaatcacgggagcctcggaaccctcgctttcacctccccatcccctcaactgtggcccggtgcacgccttctatagacagttacttcaaaacagcccgaaaagatgaactaatttctccaggcttccggatgtcgggagacaatacagcctcaccctgaagcgtgtctaagttcaatcgctctggtttcacacaggccagaaaaccgctcgttctgtaacaccccgtccgccccccaacccgaccctaagccaccttattcagcaataaggcgactgctaggaactgtttcaaatgtatgtcaaccttttgggggaagaaaaagaaaacaaaaagactttggaattacttcaacagcctggttgcaagtacctgaccttattccttcccgaacaaaaatagggcaccgagagatcagacattcctttttctctgtcttcctacccaggccgccagcagcatctcgagggcctccagagggacctcttttgggggatcgcctaggtttcctatgcagaaaacttgcgttcagtgcccaaacgtcctctaaatccctagttttctttacaagggtaaacttcaccacagatggaatgaagccgaggcgctgcttcctttgttaaaatcccacggactttcttttccttacatcgggggcggggtgggggagaccgccagccccggtcacgcgcgcccgcggcgaaggcggggaggcaggtgtgactccctcgcggcagcctctagcgcggctccccggcgccgcctcacttccccagacgagacccggactcctcggcggccgacggcccccgccccgcgcctcccacgccctccgcccggccgccacctgcccgcccggcccgcggagggcgcccagctaccgcggctcctccaccggcgcggacgccgccccgaccgccaccacctccgctcagaatggtggttacgaaacgcgcggcccccgcccgccccgccacatggccgcgccggctccaaacttcgcaggcccggccgcgacccggctcccaggcgaggccccggcggcgcgaggaggccgcgcggccaccggccactcacccacagaccggtagcccaggatcgcgatcttccgggacttggactgcggcatcttggcggcctcctcagccccggcccaaccacatcaaccgcggcggcggtggctcctgctgctgtgatcggcggcggccgcgccgggagagagcggcatacagagcaggggcggcggcgggcgcggctgcctctcgctcgctagctcgcgcgctcccaaccgcccggaaccgaccgcgcggcggcgcccctcccccccacaacacgcccacgtgaccggccggcgtcagcaccgcccctcttcgcgccgtggcccgccgcctccgccccccgaaatacgcggggggtgcgtcggggcgacgttttactttaaaggcaaaaaaaggggacgccgcgatgcccccagaaaagtcacgactgaaactcgctgcgtcatgaccctcccaccttcttccgccgctttttaattacgccattctccccgagcgccgattggacagctcctgcacagccgcgcgatgacgtgtcggaaactccatctcccattgggggaaacaaggaggcggggaggggggggcggggctgcccgcccgggagctaaaaatacacctcgctgctaccgcgctgttgggcgccggctaggtttgaaggcttcaaacttccaaccggttaggggcgggcgggagaggcggagagacaaacggtggctccctggtgattggccagaacggagcgcagggcggggcaataggtgggaggtgcggtgattggcgaaacgctaagcggttggcgggttcgcgcccgctgagcccgtgaagggcgcgaggcgcgtggcctgggcgggtgggctggctcctccctcggggttttttgaaaattctccttgagctgcgttagcgttcgtgtctgggtttgaggatgtagtggtgactaagcgtcaccgacggccgaaggactgtgggaagcatggagtctgcgttaattcaaagtgttaggaatttcattaaaaacagggcgagcctcgtcagttctggtgtccgcttcgcttcgcgcggagctcggcgcacctcctggaacagcgccggggcgggaagccggttctccgccagcaccggggcggctggtgcggcgggcaggcccgagccgggtgccaggaacgcctcgggccgcggtgtggacgggcggagaccgtggtgtgggcacagccttcccaggggtgcagtgcagaggggcgcgggaagggaagcccggccgggaacgcaggtgccgttgagggaccagcctgcaggcaggcccggcgtggtggctgctggagggcttggcacttgccgagttagcagagactccgccgcgccggggaacccgcccctattctgcccaggctgtttggcagtggggacctgcagaggccgggcatggcccttcgccctttgccagtgatcggtggggaggaatgaagccaggggaagctgagtggcaggccttgtattccagcgtaggaaggtttagaggtgactggagtcgacttggaacacccaacccaagagcgactccctccagctttcccacggaagcactccgatgaggggctggggtgtgcattcttgtcctcggggatctacagatggaagccccaggcagccagccagaagtgatcaatgtctggaagttctatgtttccatgaaatgttgaggtttacgctatagttattttaagtattttaaaataaaggtcttaaaatgcactctcctgtaaaatgtgtcgtttttatcctgtggattcggataccctcaccacggtgtttttgaacagatgctactaaattccttgcattataaaatcagtttagttttacctttttttaaaaaaaatagaacagaatagaaaactgcgttatgcatagtaagggtaagtatgtgtcctcattagtacagtggtgagttaaaaaaatgagtaagggtaagtttgtgtaagtgcacgtgtagatatatatgtttatagatatgctatatatgtattattgcatgttgggatttactgtagtttctttcttttttttttttgagacggagtctctctctgtcgcccaggctggagtgcagtggcgcaatctcggctcactgcaagctccgccttccgggttcgcgccattctcctgcctcagcctcccgagtagctgggaccacaggcgcccgccacgacgcctggctaatttttgtatttttagtagagatagggtttcaccatactggccaggatggtctcgacctctcgacctcatgacccgcccgcctcggcctcccaaagtgctgggattacaggcgtgagccaccgtgcccggcctcattgtaaagtttcttacagtgggttgcttcaaaaagtttgaaagcactgccctagcctgagaatattggtaatccagatgtgaagcacagttgtaaaggacaaattcattcaaaaagttttccaggctg

SEQ ID NO: 586901 - DNA, 4001 bp, Homo sapiens
aaaaaaaaaaattacacccttgatgtgtaaccattcaaatgtggcatagtacattcttagtgaaatgacattcttcaaaatgacacaccggtggtttgggaggtttttatgtgtctccttttctattttttgtaaagagcactcctaactgcaaagcagtttgagctgtggaaagaggaacaaggtcaaagtccttgatatgatagtctacatctattattttattaaaatgacagctcagtaggcatcagactactttccaggcatctgaatgaggcaaaggtggaaaatggaaagggaagggtttaactgagagatacaaggcactctgaaatccttcaagaaaaaggagctgagatgtggcagttatgacagtcatgtgctatggactgctcagagccttctttctgaggcagattctatcagccgctaatgttaagggcaaatcttactcctaagggccatgtgctaatgtgggcaccgtttttcttactgctacacattcccaactgtttgccacagtcaaaagaaccaaaaatcccaatagcagagctatcacatgcttttccccttcctctcccaaaaaatgtcacttcaaaggtccctaaagagcccttgatttgcaataacctgccatcaaagtaaaatggcaaaagtccacaaccctgacatatactcccgtactagggaggaaatggtggtactgaccttttccccctttcctgtccagtccaagatccagaacccaagttatccgttgtgctcttgccagagcaattttaaattgccaatttactgaaggtgaactaaacaactgtcatttgcctcctttgaacccaattagggtggtggtcgtctgtcctagatcatgggcccctccaaattcctgatgcttagtaagttgatgtttcattaaaatgacaggcaggccccaattattctgagtactgtatgataggcagacttccagcgaaaacactctagtccctgtactaggtatggatcgggaagtgctcttctccaaagcatcccatattttacaattttagaaagacaaaaatatgtgtatcatggtcatcagtattaccatataagcatattgtgcagaaaacggtactgcatctaaaagataggcaaagaacctttctatattgcagaccctggaaggctgagtttgggcgggaagaaaaagctaaggtgtttggagctggcttacttttctcctcgaggttcttcctttcgtcaccactttcagagcagcactagaagaagaacagatgtgacaagcacattaagattaaagtcgtggatggaaagcatacggggctcccaaagggcacccactggaggcaagagaggttccagacgctctcccactttctgagcgaccagggccgtccgaatcaggtacctcaaagtgccactgtcctggtgccaccgccaccttcccaggaggtgtgtgtcacctccgcaggacctggagttaccttgcctgctcactagagccacctccctagagaaatctgtcatctcaccagggccgccaaagccacttcacggggactaccgcctcctctaggaggtcttacaagggcctctaatctaagccgcaggaagcaccttcacaagcttacagggccaccgcaccgggactatctcccccgggaggtctgtgccacctcaatgggccaccaatgtcccctcccagggacgccagggccgtctcaccggggctgcaggagaggcgccgatctcgccggctggtagcatctcgcctccgcgcgagtcctcggctccattcgcagccagcgtggcctgtggagtctggctaaggccagcgacacactcactacccagcctcggaggccgtaggactgagtgccacagcgacttcctctcgatgtctcactggtttcttcctctcagcccagagaggccctgcccgtgcagccgccggccgtgctctgttcctccccctcctgaccggaggtcggaacggccactcaggaagcgggcaccctcccctatggagctccagagaagggattcgctcactccaccgcggtaaaagtcccctccactttattgaagctcttaatgatggaactttaagatatccctctcccaacgccttaaattcaatatgaataatttaaatttatattttaggcaatatccagatgttctgagagtgtggggggcttgttgactaggagcttcggtgcagggttatttggttcgaatatttagttgggggtttccaatgaatgtcagtatctttagatatttcttttaacgttggtcagagtccctagagatgagcttctgatttcctgcctagagggtgtagaggtggttataagcgttctgggagctgaatgaagagaacagagcatctaacatgtgtttcgcccaaaaccctgtcttttaccagggaggaggaaagggagctacctagcagcaagggttgtgtagaggacctgtggacttgacagcctcttaaacaaactaacacggaaggagtaccatagagaccataacaaacaagggggggggaaagcaaccctcagaggaaaaagaaaccacacggtgagaagaaaaatcaaatacatgtgcacagagatatataatcgagctacaaattactattgcaagcataaaacaaggatggctgggcgctgtggctcacgcctgtaatcccagcactttgggaggccgaggcaggcagattacgaggtcaggagatcgagaccatcctggctaacatggtgaaaccccgtctctactaaaaatacaaaaaattagccaggcgtggtggtgggcgcctgtagtcccagctactcaggaggctgaggcaggagaatggcgtgaacccgggaggtggagcgtgcagtgagcagagaccgcaccactgcactctagcctggacgacagagcaagactccgtctcatttaaaaaaaaaaaaaaaaacaaggatactattttttaaattacctattatgggaacataatcgtatatatttatagtgtacatgtgtgtttgttttttttttgctcaggctggggtgcaatggcgttatctctgctcgcagcaacctccgcctcccaggttcaagcgattcgcctgcctcagcctcccaagtagctgggattacaggcatgcaccaccacgcccgtctaattttgtatttttagtagagacgatgtttctccatgttagtcaggctggtctcgaactcccggcctcgggtgaactgcccgccttggcgtaccaaagtgctgggattacaggtgtgagccactgcgcccggcctttttttctggggcggggcgggggacgggtaaagaaattttaatgaggattcaaggtttgtagggaagacacagaggaccggcgctcagccccagcctcctcacgtgtacatggctccatggaggttctccagtcggttctgctgctgctgctgttttcgagccttatctcgtctgtgttcctcataagtgtagtcatcagtgggcagctcatggcggcacaagggacaggaatttgtcttgcttagccagggcagaatgcaactggaatgaaaaaggtgttgggaagcatctcaatggcagtctcctcctcagattccaaaagatacacggggcacttgagctcagccttgagagcctctgatgactgtcctggagaggttctcaaccacaatcttggcagccggtggaggcaggtggtggtcccaatctactaccaaccccaagtcttcaaagtccatcctattcaaaagtgaccttacgagctccagcaccatgttggttcgagtctcctgcttgagggtccaacggctcacagtcgtgttcatcgatataggacgccatggctgcccagccgtctgacatgtgatgttttgatacaggtatacaatgtgtaactatcaaatccgagtaactggggtattgatcatcttgagaatttatcatttctttgtgttaggaacagtcc

SEQ ID NO: 586902 - DNA, 4001 bp, Homo sapiens
aaagagtgctagtattttattttaaaatttcactatacagatgcatatcacaaaaaaaatgtactaactgcttgaacagaactatttatcaagaataagaataataagattttgtaaaatgttcatgccaagaatgcaaaagaaaaaaacagcacaataacctcacaactaagacatactataaatatgttatcaaaagataatttttactcttcctagcacataaaagataatttattgttttcaaacttaattgatactttctgtattagaacatattacatatcagtaattttcttaccaaaatagaacccaatatatgtacagtaaatatttaagaaaataagtttgtccttagctttaacatgaatgtgtacatataaatatacatatgtacactcacaggagtaacatacattgacaaaaaattacacttagcaaaggtccaaaattgcacaaaaaaaatcccgctaggacttttttgctatctttgaggttggacaaagaatgtataaaattactgaagtaacaaaaaaggacacaaaaaccacacttcaaacagacaaactgcttgtcagtattaggacctgatttcacatacaggtttaatacacttcctcaaaagtcatgccatcaaggtgaaggatgaacatcttccactactgaatgaggctggatgtcattattctgagaagtagggttctcctccacatggattactttatctgaggttcctgcaggagaaacttcattatttgtctcctcttcactaggtgataaggtttcaggcagttcatttgacattagaacttgcaaaggttctgttccattttcaacaaccacttgaatccccaaaactttaagaatatcacatttgcaaatggggcatgtcccatggggtaaaatccaggggtcaatgcaattcttgtggaaaaaatgtttacaagtcagaatacgaactatgtcattaggcttatagcgttcaaagcaaattacgcagctatccccatttggatttatttcttcatccccctcttttactactcgaagttggagttgtccaaatgtgttctgaagatctgttgttaatcgctgccatctccggttctgaatccttgctaaacaaagtctatgaatgtgataaaagatgaaatatgctaaggtagcagttgtgacaatcacaaaagagaccaaatagtgattcatccagatgatgtgctttctccccacctcaaccacggctgtaatgagaactcccttcttaattaaatggaaaatttccgtgccttttaagttaccaatcataaccacaacgacatcttcaaatgcctgatgaaacatggggaacacctggttgccagtacctggaacgttatagatgatcactccactggctcccttctcagttgccactttaattttctgtgtgaaggtacaacctccccgttcaataagtgcaagccaggtctctgagtactttgatcggctgaaaatggtattgggattacatgcattttggatttttccctctggtggcactataactcctgccactctcttcaaagtggagcttcttccaaagactccagtctctcccaactctgacaacacatgattcccaacatgaaatgatatgttcatataagccatccaaacaacacttgctctgcaacagttctgactaacaagccaaagaacactgaacttcataagccaggaagaggcagtgttgtttctccaagtgccaaccttgagtagatgcatctctctcttctccgagtgacttaagaaccaacctaacagttgcacatctgttgacaattaatttaaaataacgaagagaaaaaaatcttcaggatacaaacaagatccactgtcttccagcatgtttttgtaagaaattcttaaagatggcttatgagtttcagatgtcttactagagagaggtgaaaaactttagattgaaaaataaatcccctactgttaactctagatactgcttactattgtgtgatgtgattatgacatgcaagacccagcagccaattagataagagcttagagcatactgtgaatttattggcttaaatgctgttatgggtgatttctatgttgttataagatggatataatcactgagctacatataatggtagtagatagcacattaaactaaaaattaaatctaaaattcatacaatgtgtgctctttaaagcctgaaagcacatgtaagaatgttttattttcccagcaagtgaaggagatatttccaacaaaatggcaagctaaaaaaaaggataattaaaaattagtgcagtgaccggatgtgaggcaaaagtggtgagcttagtgacattatttttacatcaaaaagtaaaagtcacactgctaatttttgattcatcacataaaccattatattgcatttatttaatttaagctttctgagaagtttgtggcttttgttttatggttttgctgttttaaagtaagggatcctgctcagtttacttctgcctcactttctctgtcttacattgactgtacaaatgtagtaagactgacaggagtaaagaaaggactgatatctagggaagctaatttctctgcagactttgatgtctgttattaatcaaacaatattttgaaagaggaggagaaagggtgtcaagggaaagattaaatatagtcatattagtttggcacaattcattttttaaaaaacagctattaagaaaaacttcaaggtgcacacttaaagttaaccattagcagcaataagtagatgcttttatcaaacatttttgcagaacttaacaaatatccctattagaagattccacaggctctgtccactctgcctatgtttttgccacaatcatgtcagtggcacaatatgacatcaaagctaaaggatggcatgtggactcacaagcatagtaagttcacaagcagccacgctgctactggtacactttcttggcggtgaatctcagtgggttttttcccaccagctaggaaaccgaggccaaagattctgaccttgaacatgaatgtctctggtctacatacgtaaagtgctagaagtcacttttggttggaactcaccaggactaaaggagctgttacttcttatgaaatgtaaatctacaacatggtaatttgagacaagaaagatgaaggaacaaagggccctatgggccaacaaaaactagtataaaaagaatactgatgatataaaacatacccataaaggttgattttctctcccaaaggccattaatccgattttattttcatacatccctgcacattttaaaaggtagtatatggtgtgtatattcacaaagtgacactgaggtatcaaaagtttagcatatcatccagaaacagaaattttcatcaatacaacaatacctaaatctttctgtctctcattgttatataggtgtttattcatctactagaaaaaaggaagatgcaaaataaggcaaagaatataacatcgaaaggcaattgaacaaaattttagctctgccctatgttatcaaaatgcccccagagaaacattcattaccatttggagaggaaaagagaagcatttactaaggacacttctagaaaagaaatctgctaccatagctgagtcactatgctaggatttaaagagctctggcaaacaaaagtgaatgtttgcaatgttatcctaaatgaagcctataataatttagaacacttttccttacatatccaaagtactatcatctaaaataattatttagaacacattaccaatccagtgagtagctttggaaactagatttcctgggtattaataaaattaattaaccatggagaatcagagatataaattattagataccaaaattagtcaaaatgtggaaacaaagtacaagaattagtattaaaaaaggaaactttaaaatagcatggctaattctctatggcaatgtcacaatcctagtaacttgaagaaaaa

SEQ ID NO: 586903 - DNA, 4001 bp, Homo sapiens
gaaactagatttcctgggtattaataaaattaattaaccatggagaatcagagatataaattattagataccaaaattagtcaaaatgtggaaacaaagtacaagaattagtattaaaaaaggaaactttaaaatagcatggctaattctctatggcaatgtcacaatcctagtaacttgaagaaaaaaaaatttgtttttaacatatactaatgttcttatttggataagggcaaaaagggatacgattaagaaaatgtggcacatatacaccatggaatactatgcagccataaaaatggatgagttcatgtcctttgtagggacatggatgaagctggaaaccatcattctcagcgaactatcgcaaggacaaaaaaccaaacaccgcatgttctcactcataggtgggaattgaacaatgagaacacatggacacaggaaggggaacgtcacacaccggggcctgttgtggggtgggggaagcggggagggatagcatttggagatatacctaatgttaaatgacgagttactgggtgcagcacaccaacatggcacatgtatacatatgtaactaacctgcacgttgtgcccatgtaccctaaaacttaaagtataataaaaaataaataaataaaataaaattcacctaaaaaaacaattaaaactgattagaaagacaagaagttcaaatagctgggcatgataaggagttttatttttaaaacacaaatttcacccttgttcatacttgggtagagaagctgaaattttctctctacataaagtacaataagacaatttatctaatctttgtatttggaaagatctggttacatcttcagaaaattctccagatttcttaagttttcaggatgtcacacttgcacatgggacatgtcctatgggctaaaagccaggggtcaatgcatgccttatggaaaaaatgtttgcaagttaaaatgcgtactacatcttggggtttgtatgtgtcaaagcaaacaacacagttgtcttcatttaggtctaattcctcatccccttctttgagaactcgcagttgaagctggtcaatagctttcttcacatctgtctttatttgacttcgcctcctggtgaaagaattgggcactctaggtgtaagtctccagacgcaatctaagtaaaagtaggcaattgtggcagccaggaaggtaaatagatacatgatgtaatggctcacccactgcatgtgcattctccccacttcaatgatgactgtcacatagactcctttctgaatcgagtgcaaaatttccatgcctttcaggttgcttatcatcaccgcgactatattttccgtcccctggtgagacatgggaaatactttactgcccgtaccttgatagttgtagatgatcaccccatttgctcccttctctgctgccacgttgattttatgtgtaaaagtacagcctccacgttcgatgagggccagccatgagtctgcctgtttgggcctgctgaaattggtcaaaggatgacaggcattctgattccatccttcaggaagtgccaccacaccagacaccctttccagaggagaatgattcccgaacactccactctctcctaattccgatgtgatctcatttccaacctgaaatgttatattcaggtgagctgtccaaatggcttttccgtttgagtcaggaaagctaagtagtagaaagatactaagcctcaaaagtccagatgaaacagaactatgcgtcgaaggggtaattctaaggaagctcatgcctccatttgtctattaagagacaaacatgagaaaacaaaacaacatcagttgtagaagaacataaagaagatagcttgttggcggcagattactaaagcacataaatggaaaaggtctccctggatcaaagctatcttgctccttccagtattttaatatttagtagattatctttctcataatgaaacaaaataacaagacttgtgattggtaccatgtgatttcaagaaaattatgacatccaaatggggaaattatgacatcagaggtagttaaaccaatccaagagtttatattagtgcattgcatcctgaaatcctattggccaaaaagctaagcaatgagtcaagatacataacaatttgaataggctgtaaagcaataaataaactggtaagaattttttaaagccttgggtttcttccttagttctggagagactgaaaatctacccagccatataatgttttttctagctgtaaggcaaaggcaaagataaaaataattcatgtattagtgcatgtacctgggccagttgccagttttcatgcatggttcaacactacccaatatggcattctgtgggatggttcaacactaccgaatatggcattctgtgggatggttcaacactacccagtatggcattctgtgggaagtaggagcaaaccattcccacccacttcccacattaaatgcctatcccacacctaaagatccaacactaagaaaacagtgtaaactcttattgttagcctaatacagtcccatcttctggtaagaacctactatgtgctggcaaatactgagagtggacatatattggagaagaaaatagagacggccctactcttgtagaggctaaggattttggatgatgtcccaaggacaagagaaacacactgtagggttctaagccagggaggtgacaaatgtgtttcaaaatgttcactttggttgctttatggggaaaatgtattggagagggagaataacaagagaatgagcttaggcaaaagaagatagtggcttggactcaaagtagcagcatagatgtagagacacagacaaaggctgaataacagatttagtaactggaaggacagtagtgggaagaggaaaggatggccacaatgataaaaaatcactacatgatttttgcaaattacagaatctttacggctttaaagatgccttattgtttagttttatcttaaatctttatctaaagtctgtttcaaggagccaataaattggcaacacccactcaaaaatttattttctatcatgtataggttatcttctatgtgctcagcatgccacaaagtcctagggatagaaaaagaaaagaccttatttcctagtgtgaaaaatggacatgaacatttaatcatagacatgatagagttttctcatttggacaaaagcatttattgtattccctggcctattttagttaatatttgttagtattccctgtattttagttaatatttgcttttttaaaaaaaaactctaggaaacagtctacttgtcccattcatgcaattctgttgaagcatgattcaggtaacacctgaactgtccttacaggtagactttttttttttcatgttcaaatggagtgaattcctggctgattctattaacagtgacaaattgaagcctcattaagaagacggtttaacatcatcatattagaggtaatttgttaaatctgtgattatttaacctttggaagtaggattacaaaataatataactctgactttttattttgcagattttttgtgggtgaagtgtttaacctgtaactatattttgcttcaaaacatatctcacatcaaaaggttctctgtatggttgaaaggaccaatttgaggaacttagctcattcattctatttttctcattataatataaagtggttaaggcaatgatagaactgccctctcttctgccctcgtcttacaacaaaatagacctataagaaacaatcatctatctcttaaaaagtggttttcaacttgggggcaattttgcctctcaggggacatctggctgcttctgcagacattttttgattgtcacaattagagagtgctaccagcatctagcgagtacacaccagcgttgccactaaaacatctgaaaatgcacatagtagctccacataataagaaattatgtggtccaaaatatcaatagtaaggtt

SEQ ID NO: 586904 - DNA, 4001 bp, Homo sapiens
aggcaggagaattacttgaagctggcaggcggagggtgcagtgggcagagatggcaccactgcactttagcctgggaaatacagccagactccgcctcaaaaaaaaaaaaaaaatgctcaatgaatgggctggggtgggtggggcagagaggagctgacgggacatactacatctaaaacgccactgtttccgagggacgcggatatgctctggtcccccacctacatcccattcagtaaacaaaggtacccaccgaaacatacagcagcacaaacccatttttataagaccctgtgcctgactattgcaggaagatggaggacaaacaacagctggagaatagatgagctgatgtttggctcctaacctctaaaacaatgccaacccagccccttccaggagtaacagcttgaaaacaatacatggcatttagatagtttttagcattcctggcaattccgttactaattcatgggtcttcctcacaagggaagaaaccccatttttgaggcacaggcccaccagggcaaaatgacctggccaggctggagccaggtgcatgtgagggccactgtgaggccctctgctctgctcaccctctacgtcacagtgcttcttctgtaggtgaacgtgtgggttttcagccagggcgcttcttactgaagggcccgagggtcccggagaacatatctgaaacgtcttttgaaaagactgtagcactttgggaggccgaggcggagggatcacctgaggtcagacgttagagaccagcctggccaacacggagaaatcccgtctctactaaaaatacaaaaattagctggacgtggtggcaaatgcctgtaatcccagctgaggcaatccctgtgaggctgaggcaggaaaatcgcttgaatccgggaggcagagcttgcagtgagccgggatcgcgccactgcactccagcctgggcaacagagcaagactccgtctcaaagaaaaggagaaaaaaaaaaaagtaaaagaaaaaagaacgttctctttgcacgatctaagtacctaggacagctgctacccaggcccttagggatttacagagccctgtcggatttgtcagaaatttctgtaacccgcacgccgcgcacgctccagggttggttgcaagtggcccagagtcttggatccctggtcctgttccaccgggagcagaaccacctcgacgcggggacagcggcctcgctcgctgcccagcgcccggacacccgagccgggccagcccccagcgccccgcagaagggtttgacgcacttgcggcgccctcgcgagtgccgggtgacagtcgccaactttcgcggaacacgcgctccagatgtgagggaagaggaggaaaaacgccgcccgcctgggctggggttcacaggcacggcccgcctcccgccgctcctccaggccgcgctcgggtgcacggacaccgcctccgcggcggcctcgggcccgggggagggaagcgcggtctcccgggctgttgccctcgcgcagcagacccgaggggccggcccgcgaaacttcgcgaagtggcgagagggggccacccggccgctcagcgcctttgtcgctccagcctcgccaccgcaccgggctcgagacgcccagcccagccccttggcccgatcccgcccgggcctcggcccgcgcccctcagctcggcggccctcacggcccgcgcccccgcccccacccccggagctccacagaggcgcccctcagagaggccgcgtcgcctcacagacccgcccaggagctcgagcgcgccccgcagccgacactcactcgtcactcaagtcgccggctagccaggcaggttcggcggccttcgctaccgcgccgcttactcctcagaagccgcagctgcgagctccgtggcagccgctgcactccttccggccctgccgcggcgtcacctcgcgcctgcgcacagcgccccctcccgactaaggacaggaagaaccatagaggcactccgggtactgcggaggagggaccggggggctcaccatagagagggccgcctagtcgcgcctgcatccgggctctccgcctgcggagacttgactcccccacgaggcaggagggtgaaaggaaaggagacccccatatccgaccccacaaggagccaccatctccccagagctgaaaagggtatggggcaggtggttgtggatgtttactcgatatctactgatttgccctaattcgtttggcaagtcattcattcattctgcaaatatattctgcggatttcctgtgggccacacactgttctaggaattggggaaattaagagtaaagtgggtcccatggctgggcacagtggctcacgcctgtaatcccagcactttgggaggccaaggcgggtggatcacttgaggtcagacgttggagaccagcctggccaacatggtgaaacccgtctctaccaaaaataaaaaaattagccaggcatggtggcggatgcctgtaatcccagctactcaggaggctgaggcgggaaaatcacttgaacctgggaggcggaggttgtagtgagccaacatggcgcccctgcactccagcctgggcaacagagcaaccctccatctcgaaaaaaaaaaaaagtaaaatgtgttcctggcctcaggaagtttaggttttagtgagcaagtgaataactgactaaaatactgctcctgctgggcacagtggctcatgtccataatccccgcgctttggaaggccaaggcaggaggatcgcttgaggccaggagttcaagaccagccttagcaaaatagcaagaccccaactcttaaaataattgctggccaggcgtggtggttcacgcctgtaatcccagcacattgggaggccgaggcaggcagatcacttgaggtcaggagttcgagaccagcctggccaccatggtgaaaccccgtctctactaaaaatacaaaaattagctgggcatggtggtgcgtgcctgtaatccgagctactcgggaggccgaggcacaagaattgcttgaaccgaggagggggaggttgtagtgcagtgattatgccactgcacttcagcctgggtaacagagtgagactgtgtctcaaaaaaaaaaaaattgccaagtacaccttcaagtagagatatcaagtcagtaattagataaatgagtctgggctgggcatagtggcttatacctggaatccgaacattttgggaaatggaggtgggaggatggcttgaagccaggagtttgagacgatcctgggcaatagagtaagaccccatctttacaaaaataaaaattagccgggcatggtggtgcgcacctatagtcccagctactcaggagactgaggtgggaggatttttttgttttgttttgttttgtttgttttgtttttttggacagaatctcactctgtcagccaggctggagtgcggtggcacgatcttggctcactgcaacctccaccttctgggctcaagcgattctcctgcctcagcctcctgagtagctgggattacaagcatgtgccaccacgcccggctaattttcgtattttcagtagagacagggtttcaccatgttggccaggctggtcttgaactcctgacctcaggtaatctacccacctcggcctaccaaagtgctggaattacaggagcgagccactaaacccggccagaggattgtttgagcccaggagtccgaggctgctgtgagctatgattgcactgctgcactccagcctggatgacagaacaacagcctgtctcaaaagaagcaaacaaaaacaaaacagggaaatgagaggaacaatagtcttgatgcggcaatgagtgttccttctctaagacagtagagtgtggcttatgggggcttgcatgggacagaaaaagaccactactcatagtgctttggggaacagtgtcctgagggaatagtcatgtttcagtgaagtagaaattgaagggctgcttacaga

SEQ ID NO: 586905 - DNA, 4001 bp, Homo sapiens
cactggggcgtccccgtctgagtgagtgtgagtgtgccctgccatgggatgccgtcctctccaggactgttgcccgccttggtcctgagctgcctggatgggctcagccccctgccaccctgaactggaataagcaggttggaaaatgaaaggatacaaattattgtcaaataaaaactcgtaaagcatacggtattcacacagagatgcaggacaatacccgatgcagtaagaaaggcccagcgggctgagaagtggctcctgtttgttttgaaactgcatggtagggggaggtgcttcagagctttggcttggccaacattatctttaacacagcccctccacaacccggtcactcatggattcaccagaaattgggtaatgatatttcttaaatgtagagctcatatgtacttcagtgtttcatattagaagtgctttggtctttatttagaagtttggcgatgtttttgtgaccaggaatgtgctgtgggaactttcctcttatttatatcaattaacctatggtgaaactggtttccttgtacactgcatggcttaaagctccagtttctaagaacctatggatgatgttaagtgaagacttactgtgttgagggcctaactctaaaaatagaaagaaattaatccaaaatgtatttctaaggactaacacttgtattaaattactccaaccgaaagaacaaactcactaaggcgtgagtggagagatagaaaagcacagtggaaccaaatctctgagatatccagggttagaagtaaaaacgtcagtcgctgctcaagtcctggaggctttgatgatggttcttactacagcccttttctgttcccgttcaattctggcatcaagagatgtttgaaataagttccaccctgtatctcatcaagacaactgaacttggagaaatggtggaatttaaaatactgaaagatcactgccagaattttctcagttcctgcttccaaaatgcctataacctgcagaagatacagtttgcatcacactaaaaatggtccggtcatagctgcagtctgcaatttaatctcaagtttctacacagtagaccactgtcattaatatcaaggtaagagcttttaaaacctatactctcttaaagtcctacggtatcattaagttttagagtttaaaattcagaatttaaaggtattgaaaacccttcaagtacctactccaactccactttataaatgagaaaaccaaataccaggtgagtccttcaatatataatgagcctgcggcactggtagggttagaaacgtaacccttgcccagtattgaaagctaagattaacaggaacccgttgctttgtaaatcccagtattaaacgctcaagaggcagagcttggtggcaaaaacgatcactggggtgccaaagcgagtaacctcagctaattaaacacgctcaataaaaatacacgagaccaagcctacgacgtaaagatgcaatcctacgtagggtcttggtgttatctcctgccttctgaaccccgctgaccgttttctgaggttccactcatgcaggaagcgcgcggtgacgaggctccaattcctctcaaagctgacaccaccctgcacctggggcccctgatggcagccggtcctaccgggttctaaaattaccgacgtgggatcactgttctaaggctttaggcagccgtaaattcgtacccctcagatagaaggagctgtggaaactaaccaggaccccgagtcccccaaggaggctgcgcgccgctacgggacccgacctcgcctcacagctgcggccatcgccggcccggctcggaggaggcgaaagcgaggccgcggacggccctcaccccgaatccatggaccccgcccgcctggcgggccacccttctttccgtccctcccccgaagcctctccgtgcctcgactcctccgcgaacaccggaacccagggacgtctgccccttttccctcaggcaactccctggccgcccaccgttgccgtagcaacgcccgcctccgcgctcgctccccgcgggcttgctcaccagccctgccccgccccgccccatactgcgcatgctcgccagccccgcccggcccacattgcgcatgcttgccaaccacgccctgtccacaccacactgcgcatgctcgccggcccccgccccgcgcacggcgtcagcgtctagacgcaggtgcgttcccgtcgaggctcgcgcagcgggcgtttttggggatcgcctggcgggggtgttcgggagccgcgggctgaagcacgggggcgtgcaggcgcccaggcctcgtgtagtgagggccgagccccgcgccggcttcgctgtagtccgcagcccccggcggctttgtgggcgcagccacgctcctcagccgcccgcccacctgggcctgggccccggttgtttccctgcggtggctgtggtcgttcccgttccagggtctcgagcgcaccgccccttcgctgcgctgttagtcgagggcagttttctgggggatcccccgatccccccgcgccgctcaggcgtcttggctcgcggaagcgcaggcgccgactgcctggcgtcgtccgtgactcctggcccttctctgtggatccctttgcttctcgttgcgggttgtgtttcctgcttcgtgggcctggccgtttgcgtttggatgcaggcccgggtgagccctgcgtggcccgctggccttttcctgctccctaggtgactgagccgcgtgtgtgacacatcggagtgaattgaggcaacgcgttcctttccaggcttgcagcgggcggtgtcgttcacgctcctgagcagagccttccggtgctttactcgacgccacaaatagtgcagggttcctcccaggggctgtcgcgagctagaactcttccccgcccctgtgagctcgggctgttcttcctcctccgcgtggctcactccagcctcggatgtttcctcgctgcacagacctgctcgggaagactcgagaaggccaccccaggactccagctctccccggaagggcttcccctcggattgcgtcttggcccctggaaccctccctctgtatcctctgctgttcctctcttggcctccatttgggttgtggcctggatactctggctcgctgcttcccttctcttaaggatcacagccctgcactgcctgtcgtccggtgcctggaaaccattgtattttttggtctgattttgtagttgtttgagaacttaagtctggtccctcacactccatgcccagaagcagaaatgagtaaagtttgttttatcttttcttaatatgacaattattgtgttggttcaacttatgttgtactttaattagaagaaatttggccgaaaatacaaggaaaatatacaaatgcaagtaattttttttaaacttccctgaaagcagggtctaaagaaattaccaaccaacttagactggatctagaagaaaaggaagggtctttgcagtcttaggactcttccgttccgcgacgtaggtgttaggataacagccataaatggttgtaagactttgggctcagataagtagacttaagttcaaattttgacttattttacaagtgtgtgatttttggcaagctcatcttcctaaaccatgagctccttatttgtaaaggggacattagccactctccagcaacagccctggtacttcttcagtcctgggatgggacgtatgattagcctaagcgaaccagaaaatccaggcccgtgaccagtgacttgatcagggctggcgatatatctaggtaggccaaccaggtggactcagtatttttgtgggtgctactggaaaatttatttaattctaactgaatgtagaaacagcaacagacatgaaatggcagttgtattgctgtcttatcatgaggtgagggcctgaagctatggtagccaccctgtgaaccttggaaggagggttctacaggaactggcagagctgagactgg

SEQ ID NO: 586906 - DNA, 4001 bp, Homo sapiens
ccatttttacttattctacttaccattactatctttaccttcttgctctaatggtcccctatcatttttaaacttcaatacatacataccttcaatacatacacacctctctgtataattataaataagttatttctgtaacataaaaaattatactattaatctcaatagatttttttagccctaataagccaaaagatgaatgactacgtcagcttacccaaagtcaacggcggcggtttgggatcaagaacatattctttttctgagtcttctagtttggggcactgtgtagtttttttaagtccagtatctattattgcctttgtatctctttttagagatttgttctctttcttttgtacttgtgtcttagaatgatctgcaactgaaagatttcgaagttgaagatcatgtaaaatgtgatcttgtaaagcaactgcattgactgccaagttatctttcttagatgagtgaccctaaaaagtaggaaaaaagtcatatttagaggagtattatgtaatatatcatttagaagagaactgaggcttcaatactcaaccttgatggcacatacaaccaaatcaaatagtaaggaatgcttgactcattgttacctaagtaggagcagacccttgtctcagcatttatgttaacaatacaggaatatcttttcatttaattatgaaagccttaattataatatgaataaattcattatgacccataaacctgtgcatgcctaaacaaacccacgctgcttcactataattaaattagactccaggcaactactaaggagactcctgccatttcagcttatgcctttttgtgaaaacttaataatttcctgtgcagaataaaaatcaccaaacagctaagagatgcttgcagtaaatatcgccagagattgtttttccattggcttgtccactgccccatgcgacacttggcatcgcccattcctgctgacaattcctagttcaagcagggtttgcaaactagtttttatactctcaaatggctgaattaaaatacatttcatgagtcaaataacgtgtatgtttaagaaaagaatagcgtaccttattttttaacatgccgaattaggaaaagttgttgcttggctatcacaaattctatcatcacatcctatcaccttccttctattcttctgctgcaaagacgtggtcaacagaaagtcaaagttacagtgcacagaaaaaccatgaagtttgtgaggatgctctgtaagagtctaacagatcctgaagcagcaggaatgcctgctacagggtggcactaagctacacattctggttctggaggaagggggtgaactcaagtcagttatgcttcgactcatccctgtcctcaaatagttcacccctgagctcctgaggacacattaatacaaatggttaattactatgaattaatccattgctaaatataacatgatacataagtactacaaaacttcaggctaacactggagacttggaaaaaccagttaaactggcatttgaaagatacacagagggaaatgaagatggcacattacaggtaggaggaaagaactggcaggctggaaatcagcatgatatgcttattttggggagaaagggaacaatgaagaaactggaacgcaagaggaacactggctaacttcagtctgtccagaacacagaagtacagaatatggggacagaccaacttgagttccaattgaactctaccgctttgctgcgcaagatactggacacagctgagccccaggctcctcatctataaagcaggtataataacgctggctttgcagggttgccgcaaggattaatgagacaacctttgaagtatctaaagtaggtcttttcacacagaacttactcttgttattcttgcttcaattcccttcaaagctggtggaataatttggaattggcccttttagattttggacatggtgtattttatgaagacagatgtattcaaaatatactgtgatgaggagaaatagaaagttattcaagtaatctaggaactggcacagaaggcccttgaacatatttcttctaatgttgtttccctataacgctgatgagaaaaaaaattgatccccagcaggggccactgtctgtttggagtttgcacgtcctccccatgtgctgtgggtttcctccaggtaccccgggttcctcccacatcccaaagctgtgcacgtgaggctcactggggcgtccccgtctgagtgagtgtgagtgtgccctgccatgggatgccgtcctctccaggactgttgcccgccttggtcctgagctgcctggatgggctcagccccctgccaccctgaactggaataagcaggttggaaaatgaaaggatacaaattattgtcaaataaaaactcgtaaagcatacggtattcacacagagatgcaggacaatacccgatgcagtaagaaaggcccagcgggctgagaagtggctcctgtttgttttgaaactgcatggtagggggaggtgcttcagagctttggcttggccaacattatctttaacacagcccctccacaacccggtcactcatggattcaccagaaattgggtaatgatatttcttaaatgtagagctcatatgtacttcagtgtttcatattagaagtgctttggtctttatttagaagtttggcgatgtttttgtgaccaggaatgtgctgtgggaactttcctcttatttatatcaattaacctatggtgaaactggtttccttgtacactgcatggcttaaagctccagtttctaagaacctatggatgatgttaagtgaagacttactgtgttgagggcctaactctaaaaatagaaagaaattaatccaaaatgtatttctaaggactaacacttgtattaaattactccaaccgaaagaacaaactcactaaggcgtgagtggagagatagaaaagcacagtggaaccaaatctctgagatatccagggttagaagtaaaaacgtcagtcgctgctcaagtcctggaggctttgatgatggttcttactacagcccttttctgttcccgttcaattctggcatcaagagatgtttgaaataagttccaccctgtatctcatcaagacaactgaacttggagaaatggtggaatttaaaatactgaaagatcactgccagaattttctcagttcctgcttccaaaatgcctataacctgcagaagatacagtttgcatcacactaaaaatggtccggtcatagctgcagtctgcaatttaatctcaagtttctacacagtagaccactgtcattaatatcaaggtaagagcttttaaaacctatactctcttaaagtcctacggtatcattaagttttagagtttaaaattcagaatttaaaggtattgaaaacccttcaagtacctactccaactccactttataaatgagaaaaccaaataccaggtgagtccttcaatatataatgagcctgcggcactggtagggttagaaacgtaacccttgcccagtattgaaagctaagattaacaggaacccgttgctttgtaaatcccagtattaaacgctcaagaggcagagcttggtggcaaaaacgatcactggggtgccaaagcgagtaacctcagctaattaaacacgctcaataaaaatacacgagaccaagcctacgacgtaaagatgcaatcctacgtagggtcttggtgttatctcctgccttctgaaccccgctgaccgttttctgaggttccactcatgcaggaagcgcgcggtgacgaggctccaattcctctcaaagctgacaccaccctgcacctggggcccctgatggcagccggtcctaccgggttctaaaattaccgacgtgggatcactgttctaaggctttaggcagccgtaaattcgtacccctcagatagaaggagctgtggaaactaaccaggaccccgagtcccccaaggaggctg

SEQ ID NO: 586907 - DNA, 4001 bp, Homo sapiens
gctgcctggatgggctcagccccctgccaccctgaactggaataagcaggttggaaaatgaaaggatacaaattattgtcaaataaaaactcgtaaagcatacggtattcacacagagatgcaggacaatacccgatgcagtaagaaaggcccagcgggctgagaagtggctcctgtttgttttgaaactgcatggtagggggaggtgcttcagagctttggcttggccaacattatctttaacacagcccctccacaacccggtcactcatggattcaccagaaattgggtaatgatatttcttaaatgtagagctcatatgtacttcagtgtttcatattagaagtgctttggtctttatttagaagtttggcgatgtttttgtgaccaggaatgtgctgtgggaactttcctcttatttatatcaattaacctatggtgaaactggtttccttgtacactgcatggcttaaagctccagtttctaagaacctatggatgatgttaagtgaagacttactgtgttgagggcctaactctaaaaatagaaagaaattaatccaaaatgtatttctaaggactaacacttgtattaaattactccaaccgaaagaacaaactcactaaggcgtgagtggagagatagaaaagcacagtggaaccaaatctctgagatatccagggttagaagtaaaaacgtcagtcgctgctcaagtcctggaggctttgatgatggttcttactacagcccttttctgttcccgttcaattctggcatcaagagatgtttgaaataagttccaccctgtatctcatcaagacaactgaacttggagaaatggtggaatttaaaatactgaaagatcactgccagaattttctcagttcctgcttccaaaatgcctataacctgcagaagatacagtttgcatcacactaaaaatggtccggtcatagctgcagtctgcaatttaatctcaagtttctacacagtagaccactgtcattaatatcaaggtaagagcttttaaaacctatactctcttaaagtcctacggtatcattaagttttagagtttaaaattcagaatttaaaggtattgaaaacccttcaagtacctactccaactccactttataaatgagaaaaccaaataccaggtgagtccttcaatatataatgagcctgcggcactggtagggttagaaacgtaacccttgcccagtattgaaagctaagattaacaggaacccgttgctttgtaaatcccagtattaaacgctcaagaggcagagcttggtggcaaaaacgatcactggggtgccaaagcgagtaacctcagctaattaaacacgctcaataaaaatacacgagaccaagcctacgacgtaaagatgcaatcctacgtagggtcttggtgttatctcctgccttctgaaccccgctgaccgttttctgaggttccactcatgcaggaagcgcgcggtgacgaggctccaattcctctcaaagctgacaccaccctgcacctggggcccctgatggcagccggtcctaccgggttctaaaattaccgacgtgggatcactgttctaaggctttaggcagccgtaaattcgtacccctcagatagaaggagctgtggaaactaaccaggaccccgagtcccccaaggaggctgcgcgccgctacgggacccgacctcgcctcacagctgcggccatcgccggcccggctcggaggaggcgaaagcgaggccgcggacggccctcaccccgaatccatggaccccgcccgcctggcgggccacccttctttccgtccctcccccgaagcctctccgtgcctcgactcctccgcgaacaccggaacccagggacgtctgccccttttccctcaggcaactccctggccgcccaccgttgccgtagcaacgcccgcctccgcgctcgctccccgcgggcttgctcaccagccctgccccgccccgccccatactgcgcatgctcgccagccccgcccggcccacattgcgcatgcttgccaaccacgccctgtccacaccacactgcgcatgctcgccggcccccgccccgcgcacggcgtcagcgtctagacgcaggtgcgttcccgtcgaggctcgcgcagcgggcgtttttggggatcgcctggcgggggtgttcgggagccgcgggctgaagcacgggggcgtgcaggcgcccaggcctcgtgtagtgagggccgagccccgcgccggcttcgctgtagtccgcagcccccggcggctttgtgggcgcagccacgctcctcagccgcccgcccacctgggcctgggccccggttgtttccctgcggtggctgtggtcgttcccgttccagggtctcgagcgcaccgccccttcgctgcgctgttagtcgagggcagttttctgggggatcccccgatccccccgcgccgctcaggcgtcttggctcgcggaagcgcaggcgccgactgcctggcgtcgtccgtgactcctggcccttctctgtggatccctttgcttctcgttgcgggttgtgtttcctgcttcgtgggcctggccgtttgcgtttggatgcaggcccgggtgagccctgcgtggcccgctggccttttcctgctccctaggtgactgagccgcgtgtgtgacacatcggagtgaattgaggcaacgcgttcctttccaggcttgcagcgggcggtgtcgttcacgctcctgagcagagccttccggtgctttactcgacgccacaaatagtgcagggttcctcccaggggctgtcgcgagctagaactcttccccgcccctgtgagctcgggctgttcttcctcctccgcgtggctcactccagcctcggatgtttcctcgctgcacagacctgctcgggaagactcgagaaggccaccccaggactccagctctccccggaagggcttcccctcggattgcgtcttggcccctggaaccctccctctgtatcctctgctgttcctctcttggcctccatttgggttgtggcctggatactctggctcgctgcttcccttctcttaaggatcacagccctgcactgcctgtcgtccggtgcctggaaaccattgtattttttggtctgattttgtagttgtttgagaacttaagtctggtccctcacactccatgcccagaagcagaaatgagtaaagtttgttttatcttttcttaatatgacaattattgtgttggttcaacttatgttgtactttaattagaagaaatttggccgaaaatacaaggaaaatatacaaatgcaagtaattttttttaaacttccctgaaagcagggtctaaagaaattaccaaccaacttagactggatctagaagaaaaggaagggtctttgcagtcttaggactcttccgttccgcgacgtaggtgttaggataacagccataaatggttgtaagactttgggctcagataagtagacttaagttcaaattttgacttattttacaagtgtgtgatttttggcaagctcatcttcctaaaccatgagctccttatttgtaaaggggacattagccactctccagcaacagccctggtacttcttcagtcctgggatgggacgtatgattagcctaagcgaaccagaaaatccaggcccgtgaccagtgacttgatcagggctggcgatatatctaggtaggccaaccaggtggactcagtatttttgtgggtgctactggaaaatttatttaattctaactgaatgtagaaacagcaacagacatgaaatggcagttgtattgctgtcttatcatgaggtgagggcctgaagctatggtagccaccctgtgaaccttggaaggagggttctacaggaactggcagagctgagactgggacgcaacccatgtcctggtgacgtatttgagtcctgaggctggccctcctgttagtcttttctcttactggcttcagccagatgggg

SEQ ID NO: 586908 - DNA, 4001 bp, Homo sapiens
ctacaaataagtggaattaaccatcctctagcattctatagctaaatatattgagggctgggcagggccaggcattctgatgcttacgctaggggaagatctttgaacacctgacttccctgggagaccaagagcgccacacagtgacttgaaagggccaggactgccctgtaacatggatgcccacaatgcagggtctctatcctgcatcccctgccctgctaaggggaaaagtcgttcagagcgggccacactggaaaaagagcaggccaggtcccaacataggaatttatctcacatcaaacctcccagaaggttaattataaaaaggattttaattctttgaggaacttttcttatatgaattatgttttttaaaagtagacaaattaaactctacttgagcaaagaactgttttcaaagagggcacccccataaccagaataggtccagagcaattctcaggctgccacctggtgggataacatttatggacaggaaaaggaaagtgatgtacagaaaagcaaatgaggtagagaaatagctggattccatacagcctggcgtttgccttctttgaacagggtttcaaaggctgaccacctgtgacggcctgaaaatcagctgctgtgattgtctgagactcaggtacttataacagtaggttacagtctgtttacacatctacttaggttacagttcactaagtacagagaaacttttaggctaaacttaaaatattcaaggaggcagcgttaggctatacttaacacctacttagcacaggtaactagaagtggctaaaacagaaacgaattcttgaataactgagtgaatgccacacttagaaaaggttgttttatgcagctaattatagaatcacggacaagaactgaaagagttgctgcctgaactttccactcgaggtctgtgttagaatttaggaaacgccaccctgataaatgactgcaaaagacaagaatgcaccatccccaaacatgccaccctggcatattgatgactttgagctataagtaacagaaccaaacaacacaggataacttattcagctacccctcaactgcctaaaataaagtatgactgctttttttccttttgttcttattatttttcgactcgcctgttgtaaacagaaatttacacctataaaggaaattttctgtagtaaatgtatctgtatcaggaagacagctgcttgggggcaacttttatcgcctgagcgcctcatcgggataacaaagcaacctttattcaccatacatttcccccatcacccttccaaaaggtctccaccacgccccaaaaggcccacgcccctattccctggcccttctttgtctcccacttttgtggccctctagtgcacgggtacataattaaaagtttttctcctgttaatctgtcttatgacaatttaatttgtggcccagcttaagaacttagaagggtagagggaaaccatatttccttcccctacatttgaatcttctttacaccacactctcccgggtcatttggactctcctggaaccccctggagctagggaagcgcagggcctcccaagtcagattctgcttggtgccgagcggcagttggctccctgaacgccccgccaggaggatggacttcaagtccttgaccgcggcgcccgacatcggtcgcccgcaccaggctcctgccgggcccagcccccctgcctgctcgcgggggctcggaggacccggcctagcgcccaccgcggcgtcccgcgccccgggcccctggcttcagaagactggccgcgcgcggacggcagctcgggactcacaaggactccaggtgcttgagctgctgcagctgctgcgcgtcgtgtcgccgccgcttctgctcccgacgtcgctgcagctcctgctccggcggctcacgcggccgccgcgcgcccgcagcccccacgtcctcgcgcccaggccgggacgacatgtcagcccccgcagcgccgctcgggcaacccccgcggcgcggctccggcggcggcggcggcggcggcggcagccaagagagcacttcctccgcgcggcggtcgcggggcttcgcagcgccccctcccgccgccgccccgcaactcaccccggcggccccgaagtctcagcctcggccacccgatccccgcctccccgcgtcgggccccaagtcaggggctccgggtctcgggcccagccgccaggcgggctgctgcgggtgggtggggagcgccgcctagctggagccgaagcggggcgaggcgctagttgggagcctggaggttcccgcccggccacacccacctcaggtatactagcaacagtcacatagggatgagcagatgaaatgtattcataaaaaaatgttcaaattagccaggcgtggtggcgggcgccagtagtcccagctacttgggtggctgaggcaggagaattgcttgaacccaggaggcagaggttgcagtgagccgagatggtgcccctgcactccagtctgggcgaaaaagcgagattgtctctcagaaaaaaaaaaaaaaaagtgttcaaaaagtgaaatgtataaacatataattatgttcggtaatagtgtgcacccagctttataactgcggtcatctgatataccatgagagacaacctaactcttttgacaggatgggtcaccatgacgtcaccactgtgccagtcacccgaggagccaagatcctgagaaatttcatctttcacaaatgcagatgtacagaaaagacacttatttatttatcgaggaaatttctacatttttgcatatatgtagaatgcttacacagtcaccattgtaataatgagctttgattgagtcatatttgcaaaaaatgcataaaacaaatttgaactctctaaaagtctttatatagttgatgcctccagtattagaaatgatgttaagatgtaatacatagcatagtgaattgtaaaacataatgctgacaatttacaataatgaaaaagctaaaagagaaaatagaaaaacgaaagcaaactaaaaagaaaattcaacatagaaaaagtgtattgcagggatagattatgggcaattgcatggcgattgtccacatgaactgcccaacttttatgatgattaacatattttgaagtcttgcatcatgatgaatagcttttttttttttcttttaggacatggctctcctcgatgatacagtctcattaattttctatgtgatactgctctttccaaaattctttttaactttttaaagttttttattttgtagagacggggtctcgctatgctgcttaggctggccttgaactcctggcctcaagcaatcctcctgccatagcctcccaaaacactgggattacaggtgggaatcactgcacctgactatgaaattattttgtgatttgatattctctgacttctctttgtgctttctttctgttgtaccctcctgtccatgaacccctctgtttttcattttattcttctgccccctcctaagacaccagagattcattcttgaggccagtcaagcagccttggtgttggcccactggtggggcagctgcagttggtccttagtctgtgctactggacaggttttaaacctttcagaatggagcaactaaaaaaagaatagattttctcctgcttgtattgatcacccttcacagtgtaatcttgacaccattgttttgctgctaaggtgtatttttacaagctcttatcttaccagtgacctttccccactggggagatgaggagaggaaaaaagtaggagaagggaaagatcacatggctagattagagagtacaatgcaaaatctttctttttttcctacccaaaatacaagtcttcaaggaactctcatggtgaagtggaccctcaggcgtgcatgtctatggtcttctgcagcgcagtagaaacatgagaatccctttggtcatgcactaaaaacagctgttaaaattact

SEQ ID NO: 586909 - DNA, 4001 bp, Homo sapiens
tgctggccaggtagcaaacccatctgcctagtaaaagattagggtggaggccggcgcggccggcgcggtggctcacgcctgtcatcccagcactttgggaggccgaggcaggcggatcacgaggtcaggagatcgagaccatcctggctaacacggtgaaaccccgtctctactaaaagcacaaaaaaattaggcgggcatggtggcgggcgcccataatcccagctactcgggagcctgaggcaggagaatggcgtgaacctgggaggcggagcatgctatgtaaatggcacacctggtctgatcaatctctcgtgccctatgtaaatcagacaccgcctcctataaaaccaacctcttcttgccctgaacccggaaacccgttcgggaccccttcctctgcacgagggagctttcctctttctttttcctttttctttctttctttttttcttttttttttttttgagacggagtcttggtctgttgcccaggctggagtgcaatggcatgatcttggctcactgcaacctccgtctcccgggttcaagcgattctctcacctctgcctcccgcgtagctgggactaccggtatgcgccaccacgcccagctaattttcgtatttttggtagagactgggtttcaccacgttggcctggctggtctcgaactcctgaccccaagtgatccgcctgcctcagcatcccaaagtgctggaattacaggcataagccacctcgcccagcctcctgtttctttcatctattaaaactccactcttaaactcactccttgtgtgtcctcgtccttcagtttctttggcgtgagacgataacctcaggtatttacctcagacaactctgctacttcagaagtatttactttattaaatgaatatgatttattgttttgaagtaaaatgtttaaggtatgcatgtattttttatgatttcccactttaactgatttttttattaaatgaagaaatggtctcaatcacattggctaacatggcctctatttatttaattcatctgtttttcccactttggggcatcaacagcatggagtatttggaaaactacttgtatttgtaaagagtaaaatgcagtttaacaaagaagttagtttgtcattgtatagttcaggaactctggcctggatgagagcatgagtttgaaattttgtcctcaagattttgtttttatcttaccatcaccttttatgcttaagtttatgattggccataattatcaaattgacacattatgtcatgtgaaaatctgtttaccaaacttttctattaataaacttgatgtttaattgtaatattaagagtcacagagtgctgtagattctgtttgtcatagttgtgtagcttttagagtttagggaaatctagtttttagaattgacacaatgatttttaattttagcagtgtgttgaataacctgtgatataccattcacttattaacttcacattgttgtataataagttataaattttagatcagataagaaagtaaaactggtattaatttgggaagaagaaattgcagaacttgagtgatttttccaaataatgtgtcagctgtaacttgaatgtgttatttttatccccaagggtattttgaaatatacttatgtgaatttcttatagtttattttaaccataaaactattttgatatttttataatgccatcgatgatactgtatgcatagtgagggcatgggttgtctgttcttaccaccatattcccagcactagcatggaacaaatgaataagaacggagtaaaaatgcataatctaaacttgactatgtgtgtcttcaaaataatacctttaagttattttgaaggaaaaaactatgtatccaacaaattcaaacagatacttacaaaattaagacgattgtaaatgtgtgttgtcctccttctcattgtttttcacatccaaaaatgtcctcttggagcctcttatctgagtagcttctgtggatctgatgatgctaggattttattttttcttttattttaaagttcttctgattacatcatctctttgtatagacatcattcttgacagatggcatttattaaatatggacagtagcaggcagttaaaaagacctgcatgagataggcaggaacctttcttttttctttctgactctcagaagcaataccagcattagctttatttaacttctagattaatttaaaaagaaacctctttaaattatgactcaacaggtacagggtgaagtgggggaaatgtatgtgtgttttaaagcttcccaagtgattttgaccatcagttaagtttagaaaccactgattacaattaatttccttagaatttgctcatatatttaattccaaagaggaagaaaattgaaattttaaaaaacatatgagtatttttggagatgacataactttccttttattgtgttaaaaaaagctttaagaactgtttttttctgcatttttattaattatcaagatttagtgatggtttagagagctaaaaacacctttagggtgaattcagaagatctagcagatacaatgatgaaatatgatcagcaagctttaggagaggataacaaatgtgtgattttgaaatctcttctatttgaaaccaatccagagtcttgaatttgatccagtatatagtatgctacaaatggaaagattaaactggagcaatataattagggtaagccattgcatctgcacttgtatcgcagcaactgaatttgaaaccagctgcaaaatggtgactaatctctctggcaagcccacatgagagtgtagtacaataagccagcttcagcctcatgagcacatgtttcttcaacttgcctctgagcaggtgatggtgatgatgcaatctgattatacttttgaatgtattctaaccacagtcaacagtagagtctcacaagggatttcacaaaagacttcaaaccgactgtatatttttcagagagttgagctatagacagccatggaaagtagtagttttttttttcacgttagtgactactgtactttgcagtactttataatcttaagtttaggaggctttagttttcatatgtgaactgaagatgagaagaataatgtggaaagaaagtacttgtacttggagcttttattctgaattgttcacaacaacttacactgatcaattaaaataattaaattgtctagactatttaattctgtacaaacaagagatggtaaatcagtgtactgtgtttaagtggtacactaacctttccatattcagagaagtacctccctgggtcttgaacattaaaggtgtttaataagtactcagtttgacttggacttgagcctttatttttgaagggaataaagtttcttcttccagtgtacctcagagggacttggtaagcatgaataaagccatctgtttgaaaatgtatgtcatttttggaaaagtgctacagaacctaaaatacagtcacaagtattatttcaaatgtatagttcagaagtagaatacttagaaattgcttgttaatcttaattgtaaatagctaaaaaaaatatagcttgcaataaaggacacaagagcattaaaatataaaagtcacaaactatacatctctgagaataaagggggaaatgggatgtaaaaaccctaggctggtggcactcacagttggtatacagcagaatgactttggctgcttgtcagaagcgaataaccctgggcctcttccccatcacttctgattttataggtttggagtgtgtcccaggcatctgtgtttttaatcatttccccccctaacttactctccccatctaaacttgagaaacacccagactactgtagtattatggtactatagactactgagtattagtacagtactatagtgctgactagtaagcttcctaattgccaaacaaaagaaaaattttcactgtcatcaaaagaaataaactttcttc

SEQ ID NO: 586910 - DNA, 4001 bp, Homo sapiens
gctgcatatggacaaacttccaggcacttatctcctaaattttacatataaattgttaaaacaaaatagctttaaaatactaatcacctggaattcctgactaaaagtaccaaaatcccatcctcaaaaccactttcctagaaacaacactcccagaagctgaaagatatttacattgcaccagagtccctgatggctatgcttagatgttaaagctttgctacaggcaaaaaatatcaaggaagaagtgacactattgctacatgcacatgcagcatgttttaagttgtgaaaacaaaccattataatccaaacagaatttttcatgatctgagctactgttagatcagcaatgctgaaactgcttgacatttctttttctaaaaaacaaaaagagttatttgacaacactgtgtagcagtgcacatttataataaagattatgcgctttaagcttgcgatcacataaagatttgattttcaactagtccgtatgttgcactattgtcagatcattgtgtatccgtagctgaagtggtggaaacacctgaaaaattatacgactagcctacatttaaaaacaaaactgaccctgtctgacaagaacccttaagaattcgcctttttctaatgctcaaacattctgcagccgcttgatctggcgaaaaatcgtcaaagctcctggttttatcatttgctgcagggaaaaaaagaatatggctgaaaattctttcagaagggtggtatttcaaacaggaccacccaaaacacttaagaatacgcagcggagagtagggtgcagggagggtaccttacgaaacagcgcacttcgggccctgcacgctacctcatttccctaatagggatgaaaagctcaggcctctggtagcttccagctgacgccagtgctctctccacaccccttttttgacaggattatccggggttgaacgctgtgtcacaaatacgaattcccgcgaccacgtctaagtggtctaacaatcaatcaagcatcttttacaaaaccaaacccttcccccatcccgttccctccatctctctccctagccaaacaaacctaggagagtcctcaagatggattttcacaaatcctgcagcgcactaactgggaggaagaaacgatacagaaaataagagtgtcggccatccccctctctgcaaccgaaattacaggctccatttcctgtccccttgggaactgcaaaatcctctgctgaaaaccggacgcctcccagcccctccaggccggcgcacgcggccgccgcgctcccccttcccgggccccgtgggcgccagggggcggcggggacccacggcgccctcccctccccctccccgcacggcacccacctcggggcagcggcttcacctccccgttctcctcccgggaggccccgccggcctctcgggccccaccgagaccgtgcctcctcctctccttctcccgcttctccttaggtctgcgcgacttggcgttagccgaggcagcggcggcggcggcgggcaggaggagatggtgaggctgagcgtgcagcagcgtaggagggaccagcagtttgcgcggcaccggctgagacaaggaagcggaggctgaggagggaacggccgtgccagcggagaaagagaaactgctccgagaagaggacggggagggagcagcagacagaggggcaaagctccaagacgcggggctgccatagctctgaggcgaaggtgctgccggcggctgcagctgcctgctgttcccgccgctgcccccttctccgttcactctccgcggtgccttcttctcctcagtccggaccttcttggcggacagagaacccggagggtcccgggaggagagttgcagcttgccaaacggttctttctccgagacggtggcggtgggggccgcggcagcgacacagtgcacggggctcggcggttccgccattttgcgctcctgttgtatttactctcctccgctagccggcgcggggcagggggcgggccctccgcgaggggtagggaaggggcggagcggccaggccaccagccggcattgctccattgggcaagccacgctgagggatccacctaagagccaatcaaaggcacaaacatcagacgaaggggcgggatcgccacagggaccctcttcggaggtcagagctcggcggggtgcggctagtggcggagcgcgctgcgaggggagggctttccactgtcgctggcgtgaactcgcgtgcccggtgggtatcagggaagaacccccgccccggacccccagatctgccatggccgaggtagcgatcgtctctgcggccacgaagactgttttaacttgtaccactttcccttccatttttcctggggtgcctctcaccctgcatctgcgcgttcagcaagctggatttcgggaatgctcagttcagaagagaaaaaattgccgggaatcaagtccttctttttgttagtcggtagtcgattgatgggaagtgttcaaaatcattcgatgtggtgacaaggtacgttattattgctagatcatgtgctgtaatccattgaaggagataacttccagcaaatctagaactttagtattacttacaagcttgaaggtgagagtctccctttggagacttttgaactgttgtgactagacccttaagatttttattttatttatttatttatttattgggacggagttttgctctgttgtcgaggctggagtgccgtggcgcgatctcggctcaccgcaacctccgcctcccagattcaagcgattctcctgcctcagcctccccagtaacagggactacaggcgtccggcaccatgcttggctaatttttgtgtttattagagacggggtttcaccatgttggccaggctggactcgaactcctgatctcaggtgagcggcccacctccgcttcccaaagtgctgggattacaggcgtgagccaccatgtgcggccttaagatttgaattttataataattattatagccgggcgcggtggctcacacctgtaatcccagcactttgggagaccggggcgggcggatcacgaggtcagaagttcgagaccagcctgaccaacatggtgaaaccccgtctctactaaaaatgcaaaaattagctgggcatggaagcgcgcacctgtaatcccagctactggggaggctggggcaggagaatcgcttgaacccaggaggcggaggttgcagtgagccgagactgcgccactgcactccagcttgggcgacagggcaagactccgtctcaaaaaataataataataataataatattattattattataacgtagacttgccaggaaaaattcgttggcgattatttatggatgtttgaaaagcaagaattgtttttttaggtttctgtattttagcgtttagtaagcacactgcgtgttcgatgttttgtaagcatgtgctttgatttttgcttcgaaaataagcaatttggggagatgggttttagcttaaaagataaggaatgtggccgggcgcggtggctcatacctgtaatcccagcactttgggaggccaaggcgggcagatcacaatgtcaggagttcgagaccagcctggccaacatagtgaaaccctgcctctactaaaaatacataattagctgggcgtagtggcatgcgcctgtagtcccagctactctggaggctgaggcagaagaatcccttgaatctgtaaggcagaggttgcagtaagctgagttcgtgccattgcactccacccggggcgacagtgcctatttactcatttttttaagaatatttttaagaattttttttttttcggccaagagtggtgggtggctcacgcatgtaatcccaagactttaggaggcggtgatgggtggatcacctgaggtcaggagtttgaaaccagcctgactgacatggtgcaaccccgtctctactaaaaatacaaaaaaaattagccaggcgtgg

SEQ ID NO: 586911 - DNA, 4001 bp, Homo sapiens
atttttagtagagacggggtttcaccgggttagccaggatggtctcaatctcctgacctcgtgatctgcccgccttggcctccaaagtgctgggattacaggcgtgagtcaccgggtgtgggtgcccggcccagttctgtgttttttgggtttgtttttttttttttttttagacagactctctagccctgtcctgcaggttggaatgcagtggcaggatcttggctcactggctcactgcaacctcactgcaggttcaagtgattctcctgcctcagcctctcgagtagctgggattacaggcacctgcctccatactcagctaatttttgtatttttagtagagatggggtttcactgtgttggccaggctggtgtcgaactcctgacctcgtgatctgcccgccttggcctcccaaagtgctgggataacaagtgtgagccaccgtgcctggctggtttccttttttttttttttttttttttttttttttgagacggggtgttgtacattttgcccaggctggtttcaaactcctggcctcaagcaatcttcccaccttctcctcccaaagtgctaggattgcgggcatgagccactgagctcggccaagtgctgtgttctgaagcaagctgcttaatctcctctgcctcacaaatagaaataacagaaccttgtctcataagaattaaaccgatgacacacagaaaaatccctaagtacaggatacagagcaaagtcaataaattgagtgattatctcgtccctttcctgttttcaaacttgaaatcattggtttcccactccctctagcactgccatcgattgagtgcctctcatatgccggacaagcaaggaccggtgtgctggagttgcgtttccagcgcatggttgcttgagctgtatttccagcgcatcgttgctcgagctccgtttccagcgcatatctttgcttgtctggcatatgagctgcggtgcagggtttcaaagccatagttttcatggctttcctaatctggccccgctgaaagcaccctggtccatcaggcaggatgcataggtgagccctgtggtgaaggccaggtctggtcccttttcgtaggccccgacgggtgcagtgggcacttcttgccctcttcttcctggatgccatcctctggacaccccaccctccagctgaacccatctccagccttctctcttcctccattatttatttattgagacagggtctcgctctgtcacccaggctggagtgcagtggcacagtcttggctcactgcaaccttccgggttcaagtgattcttctgccctagcctcccaagtagttgggattacaggtgcctgcaaccactcccggctaatttttgtatttttagtagagccagggtttcaccatgttgcccaggctggtctcaaactcctaacctcaggtgatccgcccgcctcggcctcccaaaagtgctggggttacaggcgtgagccaccgcgcccggccaagccttctcgcttccttccaacacccttgctccttcccgcccccgactactgtctcagcgaagccgcccctgggtcccctagcccaaggtgctctcacctctaaatttagaggggcctttactacgagcttttcggtcttctgtcagtgatctacaaataagtgaactacaaatcaagccaatttcgtttctcagtgcgtttcctaatgtttcctctgttctcctgggcttaaggagaggccatctctctcctgtgtctacggtgagccgggaagaatcggctccctgcactggtctgcccggcctaggccctcctcgcccatcacgcacgtgctcgggtcctgggaggccgcgtcagtccggccgggaaggagcaggacccagtcgccatggctgtcccggcgtacgcaggaccgcggcctggggcgctcacctcgctccaggagcccagagacctcgccgggctcgggctgaggtgttgccgggctctcggcgtcccagacccggctccggtctccaggcaaccgcggacgccgccaggcccaccctgtgctcttaaaggggccgcgcgccagcgccaagcaggtgtcccgcccttgctggtcctgaaggccgggggaaaggctggacgctggaggcagcaggccagggttttcccagctctgctaactgcttcatcataaaataggaataacgcaggcattagttttccattgctgccgcaaacaaattaccataaatttagtggttcgaagcaacacaaatttattaccctacagtatgtaaattagtcccacagtgctggttccttccagaggctgagggagagaatgcgttttcttgccttttccagcttttccagaagcggtccccaacctttttggcaccagagaccggtttcgcggaacacaatttttccatggattggggtcggggagggatggtttcaggacgattcaagtgcattgcatttattgtgcactttatttctactattattacattgtaacatataattaaataattctacaactcaccatcacagagactcagtgggagccctgagcttgttttcctgcaactagacagccccatctgggggtgacgggagacagtgacagatcatcaggcatcagattctcataaggagcgtgcaacctacatccctcgtgtgtgcagttcacaatagggctcgtgctgctatgagaatctaatgcccaccgctgatgtgacaggaggcggagctcgggtggtaacgccagcgacggggagtggctataaatacagatgaagcttcgctggcttgccggcccctaacctgctgtgcaccccacttcctaataggccatggaccactactggtctgtgtccggagtgttggaatccctgttctagagactgcttgcaatccttgactagtggtacctccttccatctccaaaaccagcaagacagcctctctctggccagcagggaaaggtctccacctttgaaggactcacccaatggactgggcccacccagacaatccaggataatctctctgttgcaagatccttaactcagccaggcatgatggctcacacctgtaatcccagcactttgggaggccgaggcggtcggatcacctgaggtcaggagttcgagaccagcctggtcaacatggtgaaaccctgtctctactaaaaatacaaaaattagccagtatggttctggacacctgtaatcccagctactcgggaggctgaggtgggagaatcacttgaacctgggaggcagaggctgcagtgagctgagatcatgctattgaactccagcctgggcaacaagagcgaaacttcatctcaaagaaaaaaaaaaaaaagatccttcactcaatcacacctgccgagtcccttctgccacgtgaggcagcgtggtcacaggttctggggattaggacacagctgtcttgggggctgttatcctgccacagctcccaatctggagagttcataagtgggatcctgcagaccacgccagcacagtgccagacacgatggcacagtgactactgtactgcctcctccatctgagggattctaaagcaggaaggggagccgcccacagtctggagaaggggtgggggcagcagggggagccacatctgtcatctctgggcccccaagagggcatctttacttccattttcagccaagttcaaacaggacaaggttccatgaaaactatttgaaaagacagacagggattcttatattcccagaaccattcaaggccagtaactggaatgttctacagttcacatcctgaggaaaccaaatcacagcatcaaattatgggaaatcaaactctttttgttcccctgcgaggacagcattttgcgaccttggccgcacagaggaatgtttcaaatagtgacccctgtcccatccagtcattttcttccagccgggcagagaatcccccgtgtttaaaaatttaatgtgaatcagggctgaga

SEQ ID NO: 586912 - DNA, 4001 bp, Homo sapiens
tttttagtagagacggggtttcaccgggttagccaggatggtctcgatctcctgacctcgtgatctgcccgccttggcctccaaagtgctgggattacaggcgtgagtcaccgggtgtgggtgcccggcccagttctgtgttttttgggtttgttttttttttttttttttagacagactctctagccctgtcctgcaggttggaatgcagtggcaggatcttggctcactggctcactgcaacctcactgcaggttcaagtgattctcctgcctcagcctctcgagtagctgggattacaggcacctgcctccatactcagctaatttttgtatttttagtagagatggggtttcactgtgttggccaggctggtgtcgaactcctgacctcgtgatctgcccgccttggcctcccaaagtgctgggataacaagtgtgagccaccgtgcctggctggtttcctttttttttttttttttttttttttttttttgagacggggtgttgtacattttgcccaggctggtttcaaactcctggcctcaagcaatcttcccaccttctcctcccaaagtgctaggattgcgggcatgagccactgagctcggccaagtgctgtgttctgaagcaagctgcttaatctcctctgcctcacaaatagaaataacagaaccttgtctcataagaattaaaccgatgacacacagaaaaatccctaagtacaggatacagagcaaagtcaataaattgagtgattatctcgtccctttcctgttttcaaacttgaaatcattggtttcccactccctctagcactgccatcgattgagtgcctctcatatgccggacaagcaaggaccggtgtgctggagttgcgtttccagcgcatggttgcttgagctgtatttccagcgcatcgttgctcgagctccgtttccagcgcatatctttgcttgtctggcatatgagctgcggtgcagggtttcaaagccatagttttcatggctttcctaatctggccccgctgaaagcaccctggtccatcaggcaggatgcataggtgagccctgtggtgaaggccaggtctggtcccttttcgtaggccccgacgggtgcagtgggcacttcttgccctcttcttcctggatgccatcctctggacaccccaccctccagctgaacccatctccagccttctctcttcctccattatttatttattgagacagggtctcgctctgtcacccaggctggagtgcagtggcacagtcttggctcactgcaaccttccgggttcaagtgattcttctgccctagcctcccaagtagttgggattacaggtgcctgcaaccactcccggctaatttttgtatttttagtagagccagggtttcaccatgttgcccaggctggtctcaaactcctaacctcaggtgatccgcccgcctcggcctcccaaaagtgctggggttacaggcgtgagccaccgcgcccggccaagccttctcgcttccttccaacacccttgctccttcccgcccccgactactgtctcagcgaagccgcccctgggtcccctagcccaaggtgctctcacctctaaatttagaggggcctttactacgagcttttcggtcttctgtcagtgatctacaaataagtgaactacaaatcaagccaatttcgtttctcagtgcgtttcctaatgtttcctctgttctcctgggcttaaggagaggccatctctctcctgtgtctacggtgagccgagaagaatcggctccctgcactggtctgcccggcctaggccctcctcgcccatcacgcacgtgctcgggtcctgggaggccgcgtcagtccggccgggaaggagcaggacccagtcgccatggctgtcccggcgtaggcaggaccgcggcctggggcgctcacctcgctccaggagcccagagacctcgccgggctcgggctgaggtgttgccgggctctcggcgtcccagacccggctccggtctccaggcaaccgcggacgccgccaggcccaccctgtgctcttaaaggggccgcgcgccagcgccaagcaggtgtcccgcccttgctggtcctgaaggccgggggaaaggctggacgctggaggcagcaggccagggttttcccagctctgctaactgcttcatcataaaataggaataacgcaggcattagttttccattgctgccgcaaacaaattaccataaatttagtggttcgaagcaacacaaatttattaccctacagtatgtaaattagtcccacagtgctggttccttccagaggctgagggagagaatgcgttttcttgccttttccagcttttccagaagcggtccccaacctttttggcaccagagaccggtttcgcggaacacaatttttccatggattggggtcggggagggatggtttcaggacgattcaagtgcattgcatttattgtgcactttatttctactattattacattgtaacatataattaaataattctacaactcaccatcacagagactcagtgggagccctgagcttgttttcctgcaactagacagccccatctgggggtgacgggagacagtgacagatcatcaggcatcagattctcataaggagcgtgcaacctacatccctcgtgtgtgcagttcacaatagggctcgtgctgctatgagaatctaatgcccaccgctgatgtgacaggaggcggagctcgggtggtaacgccagcgacggggagtggctataaatacagatgaagcttcgctggcttgccggcccctaacctgctgtgcaccccacttcctaataggccatggaccactactggtctgtgtccggagtgttggaatccctgttctagagactgcttgcaatccttgactagtggtacctccttccatctccaaaaccagcaaggcagcctctctctggccagcagggaaaggtctccacctttgaaggactcacccaatggactgggcccacccagacaatccaggataatctctctgttgcaagatccttaactcagccaggcatgatggctcacacctgtaatcccagcactttgggaggccgaggcggtcggatcacctgaggtcaggagttcgagaccagcctggtcaacatggtgaaaccctgtctctactaaaaatacaaaaattagccagtatggttctggacacctgtaatcccagctactcgggaggctgaggtgggagaatcacttgaacctgggaggcagaggctgcagtgagctgagatcatgctattgaactccagcctgggcaacaagagcgaaacttcatctcaaagaaaaaaaaaaaaaagatccttcactcaatcacacctgccgagtcccttctgccacgtgaggcagcgtggtcacaggttctggggattaggacacagctgtcttgggggctgttatcctgccacagctcccaatctggagagttcataagtgggatcctgcagaccacgccagcacagtgccagacacgatggcacagtgactactgtactgcctcctccatctgaaggattctaaagcaggaaggggagccgcccacagtctggagaaggggtgggggcagcagggggagccacatctgtcatctctgggcccccaagagggcatctttacttccattttcagccaagttcaaacaggacaaggttccatgaaaactatttgaaaagacagacagggattcttatattcccagaaccattcaaggccagtaactggaatgttctacagttcacatcctgaggaaaccaaatcacagcatcaaattatgggaaatcaaactctttttgttcccctgcgaggacagcattttgcgaccttggccgcacagaggaatgtttcaaatagtgacccctgtcccatccagtcattttcttccagccgggcagagaatcccccgtgtttaaaaatttaatgtgaatcagggctgag

SEQ ID NO: 586913 - DNA, 4001 bp, Homo sapiens; identical to SEQ ID NO: 586911

SEQ ID NO: 586914 - DNA, 4001 bp, Homo sapiens; identical to SEQ ID NO: 586912

SEQ ID NO: 586915 - DNA, 4001 bp, Homo sapiens
taaacggataccatattactttaccatttacaactcaaagtgctgtaataattacattatacaaatacagtcaatgaagaaggtcttcttgctagataaacatttgtaataattcaagtattttttaaaaagtcactgtgagttattgcatttaagtcctggaataattatctgtattccacttaagatgctagacacatttttacacaagaaaaataacggaaaaatacagagaaattgcaaaggaagaaaaagtttcatcatcatctgattcttaagaggaatatcactaggtgatgattaggagtctgatggaggaaagtaattttaaaacaacttaatggctcagagaagttcctaagaaattgatgcttagggtttcaatttttcttaatactcagatataagacttaaagaaaatatatcagcatgttaaaaaccagttatctctgaatactaggcttactataaatagttctttttttttttttttgacgaagtctccccctgtggtcccggctggagtgcaatgacgttatctcagctcattgcaaccgcctcccaggttcaatcgattctcctgcctcaccctcccgagtagctgggattacaggagcccgccaccacgcccggctaattttttgtatttttagtagagacgaggtttcactatgttggccaggctggtctcgaactccgacctcgtgatccgcccgcctcagcctcccaaagtgctaggattacaggtgtaagccaccgcgcccggcccaatagtaattattcttttattgtttctatatttttctgaaggaaatactacatttacagttataaagcattaaggaaaggcaggccttaaaataaatcattgacataaagactaggtatcctccacagtcccactcttaataacaactgcagaaccagcactagcactgtagctgaaaagtggatagtacacacacgctcacatacacaatggctggcatgtagtaggcactcaactaacgtgtgaaatgaaatggctgaagataatgtaaacaagccaaaacaacgaaatgcactctgatttgggggcaacacagtaaacaatcacagtaactaccactttatccaaagctcgctgacagctgaatgggcattaaatgaaagagctcttcttccttgccctcctctttcactctgacgctagattgcacattcaaaacaaatcctcctccagccccgccccaagctctaccctccagtaccttcagcactggaactgacacaaagtccagggctgcgacggtgtccagacccgggcccctgtccaaggagctgcgcgctcacagatttggctggcgcaacataggcgggggcactgggcggcagcccatcatgcccgggacccccaaggacccgcgcggaagcccagagctctcagccccggcgggaggctggttcccctcgccctgcgctgccgtacctgcacacggtgatcaggttcctcctctccaccgcagcattgcgggcgctcaggcttttcttgccgcctccgccgccaccgccgcggatcccgctcaggccccccaggctccgggaggccatggcgggcttacccccgtgccccttttgtctcgtgccaccccgcacgccccccacacctgcttaagggggttctcgctcggtccgcaaccgtgggggcgcgggaaggatgtaggaaaggagcctggagggaggaagggtgtggaagacagcagggactcgcacccggggactgacggctcgcccttggcacccgagctccacacacacacacacacacacacacacacacacacacacacgcacgcacgcaccacctccgccctcggcgcgccgccgactgccgggctgcgcctgcgggtcggcgtcaggcgctctcctccttcccgagggacctcagcagacggcgcgcgcgcgagcccgtcggcccctcacgcccaaccacccacactccgcagccactcgtgccccagcccgggaggcagcggcaaggcccccggcctcgcgtgcgcagccccaccctctctgcgcctatcaaatcaacgctacccccgccggatccaatcgcggcaccagaggggcggggccggccgcgcggaccttttaaagcagcgggctcaagccccgccccgacgcgtgggctgctgtcaaggacgctgggctcgctttcgcagcccgctagctgccgccagtagccacacaggctagccgcggggattgtgggatgcggggccccacagcgccaggggcctattgccccccccttgcctgtagccaagctttaacggctgatacctatttgcgtggctgccgtagcttcagtgcctgcctagaaagcagcgcgccggctcccacacccgaccttgggcctaagtactaagaagggaggagggttccttttgtcctgacgccctcccaggggctaataaacagcaacacaatggcccgaggggggaattgctcgtagaatctccttcttggcgcgtctagtgccgacatttcttgcccctccacaccatgtcgctcccacctcagcctccagcgcagcccgcacccgggactgacggcccgcctaaggaggagcgtggtgccagtgtagagtcttttcgcgtcctgggccgtgactccggaatcgggagtccgggtctgggaatagtaagcccaggaacgacgcggcctcggtccagctgggctgctccctcagagtcctggaacgccctcctcgacgcgcgtgttcggaagcgcccccttcctagagcttctcactacccaccgttttacctgcaggagggtcccagcttgggtcaggtcctctgacactcacctacgcctgctgttcacctccctttgcaccaatatgcccagattttagagtgcaatcctaaatgacttactctccctatgggacctagcacagtgctgtacatagaacaggttctcaataaatgtttctcgaatttaatttgaagtcacatttgacataatttttactgaaatttcacggcttcagtggctccaaaatccatgtatctttcacctctacttttgaagtttctgtcaaagaatgtcagagaatatatagttttgtgtggctatctctatttttcttatatattatccctgttaatgcagggcatactgttactcttgaatgttttaacaacgcacgtttgtgtaataaagttgtaaattcctaatttctgaggtttttaaagtttaaaaatctctatttaaaatagtcaaaaaatcatccttttcagctaccatgtctaattttattctactattctgtttagtagaataaaaatatatgggctgggcgcggtggctgacgcctgtaatcccagcactttgggaggctgaggcgggcggatcacgaggtcaggagttcgagaccagcctgaccaacatagtgaaaccccatctctactaaaaatacaaaaattagccgggtgtggtggcacgcgcctgtagtggcagctactcggtaggctgaggcaggagaatcgtttgaacccgggaggcggaggttgcagtgagcggagactgcgccagtgcactccagcctgggcgacagagtgagactccatctctctctctctctctctctctgacatatatatgacatatatatgacatatatatgacacatatatatgacacatatatatgacacatatatatgacacatatatatgacacatatatatgacacatatatatgacacatatatatgacacatatatatgacacatatatatgacacatatatatgacacatatatatgacacatatatatgacacatatatatgacacatatatatgacacatatatatgacacatatatgacacatatatatgacacatatatatgacacatatatgacacatatatatgacacatatatatgacacatatatgacacatatatatgacacatatatgacacatacatatgacacatatata

SEQ ID NO: 586916 - DNA, 4001 bp, Homo sapiens
atttaacacataaagcaggggtccccgattattgtgctgctagcgtgcgctggctcctgaggcctcatacctatggctctcatcccccatctcgccgcttcccaccagtacccttttcctagggtctccctgacttccttcatcaacttggacctttcacagttttacagacacagtccttagtctctggtgatatgtcataaactagattatgagactggtgaattagatggattatttgattcatgcaagaactacataccattatatgtgaaaacgtaaagtcaggttctcatataagagtgtgggggatggagaactgggcctgaacatttggttgggaaagtaagcaaataataaagaagtgacttttgactgttttctctactagagacactatgaatatttcaaatgtcattgaacaggttacactttcacacttcttcccctaaagcttttgtcagattattgatagctgtgcctttcaatacattattttaaaaaaattgttgatgatgtcactcttggagaaaatatatgccagcattcataggtatttatgccactgttcatagatattttacatattaatgatttctttataccctctcgttccaaaatgttttttaggtaatttagaaagtaatataggatcacacatatattaaaacccttaggtaaagaaatcatggggaaggctaaataagggtagggggagaaaaggtgaaatgagggagtaaaattagtacctaaaattactggttttgattccgtatactttaaaaactgacctgaaaatttggttctgagcatcttagtaggaaacactatttgttactgattgaacccacatacattttttaactctggttggtgttaaactgtagggtttgttaacttttctagaagggagttgaaggtcagacctttattcagaaatgtgatcctccaaccgtcttgcattatcttactgtttgctttggggagaaattagacataaacctagtatttttgccaggaacataaagctgccttaattccaaagacttcccatagtagtctatctgtctgtctgtcttcctatgtatgtcatccgacaacaatatctgagaagctctcagagagttttgttttctggaagctacctatttcttagagtagatggtggaagttgtatttgattaaagtaaagtacttttaagttttcattgcctgttctttatctatctttccgtttgttgttgttgttgttgttgttgttgttgttgtttttgagacagtgtctcactctgttgcctatgctggagtgcagtggtacaattacagctcactgtaaccttaaattcctgggctcaagcaatccttctgcctcagcctccaaagtagctagactgcagctgcgtgccaccacatccagctatttttttttttggtaggaatcttgctaggtagggtcttgctatgttgcccaagctaattttgaattcctggcctcaaacaattctcctgtccttgccttccaaagtgctcaaattacaggctaccacacctggcctgtttgttctttctgaagatgctgtatgccttgggagagttcatcaataaaagtgtctgtagttttcaactgcatctttaatgaaatgttatgactaatttttcaactaatataaagcagactgctgtcagagcaacaaatagtctagaatttctaggcttagaatactattttttgttttgaggtatatttgaagcttctaattgaaaagtatatttctttctattcaataaaatgctgctatagatagtaagaacaatattaataatagatattgtacttacccagtagtcttgcaaatttcttttacatatatgtggggaaaaccatctcttttagtgctgaaaatatctgatgtgtttgttttcttcctcctacgatgctagagaaaagtattttcctcattctggttttaacggaagtctatgtattctctgcttctgtctcacagcaagctctaattggctcagaaacagcagggcgtgtttaacaactgggaggttggggaaggaagaatataggtttggtttcagtttcatttctcagatctgaaattacagcaccgccttttctatctgaaatgctttttaataagctatggctatataccaccttctggtctgcttggttaaaatctgaaggcttaacaatttttcctcacttgagagttttgagggctgcagaaagccccattgtcttgttatagacaaactgtgggatattctggcttaattgatcccttgggaatatgagtttacattgcagtcccagccttgtagagcaccaggttggagatactctaggtcaatatttcactggcctttaagggtggagttactgtccattcctgttttcctaaagtgtaaagaatgtctttcagggataggacttctttgagcaccccaataagtgctaaattcatttattgcagagcagaccagggctgcagcagacctgatggtcacattgtagagatttatcttttctaaggtcagtgtcagggccagagagaaaactgcctgagtgagagcaacaaaaatagctgatattttaaaaactaacagcaagtactgatatttattgtgtgtgctcaattagcttttggtttccacatcccacaactgattcacactggttttagatgaaaacatttaaaaacatttattttaaaatatttattgggcgcttaccatgtaccaggcattgttctaaatgtttcatattaacttaattactcttcacaacaatctcctgaggtagagattatttttatctcaattttaaaggtgaagaaactgaggcatagagattaaataatatggctaaagtttgcataactaatacatggcagagattcgaatccaggtttcaggccagtgctcttaaatcctgaggtttaggaagaaagaaagtggctatgaaggacagcctagatatgaccattacacttatcaccctcaggagccctcctcgtaaggggaccctgggcctgaactccaaaacctgggtttcactttgcatggggaccagtgtgatggttaattttatgggtcaacttgaccgggccacagagtgcctagatatttggtcaaacattattctggtggttctgtgagggtgaggaggcaggactagcttgcagctcctgctgggacagacaggacagcatgtggagactcacatcatgaacttttgcttcaagaattactgcagcaacataccaggaaagccaagagaattcacagaccctttgaaggaactgtatcgccactgcagtttctctgagatgccaaaaagaaaagtcatgagtctgcttgctttctcagcagggaggctgatagccaggggcaagttctcagccctggtcaccgactgcctggaaatagattcgatgttgttggcaggggcacagtgggagtgagactggcctttaggagtgtgggttgtgtggaaatggggtgaggcctgtgactgctggcttttccccacttccctggtgtcctatgtcactcagtggagacagccataatccccctgggaacataactccattggcctgggaaccacacccccgccccctacagcaagtgcagcagaccccacccaataagagtctgagctcagccacacctatgcctgccccaacctgttggtctttctttacctgccctggttgcaagacaaaggacatattctgcccactgcctcagaaacatgaatatataactagatgaccctaggtcaagtttgcttcctccctatagtaccacagctaatgcactcttgaaaatgccacctcctggctggaggccaaccaacacaaaaccagagcatttaacgaagatataaccaaggacccttacagagtccacttcactcccctgctacctccactggagcaggtgctggtatccacagctgaaagacctgaagatgtattacatca

SEQ ID NO: 586917 - DNA, 4001 bp, Homo sapiens
cacctcccaacatttcctatccctcttctggcttcattttttatctacttaggacttacaagcagcaaatattttatatattttaacctatttattttctgtccaacccattattctatgcactccataaggacaaatttctttacattttgttcattatctggcattgcctagcacataatagcttcttaacaaaaatctgttaaatgagtaacacattttcttagagtagttaaaagtaatgaatatttgaaaggccttgagctaccagtgtctgtgggtcaaaggacttcctcattttcctagggaaattatttcgcttggctggaactccaggtagaaatctggggaaatctctttactgtgctacccgttaggccagaatgaactccagcttctatcatctggtcacaaataatgaaaaggaagtttttttttcaaaaggaaagcaaaacaaatgaatatattttctcctgcagtttttgtagataccctagttacagactacaccttaccaactttctgctgtgtcactcacagtcaccgaatgaggccatttctcacacagcgttttccctggaggaggtcccttttgactctaggtccccagtgtcttaagacctttgctgttttcaccctctgcctttgctgggaagctgctcttctggcaaggggcttacactttccacagacacagtctgctcgggtgagatgcaataccttcttttagctggtgtcctctttcagaaatttaaccagccagtctctctctggaaatgctaaagatggaaaaaacagactccagattttttctttcgttttagccagtacaattttaagagcatctggatgtatgctgttggaactaagtaacaatcaaaatgaccatgattagtgtggacaaattttgtgattgccttgacttaagtcttggctttctaggggccctcagtgtcctgttttgaaacaattgtgaagacaaatattatctttagcaacgttggttattgacaaaggagttgcaggttggcatcctcaacacttcagttttctctctttgatgctcagcaagaatttccaagtcagcaaactctcagggacaagcccaccccatctttgagagaccctcagcaacaccgctgatatccatgccctagggaggtgttctgctctgcaggattcttagaactgatgtaggggaaacacacttcagaatctggctgtagcccaggagagctacccacaccctccttgcatagtctggcagacagaagccacacaagcaagttagtttcgttttcctgaagaacactttgcattttttttcttagttttcaaccagattgctggataagatgtatgtgaatgaaatactttaatagaataatatttagcctctgcagagtattaactttgataaaatgtaaaagttttaataacatcttacgttatgaagacagaattttgtgtaattacacaagatcacacgttcctttagaatcttcagtgcttaaattcctgaccctgtttgcatcgtttctctatcctcttttccaaagcctgcctgccacaatcagaaaccctcccactatcctaattacacttaatggtatgtttctttttagaagagcacttacaaagttattatcagttaaatatactgacatgtatttaatccattgatttttctaattactctagtatttttataagtaatcgtttatgtacaaacatatatttatataaaaagtacagctgaagttttaaaaaatagctgtcgcctcaaaagcataacaaataaaggtttaatgattcagtttacttaccaggattttcctgaaaatgtcatcgttttatatcagaaacttgaaacaggccatttgaacttttgctgtctcattcctcttctgatggctaggagacatgaagtgtaaggatccttttttaaaaactgaggcattaaattgtgaagtcttctgttctcccagtactctgactttctgagggtgtgtcagagtgccagttgagaagcaggaggaagttgaagtatagacagtttcagttttgctttagaacattcttttttcttgagtttagaaggatctgaaatgttttttaatcaataacattaccaaaaatatcaataaatttgaatcactgcttagaaactgtttaccaggcagatttttaagttataagagttaaggaataaggaaacaacaaacaaacaaacaaaaaaacccagtgacccaaaaaactacctacaggacaaagagaatggaaataccagggagaaaattaatatgtcagtgcaatctaagttcctgttactggttgaattgtgtcccccaaacattcatatgttaaagtcctaatcctcactccctccaaatgtaactgtatttggagataaggtctttcaggagataattaagttaaaatgaggtcattagagtgtctgtaattgaatctgactgtgtccttgtaagaagacgagattgggacacagacacatacagagggaagaccatgtgaagacacaaagaaaagatggccatctacaagccaaggagagagacatcagaagaaaccaaccctgataatgtcagagacattcgaaccagagtgactccattttgaatgagggctacgaaaatgaggctgagacttgctgggctgccttctcagaaaggtaggcattcctagcctctagatgtttatgattaagggagcaaattaataatatttactaagcagaccgtgacttgggagtgtccagatatcccaatatctggagaacagaggcattcttaattttgctttaaagaaaataatattgattcttgcaaaatacactaattaagaaaattaattctttatcagaaacccttgtagcaaaacacatctctccatatatacaagcattgtacctagggtggatgtgttcctcctcttactttcgggaacgtcctactctgtctgtggagtagctgtccttttaccactgtactttcttaataaacttgcttttactttgcactgtggactcgccctgaattctttcttgcatgagctccaagaaccctctctaggggtctggattggaaccctggtcctgtaacatttctggcaaccatgagggaccgatactgaagaacctccccaccaacccaaaggaaatggactatagcactgattggatgactttgggtaagtggtggggtacccgggtaaagaatgggattgggttagaggcccaacttaggggaattagagtctctccgaagacagggtgaattagagacccctgttaataaaaggcaaagatgcttgactgacctcggattagaggaccaacttaaaaggtttagagttccttctaagatttagggggttagagggccctctcagtaaagtccctctctgctaaaaaagggtttggcactgcaggctatgcactttgtattaatctgccttgtcctccttgctgcataaatcaatttcttggttgctgtctgtgtttcactgtcattttcgggagactttatctaaatggtcttagggattttaacttactcttttcctatgtgcctcctgatttccatgtgtctgctcttgaaacattgggaacaaaaagcattgacggctccgtctttaaaattgctgattgagatttggtattcaacagctatgagcaataaaattagattatgttttgttgctgctatgccgactaggtgtgatcgagaagcactaggatggaaatcaggggactctgatgttttgtttcactttgcacactaaaaacacttctttcctttcttgcattcaggcaaaccggctttgcttgttcaatccacactgtctctattgcccagaacctgcttgctctggtcattcccatctaaatcctcttcatttcccttgccttattcaacatttttgtcaaagtccatgttgtggtttatctaagattcatgactcagctcacttatgttatt

SEQ ID NO: 586918 - DNA, 4001 bp, Homo sapiens
aagtcttgagtagaaggttctccaagaagttgggctattttatgggagaaaattctagaacctatccccgcccaaaccaccgagactacacacttctgggctttctcagctgaaaccctgatcctgtttctctacagagttcgtgcaagaatctctagagtctcaggtaggctgcggcagggccacctttctgccagtggtgacatttacatggaccggcaccctcccccacacacctgcagtgcattctttgtgtctcctctgagccagacaactaccccacccagcccagaactgaactcctggagccccagcacaagaggtgtggggctagtgtcccctaaaagtgaggtgcccctacttactcccccgcctgcttcctatacattcagccctgcactgccatgcagaccacccacccactcattaaaggggctctgcccagtcagcccagaaatgccttaggtcatggataccctcgccctccgcctaacacagcagggggtgatctgcagtgagacagaaagagaccccattcctgcctctatgacttactctgctcccagccacacggagcctgttttgcaaaccaacactgttttattgtcaacacaaccagcccactctgccctgagaaggctatggacaatgggtgtctggggtctgtgggagagagaggtcagcaccctgagaactgctggggctaccacaggggctgggtgggtcagaggtatggtctggggggccaaccgcggaggagctgggcctaggctccccctggctcatctgcagcaggccagtgagagcgatcagctccggcccgctgagccaggcagtggaggggccccgggagggtgatgggcgggggagcaccctggcagacatgatggggggcggcggcagcagtttcagggagcccatcatctgaggagagagaatggaatgtgtttcctgccaggcaagcctggaggctggggtaaggacagggaggggaaagagctctcacctgctggggggccttggacaggtacaggggaacacgctgcccccggggcagcagagggtccgagaggaagacatcttcacagcacaccaccgggaaccctaggaggaaacaccactagggtggcgggctgcgggctcccacccctgggcactggttcccagaggagttggggcagccttgcgcccccgggggaccaagggaggtacctgcatctgggggcgcctgctgtccattccagtgccctgtggcaggggccacgggcctgagacccctgcccgaggctgcttcatacagcggccagaatgaggggtgacacagcgtccggcctgagaacgaggctcctgagctacagttggccccctagggtgaggaggacagagcactggagcctcaggccaccgcacagctccctgagcaccccagccagtcccacaggtttgcccccaactcacccacaccggccgaggtcctgctttggcttcatacttggggtcccagggcgctagtggagtcatcctcgagggggccacctcccaggccacctggggggaacggggatctggggggacgcttggggattataacaggctcacagtcagtgagaggctcttaggggtagtagaggcagcagggcctgtcctacctggggctccggggggctgctcagtggccgggcctggcaggtggtggggcagcagcagctgctctctccagatccaggaagggctacgggatgggggctgtgggctggaggggcagggactgaggctgcagccacaccgcccccacgcaccctcccctggagcccaagggtgcctggtgcaagggagaccgagggacccaatctccagcagggacaatggagaagcctccgtagagcgcgtggtgaaggcatggaggcccccagtcgctgtccccccacggctccgtccgagcccctcacctgtcccatgggggtgtccccagctccctgggggcgtccgctccggcgctccagggctcgccctggtccttgcccgccggaaggcctggtccctcgggcgcctcctccgggcccgcgccccaccgcggcggcgaccagggcaacattccgcgttcccgagcgcaggacggtaccgccgtgtccccgccgcccggcccggccctctcagcctccctccgcggcgcggcgcgaacgtgccctcctggcgaacccaccccagaggcctcgcggcgacgctggcgccctgtgcgtctcccggccacgtggcgcgtgcccccgccgggctcccgcgggcgccccctggcgactgggcggtgaattccggaaacagaggcccccccaacaaccccgcgacgcacgtgctctcagacacagttacacctgagggccacccagagggcttctggcttctgtttattgcggctgacacgacacctgcgacacccgcggtccttccacccagaccctcgaccccagaggcagccaggccggcaggccaagggtgcccaggcccaggccaccctcaccacgtgcttctctgagagcgcggagcccaggcgcgtcttctgctcccggggtcccgggcggggtgggccctgtgcccccaccttcacccctaaggccggtccagcagggcgtggacgacagcagcgatgtaggggaggccccttcccggggccccctcctcttccaggatgtggtggggctggcacagtgactcctgggggaaggggccgggttagcttccccacggtgccccctgcggcttccggcctgtggcagggggtcgggggcagacccgagcatcaccgtgcgctcggggctcggcgacaaatgagacgcaagaaagctgtcagcgataacagaagggaggtgacacggggggttggcggacgctccgggagcatgagaggccggcatctcaggagggagatgctggtgggcacagagccatggccacagccaccaacacgcggagcagacgcgcgcgcgcgcgcacacacacacacacaggcagggcggccacggtctgtacagtttatacacagagatagggacccggcctgggccccgaacccctacaaatatagatcctctctacaaaatagagataatttagcccccccatagcagctgttggggggggaaggggagggcacaggaggaagggggagactccagctcctgccacccctcacggggtacagagggcaggggcagggccggcggggacatgaaggcaccgtcagcactgagaggtggggactcgtggggctactggagggaggccagaggctgggggcccagggtctgggggcaccagagtggggcctctgaggtcagtgtctgtgaagggggtgcactagtgtctttggttggggctgaaggcaccgcaggtggggtcgggtggagcagggaccttataaatagagaggaagggaaaggggtgagggagggccgattttggggcctaggaacccaggagccgagtgtaggtgacatagagcagcagcatgaggaccacgtagaagacgacgaagccgcccagaccagaggggggccagaggggcggtagggccttgccccccacccgcttcacggcctccagcgcggtccgcagcccccgggcagtgccctggaggagatccgagggcgagcacaggtcagcctgggggagaggagagcaggtggacaaggacaagggacagacgtcagcagcagcagcaggacagtccctcccacccctgccctcacgtgctggggccagaaccacgcccacatgctgacgtgctgggcagggggagtgcagtgcaggaggagtgcagggcagggcatgtgcaggacaggtgacatgcaggacaagatggggcctgcagggcaggggatgtgtaggacaggtgacatgcagggcagggggcatgcagggcagggggcatgctgggcagggcaggggcagcctgtgccttcatctgagagcagacatccgctgcaaatggaagcccaccatccatg

SEQ ID NO: 586919 - DNA, 4001 bp, Homo sapiens
agtggctcacatctgtaatcccagcactttgggtggctaaggcgggcatatcacccaaggtcaggagtttgagaccaacctggccaacatggtgaaaccccatctctactaaaaatccaaaaattagccaggcagggtggtgggcacctgtaatcccagctaccctggaagctgaggcaagagaatcgcttgaatccaggaggcagaggttgcagtgagctgagtgcagtgaagtgcactgcactccagcctgggcaacagagcaagactctgtccccccacccaaaaaaaaaaggatctgaaagatgaaatacttgaaaacaaattcagttttcaggtataccacattctataaatggggcaatttatagaaaaatgaggtaatttagtagaaaatctgatttcaggaggttttggcaaaaaaaaaaaaaaaaaaaccacaaaaaacaaacaaaaccaccaagttctttattattagaagtgacactgtgcagttcacattattgcttggttagtctttcctccagaaaaacagcctttaatgtttaatatatctacaaatacgttataaatggttattagggttagctatgctgcagctgttacccacctgcttacagatttcagtttggtcatctgttccaaacgcactgatgagatcttcctttttggcaacctgacctttagaaacatttacaaacactgagtgggtctgcagaacttcatcgaggtctttttcccttgtgagggcaggagagaaagtcctatgtgaatatacttgaaacttggacatgcatttacatttaaatacgagatggcaacaacatgaacggcaagacacaacaaatccccctgatgacctttagtgtagagggcagttttctttttcttaccccccaacccccgcccctagatggaatttcactgtttttgcccaggctggagtgcaatggcgcgatctcgggtcactgtaacctcagcctcccgggttcaagtgattctcccgcctcagcctcctgagtaactgggattacaggcatgcgccaccacacccggctaactttgtatttttagtagagatggggtttcatgttggccaggctggcctcgaactcctggcctcaagtgaactgcccgcatcggcctgagggaacattttcaaaactcagaaccgtatttgccttaccatttgctcactggagaaaaatgtcatgggaggacgtaagaaacacaagggtggggtggggtgcagacagctgctgccacggaatgccagtccctagatggcagcagtgaagacactacgcactttaaactgctagggctactgagatctatgacaccagatgtacccacaactatgacagtattcgtaagactaggttctcagccatcattattctaggaaaaggaccacaattacgagatttcttggctgcagcttttatgacaccaacaaaacaaaaccccaaaccaacaacccaatccgaaccaaccaaataaagaagaaacccttggcttaggcgccaagctcggacagcgacgtctcatgctcacagcaggaatgttccatttcctccccggccaacaccccagcctggcccattcactcgacttgggcagagacaggccgcctcggaggtgacggctcaggcccaggcccaggcccgagggagggggctactcacacgccgctccgccagccgacgaccttgtttttgtagcaggcgatttcgaagcgcttcccggcacgcttcatccgtaccacggccacattggttaggcggatctggttggtgggggtgaagatcgacatcgcggctgttcaaagacccagaagccggcgaaccagggctgacccgcgccgtccagcctgaaggccaccagcgcctcgcggtaacgaccgatcggcgcgcggcactgacccaaccaccagtgcgcggcgccgcgactcactagcttcaggcagccgtcacagtgtgtctggcaggcttacttactgcgcaggcgtcaggtggagcagaagccgggaggggaaaagtgagcgatgacgcctgcgtattgtggctttttacgccatctttccacgcccaaaaagggaggtgcttttccttggcgtatttactttcgccaatgagctgagagctctgacaggatgctcgcggatgtttagtgaccgggttaaaacacagcgttggcaccacctcgttccgcggaattcaagggccagacccactttataatataaatattttttataatagaattattttataataaatatttttatttactcacccttttataatagaaatattttaacataaaatgtagacaaaaaagtgtaatgaaccttctatgtacccatcaccccgctatcaacattttgccatccttgttttattcttttttcatttttttgttgcttttttatttacagttttttttttaagtcagtctcactctgtcacccaggctggagtgcagtggcagggtcatggccccactgcagcttcgacctcctgggttcgagcgatcttccagcgttagcttcccaagtagctgggactacaggtgtgagcggccacgccaagctaatttaattaaataaataattaaaaaaaattttttgtacagacgaggtctcactatgttgctcaggctggtctcgaactcctgggctcaagcgatcctcccgcttcggcttcccaagtgctgggattacaggtttgagtcacagcgcccggccggttgggggtattttaaagaaaccatcatatggtttcagcattaaatacttcagcctatagcccttaacagatacacgcgacgagattaactacaattccttaatatcatctaatagcgagtccatcctcgggtttcccaaaaataatgcctttctacagtcggtttatttcagttaagatccaaacaggcccacatagcatttcccccgctccccgctcctttcctcttttaattttcccatgccaatcatttctctctgggcccgccttttcccagtctgagccaatccaaatggaggcggaagcgctccgccttcatcgcctggaactctgggaggtgcttatttctgggcacgccccctttcccctctgagccaatcggagcagggccgagagcgcaccgggcactggcttcctttcccggagctctgggctttcctctgggcccacctcttcgtcctctgaaccaatcaggaccggcctggcagtgtcatggctgcccacaggtctgcaggcactcggtacgccgctaacgcggcgaggtagctcggtgcgtctcgcggtaccagtgcgaatcatcgggctatccaggtccgagatcctagtctcctgtcggctctgaggaggatgggtaagggcactcggcgggcaaggaccctggggcggcaggggaggtaaacgttttactgagaccctctccgggcggagtggcgtcctcggtccctttccttcggagactgttgcacttgacagcaccggctagtcgccgctgagagcaaggaggactgatccctacttttgacctggcttttgccttttgaggctagggggttagacagaaaactacccctcccactttacctacgtgtattaggacttttgcacctgtaaagcctaaatttcaggcctcgacttttgaaattgctcccaggttgaacgtttgaagccaggtccctgcatatctctcttaaaaaaaaaaaaatgaggtgtaaggtcagttacttgagaatcttttacaagtttaaccgtgagcctttgaaagtacagttagtaaaaagagtgcttttactacttaagctttttttatggagcaagcacaacaaaacaaaattaatttcacatgaagtatttttactttgtgttccttctcttgcttctaaatgctcatttcgaagtgaagatacaattttatattctgttttttctttgagttagtgttaacagtgtgataattttattacgttactacat

SEQ ID NO: 586920 - DNA, 4001 bp, Homo sapiens
cggtcatctgacaaagtcaaacttaactgctgtctacagtaagatatggcattatttcacattttaatttactcaaatggcaaatgtggcatttcaaacactttcattcatgctagatttaagttctgcatggaaagtcctctgtaaggacatcattattctatctggcatcattcattcttgaacatgggttataaaagtttcagtcttttctggcagaaaatacaaatagatgactgtgtattacaacattataataggaataacagcaatgcatcaagaagccaaaatgtgttcagaactcaggctgagccttctctgcctcctcaagctaacacaaatttttgactccaaatgttataattaaaagtcttatcttcatctacgtatttttcatttctcatttctcaaatgcctgttccaggtgtttgccaatgtttagacagtcactactcaatgttttctattattttgtttcttaaaatcttcaaatgttggaaattacagtgttggctttcagggactcaaaaatgtgtaagtgtgtgtggttttgtgtgttttcctcctaagctcagggataaaactaaacaaacacgagtactgggcaggctagctagttttaaaagaaggcaaaaaggctcagagaatcggcatgttgttagacagggtgtgcccactggcacaagacctcctggggagaggctggacattcaggatgtttatgagtaaaagtagaaggtggaaaaagaacacacaaggcccagtgtcctgacagcctggcacgaacgcagctcaaaataattactactgctgaaggagccgtttctgttccatcttgtgtccttgctaaaataaataataaataataacaataaagcagtctacataaatatatgaaatacccatatagagctatttatttgtatataaaatatctgtatttttttcttacttctatctgaggacgccagcttccgaatgaagcggagtttttgtctaccagacccacaagcagcatggtgcgggtagaatcctgttttaaagaagcccagaacaataattcccgcaatcatagagaaaataagccagtgcccgaaagcaacaaataaaaataatgtgtgaagaaaaagaaaaggacttcttcctagcggcggcagatgcccccagactttatgacttcctctccatcccgacagggaaagcaggactgagtttgtcggaaggtgagcggggcttggccagagacggtgtgcgctgaggcagcggccctggacaagagtggcgtttggatacttgacggtgaaaggggaagaagccagtcaccagctccaaagtccaggaactacacctggcaaaggtcaaagcctgcgaggtaagtcaattgcggacaacgcctgagccccgcgtttgcagccggcgagttgacttcggtagggagaaagtggccggccccaaagggcagccccgtgggggcgcgagtggctagctcagtttgcggtcccctttactcccacgcctgcaaatctcagacccctacgccctcccctcgccggccttggtgcgtcggggtcccgccgcccgccgtcccttaccgagccagaagtgcaggtggtaggtgaagcctcggctcgtcttggccgtgtgcagcaccaggtaggcatccccgacgtagaagtcgccgtgagcgctctggggcacgggcaccagctccagcttctcaatcctccagacctgcagccccgcctgcttgcccgcccgggcgaactcttcgtggtatagctcccgcgccatggctcctgcacgcgatgctccgggggacgcgtgatatcgctgatcttggactaaaccgagagcagcaggaggaaccttattcgccgccactttatagtgtttgccatccggggaggcggcgccctgaaacgggaggggctaagtgcccaggcgcgagttgacagaggagacgatcgcttcccacggggagcgcagcgctggcttccaagctcccacgccttgccccaggccaggagcggaatcggcgtcccagaagtcttgagattcagagggagtttatagtaactcgtgccaatgcctcctccaaggaaagacattttctctagcaatagacgaagaacattaacggttaaaactgcttggcactcctttgtgcatacccatcactaccgtcctgcatatttccccttctctcgctaatcctcttatttctggatctcagttgtgcctggcaggaggggtgaggtgaggaaagagcgcgccagccctgcagagttgagtcagcgtttactcgggtggagcaatacctgttctttctggccctctagaataattcttagaacaaggcttcctctgctaatagcaacacctgccgttaggcagcagaggagtgtgccacattagcatgctggaataattttaatacatccttctttaaaaaatgggctttttgagtaacaagcatcctaatgatcaattctgtcatttcattgggcaatctctgcattcctgacgaccaaagtttctgtctcgatcttccagtttgaaaataccatgaaaaacagcatgtcagatttcttggacaggaagaaaacctggaagaatggcagtattaccccaggtgacagagctctgtaaatctcagagttcaggagctgtggttgagctctcttaacacctgcttcctttggccaagaaagatgaaaacaacaacaaaaacccagcagccgccgtcctgagatgttctctgcagggctgtttgtggctgtaattttatgcttggccggacttctgggttacctgttacctagcttcaaggtgataattttctttgttttacctacaggttttgcttttgcagcatggctaaaacactatggaatacagatggaaattttactcttgatttggcattcatttaacaagctggtatagcaaaggattctgttactgaaaaaggcaaatcactcaggatgtatagagtaagaaagctgaatttcatgcatgtaaaattgttttcattcaatttctcaaattacatgaatccctggaaggtcaataataatgcaaaattagatttttttccttaattaaattatgtttttaataggttattacatgaccatggtaaaaaaattaaaagtacaaaatgtgtgcaataaaaaattatctccatttcaccctgccacccagttgctttccccaaaggcaattacgttaccagtttcttatgtatttttccaggcactcaaattttgtcaacaagaatataggtaatgtagttattttaaatttttaacagaaaatgtaacatataaccttttcgaatccccccccgtgtgtgtgtgtgtgtgtgtgtgtgtgtgtgtgtgtgtgtgtgtgtctgtgtatcaacacacagtactcatagagctaccggtttttactgaccatatggtattccactttataaacatactaatttattttgtctatctcagttcatagtgtaggggccaagggaaaacttcccctctaccctctgaagtttcactgaaaaatcaagtcacaaaaggcagattaacaggacaaatggcatacaaatttatcagcgggcatgggggagaatcacagagtgattggccaatatcccaatgaggtacagagggttgtacctccttattagaggaaaggcagatgggtgatgtatgggtgatttggggggttagaaaatgatttttaggggaattcaatgtgtttgaagaacatacagtggcctgagacaaagtatgttaagcctgcagagctctccgtgtgtgttgacagacttcagtctttctttctgcaatatgagttcagtttgtggaaagtcagggaagagaccagaggtaactgttttcttctttggcaagtcgagactttaggcagataagggaacttcagagaataccttcattctgtgctttgggaaagagaggattggtgaaggaaggtcaaagaaaacttaagcc

SEQ ID NO: 586921 - DNA, 4001 bp, Homo sapiens
ctgaggaatagccctcggtgtcttaggacaacagaaaggaaatcctccttcctttgcccctgtagcttacctctctaaacaactagataacacagtcaaagggtggccagcctgctttaaagcactagaagtggtagccagcttagctctagaaagcaggaaactaactttcagccagaataccaccgtccacagttctcataatctacaagatctcctctcctcccaagcagtaagctcccttcctccttccaggattcaattactccatgccctctttataaaaaatcccaaattcagtcttaccagaagtgcttccctcaacccagcatccttactccccgtatcctcttcccttcctactcattcttccactgatatcctggaccacgtacagccacatttcccaaacatttcctccgagcctctcaccaaccccgatgatcaactattcatagatggctcctcttccaggcccaccagctaccccccagattgctggatatgcagttgtttcccttgaccaagtaattgaagccaggatcctcctcccaaaaagcagaactcatagctctcaccagggccctaaatctttccaaaggcaaacgagtcaacatttatacagactccaaatatgcctatcacattcctcgttcccacgctgctatctggcaaaagagaggactccttactgccaaaggaacccctatcactaatggccaccttatttactaactccttcaggccacacacctcccagctaaagcaggagttatacactgttgaggacatcgaacaggttcagatgaaatctcgaggcaacagaaaggccgatgaggcagcaaaagaagcctccctttcttctgcctctgcccctctccttcctgttatcccagcaatcctacccaagaactctcccaccgagaaagctttgctatacagcaagcagcctcctttcaaggggactggatagtcaaaaatcaaaagctcgtcctcccctaagagcagaccaaagaaattctgacatctcttcaccaatccttccatatcagtgtgcgcccccatacctactccttcaccctatttctcctccccccatctattcacctcactaagagacataacctcaaactgtcctatatgctctgttacttcctcccaaggggccctccactctccctccatccctacacatcccctcagaggaacactcccaggggaggactggcaaatagacttcacccacattcatcccgtcaagaggacaaaatttattcttactcttatagacaccttctctaggtgggtagaagcatttcctacctcttcagaaaaggccgcagaagtctcccaaattcttgtaacagaaatcatccctacatttggtctccctggctccatacaatcagacaatggcccctagcttcatctcccaaatcactcaacaggtttctcagtcccttggcatccagtggcgtctccatatcccatgctggccccagacatccggaaaagtcgaaagggcaaatgggatccttaaggctcagttaaccaaactcactcttgaagtccaaaaaccatggacctcccttttgcccatagcactggagagcattagagccagtccaaaagcaccctccttcctcagtccatttgagttaatatacggacgccctttcctcttacaaaacaggcccccttctaactctcagctaggagaatacctcccaacagtctccctcatgagctatctcctctgccaacaagccgaccaggccctcccaaaaccccacgaaggggtctccaatcccaaatagacttgctctccaattccaaaagactctttaagcagcagtgacacttcaaaaccatcgaggtttagatctcctcactgccgagaaaggcggcctgtgtatctttttagaagaggagtgctgtttctatactaaccagtcaggactagtacaagatgctgctggacgaataaatgaaaaagcttctggccgggtgcagtggctcacgcctgtaatcccagatctttgggaggctgaggcgggcggatcacgaggtcaggagatcgagaccatcttggctaacacggtgaaaccccgtctctactaaaaatagaaaaaattagccgggcgtggtggccggcagctgtactcccagctactcaggaggctgaggcaggagaatggcgtgtggggtgaacccgggaggcggagcttgcagtgagcagagatgatgccactgcactccagcctgggcgacagagcaagactccatctcaaaaaaaaaaaaaaaaaaagctgctgaaatcaggcagcgcctttcagattcccggcccaggtgatttcgtaactcctgggcaccctggctactgcccttcctaggccctgccattaccctcttcctccatttagcacttggcccatgtctcttacatctccttacccagtttttacagggccgtgttagagccttcacccatggaacagtacaagacatgatgctactccgagaataccgacagctccaggaacagcagtccctactacccagcctctccccccaaccatcgcccctatccagcaagaagcagccagaggacaacggcgcccctcttctattacctattaaaaggctggaatgttaggaacaagttgcaccagaacccctcccccttcccacccgcccccgcacccccccccccccacccaatgcagctgtcccttaccctgaatactctgcagctgcattcctggacccttatctaggcactacagcaaggtcaccagacttgcttacagccctacgggcagcatgggggaggtcacgagaaacgtggataaacctaagttacaccctcttgtaaattcctatattgtaacctggtcacgagatgatatgtggtaaggttaaccaacaaacaaccccagggtctctctcccccatataaaaccctcattttgtaagctcagggctgcctcctttgactgtggtgaagcagcctggcaggttagtaaacttactctcctgaccttgggtctctctctcgtcctttctctcggctaaccttacagcgccctcatccattctccaattataatgtgtttacacctttcctcctgcatgtctcacattttaccttgtcatcctcttacttgtgtatgtgtctatgcctcccagcatttgacagtacctgaaggtcaaagcctatctgctgtttacccttacaattctattcactcggcacgcactaggcacagaataaatgccattcatccctacttttacttcagggtacattttagagatctaagatttggtgtatctttcccattatccattcttattgcctcaaggctctcctcttataaatctagtggtatgcattactttgggggtaaggacaaatttatccagaacagagaagatttagttcagtctttagttttaaaataagcatttttaagtaatagcagagacaaaagtctgaaagccaacatagttttaatttaaaagaaatttgattttgctacagctttttggccaggagtaagtgaggatgctgtttcgaaagctggttttgcatcttaagcagtacggtgtgggtcttaggggctggagtgtatcttgcaggaaacacagagtaggcaagaatgtgaggtggtgtaagactagtttgtctggttcaaaaagtaaaaaagaagactgaaaaaagtaggaaatctaacccaaagcaatcaatctttgagaagagcccagcacacttcccttccaattgatttgtcctacacccctccatgagcctaagcattagagcagaaatgactgagggtagcatccaagccactgggccaaggggcactggtacgatgaggataccgtgtcccacaattctagggtagtctgggaaaaacaaagcagagttcctgagaagaatgcagtagtggctgacagaaccagaaagggtgttgtagtgatatgtggccatgaca

SEQ ID NO: 586922 - DNA, 4001 bp, Homo sapiens
gtcgctaaatcagttcttccaatgaaacttgatctaagaacctggtatttgttatgtgcactgctcttggatgatgtttacaatgtgcacacatctcttttaagagcttgtaggtatcaaacgacctccaggttgtgcatcaaaaagacatcagcagccacagagtcaactttagttgagcctggagaaaatcatacaaaaccgtagagttttaactaggttttgtatcatcttttgataagttaggaaaaataattacagctctccaaacttcccacttaacaactcccaggaccctgcagcaccctaaaatctagccagctccaagaatcactctctactccatacccggatgagccttgactcacactaattccctccctgaggcttaagtcagggggcagctgatggttgtggtctgtgctgcttccgcctggcctatttttcatgctgccattttgaattagcataggtttcctccgcaactgatgcatcttctaaccaggctgggaacacaacacgcgcacacgcgcacacacacacgcacgcacccaccccacccggctgccggacgcaagcgtaagtcaaggacttgcatgctagaatcagacagaaaatccagaaaagccacgttatttaacagaaccctacaaggtcagctttgagtcaaagcaggtaacagtttccttcgatgttttcatggacatttttattcccaaatccgagttctcgccaattctctaaagttcaagcgcccctcctgctttgcagaccacatttctctcggccctcgcgagtgaggtcgccaaatactcgacgcctcaagagcgagccgaggaggcagaggccgaccaagccggcctctcggcagccccgcccggcgccccgcggagaacgcccgggtgcggctcgagggaagttgtgtcaagtcccacgcgcggcccgcggagaacccaggggcggcccgcgcgcgtcggcctagcggggagggctgctccgggacacggtgcggcggccgcgggcgagttggacgcgctggcagagccgggccgaaggcggcgggcgtctccgggcagccatgttcgcggcgcccgcccgcgcagcaggtacggcacctcggggaaggtgcccggctcgccccagaccccagggtggcgaggccaggggcccacaggcacatcccagtgggcagcaggttggctgccaggaaaaggaaacccaggaagagcagcgcggggaacccggctgcggtgcgggagcccggggccggcatccctccactgcacccccgcagtccccgagccgagtcaccccggcttcaggccgaggccacctctcctctgaccgcccccaggctcccagcccgcccgggccagcaccgggaatcggcctggggtaacgctacccgcgggttcggagggacagcgggaggagatgaaacgcaggaggtggcgatggcgggtggggtgaaaccgccgggaaagcagcgctgcaaacgccctgcgctcccagacgcggctcacctggggcggcgggctccgggctccgctctccgctctgcggtgctgaggctgcggccgccgagggtgcgggtgctgccgggtccggattactgcggcgacctcgggggctgcagctgcagtggcggaggcggccgccgggcgcttccccctacccagactcccggcgctggggcccgccgccccccgcagcagctggcccgactcacgtgaccgcgggcccaccctccgcctcccccaccccggcccccggggccccgccgcaccccgcgcgtctggctgcacgggccgcggcgctgctcaccgtcgagtagggagggggcctgggagctggaggagcggccgagagggcgtatctcgccgcagaaagtggccccctctttgctagatttttatttcttggttgtggctctcaaaagggaaaacccgggcttcaaggagccaggcccagcatccttttggcgcctcttcccgacgtttggttgctacgtccgggcctcggcgcccacacaagatttccccggagagaaatgtgtcctgtaccttgttgactcgcacgtccaagtcgagtccctggttttaaaagtgccgtcctgtaccatgttggtaagccagaccctgtcccaggtacttggacattgtggcctagagaggttaagtaacttgcccaaggtcacacagcacgtaactaagccaagattccatatctgggttaataaagttatgtacagggacttgtgtgttgtgtgtctgtgtgtgtgtgtgtgtgtgtgtgttgatgccagcgtcaactccatcttttataagtaaataagaaaagactatctcaaaagatatgaagacgtaattcagaggaaaataaatgcaattctatcctggcacacgaaaagatattcaggctcacttaactgcaaatcaaatatgtggggtagcatcttccaccagccagattaacaaaaatcaaaacattttgagtcttgctttgtcgcccagtctggaatgcagtggcaggatctcggctcactgcaaactccgcctcctgcctcccgcctcccgcctcccgcctcccgggttcaagcgattctcgtgcctcagcctcccaagtggctgagactacagacccacgccaccagcctcgctaattttttttgatttttagtagagatggggtttcaccatgttgcccaggccggtctcaaactcctgagcttaggcaatccgcctgcctctactatccagcttcctttaaaaaggagaatgatctttatttgctaatacaaaactatttccaacctatactaactaaagaaaaataaaaagctaggtgcagaacgttgtgtgtgttatttgtgggaagaaaatatatatgtatgtctgtacttatttttgtaaatgcacagagtatctttggaagagtacgtaagaacctgtaatagatgccaccagggagcagaactgggagactgggtgctggggagagaaggagacttttttccatgccctttgaatgttgagcctgtgcttacagtctgacacatgagtaaacggatagtggggaagggctgaggaagttggtgtaggtactgcagaatagagcattggttcgtagactcttggagcacaaaggtactttactgttcttttagtctagccaagaaaactgtagccaatgagtctaaataatcaatattagaaatttctagcgggcttattcctgggttccagcccagatctatggaattcagagtctctggggctggagccagggaacccgcatttttcaagctctttagttgtttctcttgcatgttaaagtctgaaagtccgtgaggtgtgggtagggagagcattaggaaaaataggtaatgcatgctgggcttaatacctaagtgatgggttgataggtgcagcaaaccaccgtggtacacgtttacttatataacaaatctgcacatcctgcatatataccccagaacttaaaataaatattaaactttttttaaaagtctcagagtcgctgttttattttttgtttgttttgagatgggatctcgctctgtcacccagcctcgagggaagtggctcactgcagcctctacctcctaggctcaagtgatcctcctacctcagcctcctgagtagataggactacaagcatgtgccaccatgcctagctactttttaaaatatttttgtagaaatggagtctcactatgttgcccaggctggtttcaagctcctggactcaaatgatcctcctgccttagccatctgaagtgttaagattacagacgtgagccaccgtgcccagccagagtcactgttttaaatgtctagtttaagactacaccactactagaaaggcaaatgcaatcctgtgccttcctatagccagtatatgtcatttgttgtgtaaaggatggcacttgcaccctacgctgctcccctggaggcagccatatgctcagtacacggataggg

SEQ ID NO: 586923 - DNA, 4001 bp, Homo sapiens
ttagttgagcctggagaaaatcatacaaaaccgtagagttttaactaggttttgtatcatcttttgataagttaggaaaaataattacagctctccaaacttcccacttaacaactcccaggaccctgcagcaccctaaaatctagccagctccaagaatcactctctactccatacccggatgagccttgactcacactaattccctccctgaggcttaagtcagggggcagctgatggttgtggtctgtgctgcttccgcctggcctatttttcatgctgccattttgaattagcataggtttcctccgcaactgatgcatcttctaaccaggctgggaacacaacacgcgcacacgcgcacacacacacgcacgcacccaccccacccggctgccggacgcaagcgtaagtcaaggacttgcatgctagaatcagacagaaaatccagaaaagccacgttatttaacagaaccctacaaggtcagctttgagtcaaagcaggtaacagtttccttcgatgttttcatggacatttttattcccaaatccgagttctcgccaattctctaaagttcaagcgcccctcctgctttgcagaccacatttctctcggccctcgcgagtgaggtcgccaaatactcgacgcctcaagagcgagccgaggaggcagaggccgaccaagccggcctctcggcagccccgcccggcgccccgcggagaacgcccgggtgcggctcgagggaagttgtgtcaagtcccacgcgcggcccgcggagaacccaggggcggcccgcgcgcgtcggcctagcggggagggctgctccgggacacggtgcggcggccgcgggcgagttggacgcgctggcagagccgggccgaaggcggcgggcgtctccgggcagccatgttcgcggcgcccgcccgcgcagcaggtacggcacctcggggaaggtgcccggctcgccccagaccccagggtggcgaggccaggggcccacaggcacatcccagtgggcagcaggttggctgccaggaaaaggaaacccaggaagagcagcgcggggaacccggctgcggtgcgggagcccggggccggcatccctccactgcacccccgcagtccccgagccgagtcaccccggcttcaggccgaggccacctctcctctgaccgcccccaggctcccagcccgcccgggccagcaccgggaatcggcctggggtaacgctacccgcgggttcggagggacagcgggaggagatgaaacgcaggaggtggcgatggcgggtggggtgaaaccgccgggaaagcagcgctgcaaacgccctgcgctcccagacgcggctcacctggggcggcgggctccgggctccgctctccgctctgcggtgctgaggctgcggccgccgagggtgcgggtgctgccgggtccggattactgcggcgacctcgggggctgcagctgcagtggcggaggcggccgccgggcgcttccccctacccagactcccggcgctggggcccgccgccccccgcagcagctggcccgactcacgtgaccgcgggcccaccctccgcctcccccaccccggcccccggggccccgccgcaccccgcgcgtctggctgcacgggccgcggcgctgctcaccgtcgagtagggagggggcctgggagctggaggagcggccgagagggcgtatctcgccgcagaaagtggccccctctttgctagatttttatttcttggttgtggctctcaaaagggaaaacccgggcttcaaggagccaggcccagcatccttttggcgcctcttcccgacgtttggttgctacgtccgggcctcggcgcccacacaagatttccccggagagaaatgtgtcctgtaccttgttgactcgcacgtccaagtcgagtccctggttttaaaagtgccgtcctgtaccatgttggtaagccagaccctgtcccaggtacttggacattgtggcctagagaggttaagtaacttgcccaaggtcacacagcacgtaactaagccaagattccatatctgggttaataaagttatgtacagggacttgtgtgttgtgtgtctgtgtgtgtgtgtgtgtgtgtgtgttgatgccagcgtcaactccatcttttataagtaaataagaaaagactatctcaaaagatatgaagacgtaattcagaggaaaataaatgcaattctatcctggcacacgaaaagatattcaggctcacttaactgcaaatcaaatatgtggggtagcatcttccaccagccagattaacaaaaatcaaaacattttgagtcttgctttgtcgcccagtctggaatgcagtggcaggatctcggctcactgcaaactccgcctcctgcctcccgcctcccgcctcccgcctcccgggttcaagcgattctcgtgcctcagcctcccaagtggctgagactacagacccacgccaccagcctcgctaattttttttgatttttagtagagatggggtttcaccatgttgcccaggccggtctcaaactcctgagcttaggcaatccgcctgcctctactatccagcttcctttaaaaaggagaatgatctttatttgctaatacaaaactatttccaacctatactaactaaagaaaaataaaaagctaggtgcagaacgttgtgtgtgttatttgtgggaagaaaatatatatgtatgtctgtacttatttttgtaaatgcacagagtatctttggaagagtacgtaagaacctgtaatagatgccaccagggagcagaactgggagactgggtgctggggagagaaggagacttttttccatgccctttgaatgttgagcctgtgcttacagtctgacacatgagtaaacggatagtggggaagggctgaggaagttggtgtaggtactgcagaatagagcattggttcgtagactcttggagcacaaaggtactttactgttcttttagtctagccaagaaaactgtagccaatgagtctaaataatcaatattagaaatttctagcgggcttattcctgggttccagcccagatctatggaattcagagtctctggggctggagccagggaacccgcatttttcaagctctttagttgtttctcttgcatgttaaagtctgaaagtccgtgaggtgtgggtagggagagcattaggaaaaataggtaatgcatgctgggcttaatacctaagtgatgggttgataggtgcagcaaaccaccgtggtacacgtttacttatataacaaatctgcacatcctgcatatataccccagaacttaaaataaatattaaactttttttaaaagtctcagagtcgctgttttattttttgtttgttttgagatgggatctcgctctgtcacccagcctcgagggaagtggctcactgcagcctctacctcctaggctcaagtgatcctcctacctcagcctcctgagtagataggactacaagcatgtgccaccatgcctagctactttttaaaatatttttgtagaaatggagtctcactatgttgcccaggctggtttcaagctcctggactcaaatgatcctcctgccttagccatctgaagtgttaagattacagacgtgagccaccgtgcccagccagagtcactgttttaaatgtctagtttaagactacaccactactagaaaggcaaatgcaatcctgtgccttcctatagccagtatatgtcatttgttgtgtaaaggatggcacttgcaccctacgctgctcccctggaggcagccatatgctcagtacacggataggggatactgccaacctgcctgcctggcctgagatctttgaagcctgttggtttgtccctacacagccacaggagctttgaggccaggagcccaggaacacatggagattgaaagacacctgctttccccagggtctgcatggagaagcttattatatggcactatgaacgctt

SEQ ID NO: 586924 - DNA, 4001 bp, Homo sapiens
cagttgacagccagatatatgatcttggcgtccattcgccccgctggcctcagccttcctgctgtaaaaagggggttgacagcaggctccttaagactgcctccacctctgccccccgaccttagctcatcctcctctattccattatccctgaagcatttgcctcctcatgtatctccttcccaaaagacaagatggctggcagcacggaagtgaaaagggaaagaaaggctgtttaaaaaaaaaaaattctaaaatgagtcacctttcaagaatttcccatttcctcatgcctgggtgcttcctcgtgtcgctaaatcagttcttccaatgaaacttgatctaagaacctggtatttgttatgtgcactgctcttggatgatgtttacaatgtgcacacatctcttttaagagcttgtaggtatcaaacgacctccaggttgtgcatcaaaaagacatcagcagccacagagtcaactttagttgagcctggagaaaatcatacaaaaccgtagagttttaactaggttttgtatcatcttttgataagttaggaaaaataattacagctctccaaacttcccacttaacaactcccaggaccctgcagcaccctaaaatctagccagctccaagaatcactctctactccatacccggatgagccttgactcacactaattccctccctgaggcttaagtcagggggcagctgatggttgtggtctgtgctgcttccgcctggcctatttttcatgctgccattttgaattagcataggtttcctccgcaactgatgcatcttctaaccaggctgggaacacaacacgcgcacacgcgcacacacacacgcacgcacccaccccacccggctgccggacgcaagcgtaagtcaaggacttgcatgctagaatcagacagaaaatccagaaaagccacgttatttaacagaaccctacaaggtcagctttgagtcaaagcaggtaacagtttccttcgatgttttcatggacatttttattcccaaatccgagttctcgccaattctctaaagttcaagcgcccctcctgctttgcagaccacatttctctcggccctcgcgagtgaggtcgccaaatactcgacgcctcaagagcgagccgaggaggcagaggccgaccaagccggcctctcggcagccccgcccggcgccccgcggagaacgcccgggtgcggctcgagggaagttgtgtcaagtcccacgcgcggcccgcggagaacccaggggcggcccgcgcgcgtcggcctagcggggagggctgctccgggacacggtgcggcggccgcgggcgagttggacgcgctggcagagccgggccgaaggcggcgggcgtctccgggcagccatgttcgcggcgcccgcccgcgcagcaggtacggcacctcggggaaggtgcccggctcgccccagaccccagggtggcgaggccaggggcccacaggcacatcccagtgggcagcaggttggctgccaggaaaaggaaacccaggaagagcagcgcggggaacccggctgcggtgcgggagcccggggccggcatccctccactgcacccccgcagtccccgagccgagtcaccccggcttcaggccgaggccacctctcctctgaccgcccccaggctcccagcccgcccgggccagcaccgggaatcggcctggggtaacgctacccgcgggttcggagggacagcgggaggagatgaaacgcaggaggtggcgatggcgggtggggtgaaaccgccgggaaagcagcgctgcaaacgccctgcgctcccagacgcggctcacctggggcggcgggctccgggctccgctctccgctctgcggtgctgaggctgcggccgccgagggtgcgggtgctgccgggtccggattactgcggcgacctcgggggctgcagctgcagtggcggaggcggccgccgggcgcttccccctacccagactcccggcgctggggcccgccgccccccgcagcagctggcccgactcacgtgaccgcgggcccaccctccgcctcccccaccccggcccccggggccccgccgcaccccgcgcgtctggctgcacgggccgcggcgctgctcaccgtcgagtagggagggggcctgggagctggaggagcggccgagagggcgtatctcgccgcagaaagtggccccctctttgctagatttttatttcttggttgtggctctcaaaagggaaaacccgggcttcaaggagccaggcccagcatccttttggcgcctcttcccgacgtttggttgctacgtccgggcctcggcgcccacacaagatttccccggagagaaatgtgtcctgtaccttgttgactcgcacgtccaagtcgagtccctggttttaaaagtgccgtcctgtaccatgttggtaagccagaccctgtcccaggtacttggacattgtggcctagagaggttaagtaacttgcccaaggtcacacagcacgtaactaagccaagattccatatctgggttaataaagttatgtacagggacttgtgtgttgtgtgtctgtgtgtgtgtgtgtgtgtgtgtgttgatgccagcgtcaactccatcttttataagtaaataagaaaagactatctcaaaagatatgaagacgtaattcagaggaaaataaatgcaattctatcctggcacacgaaaagatattcaggctcacttaactgcaaatcaaatatgtggggtagcatcttccaccagccagattaacaaaaatcaaaacattttgagtcttgctttgtcgcccagtctggaatgcagtggcaggatctcggctcactgcaaactccgcctcctgcctcccgcctcccgcctcccgcctcccgggttcaagcgattctcgtgcctcagcctcccaagtggctgagactacagacccacgccaccagcctcgctaattttttttgatttttagtagagatggggtttcaccatgttgcccaggccggtctcaaactcctgagcttaggcaatccgcctgcctctactatccagcttcctttaaaaaggagaatgatctttatttgctaatacaaaactatttccaacctatactaactaaagaaaaataaaaagctaggtgcagaacgttgtgtgtgttatttgtgggaagaaaatatatatgtatgtctgtacttatttttgtaaatgcacagagtatctttggaagagtacgtaagaacctgtaatagatgccaccagggagcagaactgggagactgggtgctggggagagaaggagacttttttccatgccctttgaatgttgagcctgtgcttacagtctgacacatgagtaaacggatagtggggaagggctgaggaagttggtgtaggtactgcagaatagagcattggttcgtagactcttggagcacaaaggtactttactgttcttttagtctagccaagaaaactgtagccaatgagtctaaataatcaatattagaaatttctagcgggcttattcctgggttccagcccagatctatggaattcagagtctctggggctggagccagggaacccgcatttttcaagctctttagttgtttctcttgcatgttaaagtctgaaagtccgtgaggtgtgggtagggagagcattaggaaaaataggtaatgcatgctgggcttaatacctaagtgatgggttgataggtgcagcaaaccaccgtggtacacgtttacttatataacaaatctgcacatcctgcatatataccccagaacttaaaataaatattaaactttttttaaaagtctcagagtcgctgttttattttttgtttgttttgagatgggatctcgctctgtcacccagcctcgagggaagtggctcactgcagcctctacctcctaggctcaagtgatcctcctacctcagcctcctgagtagataggactacaagcatgtgccaccatgcct

SEQ ID NO: 586925 - DNA, 4001 bp, Homo sapiens
atagggttgtggccctcataaaatacatttacttaaacgaacaggcaagtaagtgtgtggccagtatgagagcttcttgttggaattaataactgaccgattcccaggtaagaggcaatgggcatgaaacaatcaatatcaaaataaaaggatgtatgttcgtcgttctgggccgctgacgtctgtccctggctatgaagctgggaacagtattttaaattctgaatgtgtgttatgacgcctattttggggtgaaataaatgtctgtaggaggccacaggctcccaactaggactaagtcacagatacgcaaacgctgacttcagacttaagcagcgttgctcccctgagccctctcccaggctgtttatggggattatgctggaaagcagaggaggaaggcatgtctacaggagcgctgtgggagaggaagcagcggcattccaggactcaccagcgcctgcttcaggagggaacagttgcagtgggcctgctgttacacacagtttctaataggcccatttttactttcatctgggaaacctggaatacactggagcaggagatagttttgcaaggaaacaacacccacattcccattccctcctggatctccctctagcctgagaccttgtgtcagggaaggatggacaaagccttctgcagggttcccgtctctccgtgaggcgaggcgaggatcaggggtggcactctctcagcaacgtggagagagtgctttccactcagcagttaagaggactttcgggctcatttagttactcagcaaagatgcttaagaaaacctacaggtgtttcacttcttcagccactccgatccccagggtgggtgttgtggcgggagagatccgcatttctctccctgatgtattcattacagtctgtttaataatgaaaatgtaaaggcgctaacctttatgtgtttgacatctgcagagtgggaaaacatatttaccgatgatttagagttccatgaaaacaaagctggcaaggcgtccttgtgattcaggtccagaaactcagggagctggggaccctgggccatccagcacggggctttctataacctctaattacctcccacaatgcaaacagtgagacggggcagtaccgagggaagtaaggcatgaggtccactgtggattttttaaactatagtagtctccttttatctgcagtttcaggcattccctggggtcctgggatgtgttgccagataagggggcactacacgaagtgtgtggagcccctgccaagaggagcgtccacagctgacatccacagctcggccccgccccagcctctgctgcctctccccagcactgcccacggcagagttatgagggaaactcagtacaggttcataattaggctgtaaaaatccactccaggctgaaattggccatataagtgctcagtgactgaaaaacaattttgttttgtttccctcaactgcaaaagaaagtggtttgaaaattaagttaaaagcgacaacaatccaaattgtttgcattggaaaggccaacctgggaggcagcaaggctcccgaaggcgcgaaccctggacctaccatcgtctttggtgcgctccaggatgaggggcgtgctggggaccccgttcccgatgcgggtgaacgccagcacctggagctcgtagagcacgaacttgcgcaggcctgccagcagggccgactgcgtgtggttccctcgcacgatgtggctcctgggctcgggatccaggtctttggcccggaacaggatctgtggtatcgacacagcacgagggttatcaggaggcgggtgccaggagggaccgccgtggcatggggcaggcccccttcgtgaatcaaggcccagccaactgtgctttctccctgaggatggctgtgtgcagggcttctggatctaatttgtccatgctggcatttggggaggaaggtggttgtaaagtgactgcgctccaggggagcttgagttagtgcccacggcttggcgagcctgctgcctggtcataatctgcaagatctgagggcccaactgcagccatgccaaccacagccactaaaacaaagactcgattatgaacacagacaacactctgcttcctgccacaggagccagcagccccctgggttttccagccatggaagctggtttcctgccccagaagacctgctgtcctcacacagaccgggagctctggcctccttgggccatctgcagctgtgcatgctgtaggtaccccaccccaagctgctgtcctccagggcaccccaccccaagctgctctattccagggcacccaaccccaagctgctgtcctccagggcaccccaccccaagctgctctattccaggggaccccaccccgagctgctctattccagggcacccaaccccaagttgctctcctccagggcaccccaccccaagctgctctattccaggggaccccaccccgagctgctctattccagggcaccctaccccaaggtgctctcctccagggcacccaaccctaagctgctctcctccaggggaccccaccccaagctgctctcttccagggcaccccaccccaagctgctctattccaggggactccaccccaagctgctctagtccaggggatcccaccccaagctgctgtcctctgtgctctcctccagggcaccccaccccaagctgctctcctccaggggaccccaccccaagctgctctcctccaggggaccccaccccaagctgctctcctccaggggaccccaccccaagctgctctcctccagggcaccccaccccaagctgctctattccaggggaccccactccaagctgctctattccagggcaccctaccccaaggtgctctcctccagggcacccaaccctaagctgctctcctccaggggaccccaccccaagctgctctattccagggcaccctaccccaagctgctctattccagggcaccccaccccaagctgctctattccagggcaccccaccccaagctgctctattccagggcacccaaccccaagctgctctcctccaggggaccccaccccaagctgctctcctctatgctctcctccagggcaccccaccccaagctgctctgctccagggcctcctgctaagacctcactcaatgcccaccttctctgaactgctccctgagatcggggacctggaaggccataaaggatagcatcagcagggaggtgtttgaaaatagcacagcaagcgcgtttctcggggccccaggaatgtggtgtgaagttttggtcactgaatcccctcaacgggactgccatgtgtcacagagccagcagggcgcacttagaacacccggggaagggagaagacatgggagagcaggcggggaaaacaaagaatagggatgtgaagtacggaaaggtggaggaggcacgctcaaaacccagggagcagcactgagacaagcgtggcctcgctggccgggtccgaaacagctcattctgatgcttggcattgctgagccaaggagcagatggggagacagagcctgtcgccccgagtgatggaacgaggaacagaagggggttttaaaggggtggggtggatgcatggaagatggaacccagaaatggctccccagagaagctgggacagattcaaccctgccagcggatgccattgctaggaccgtgatgacacacatagaaacatgcacacagcgatccacctcacccagcccttcacatgagcaaggcgtgctgtgtaaaagaccccctgaattctcacaccaaccctgggacaaagctaccatcgttattcccgttttacaagcggggagacacaagcacagggcttcagtaactggcccgcggcactgaggccagcgagggcagagtcaggcgcaggcccggaggtcagttccactccggctgtgcttttcttctggtgccctgttttggcatttgtgtcatagttatact

SEQ ID NO: 586926 - DNA, 4001 bp, Homo sapiens
cttcaaaacaaagccactggcagattttttccccaccatttcagtctgtgcaccaatcttcaaatgtatgaacgtacaggtcttagtgcaaaatgcaagtcactgtttaaaaaaagaaaacttaataaacacattattttaaaggtcatcctaagtgatttagatttcttcacttgaacctggttgctctaacaatctacagatcccactgtacaaaatgacttaataaatgcttttcttccagagtaagtcattaagcaaaaagcacaaataagtgaaatgaaaattttccaagtaatggaggagttaaattaaccagaaatatggcaatttgttttcatgtagtaaaacataagagggagcatttatgaaagctggaggggggtggaggggcacaatttagataacgttacataagcatcaataaaaaaaagtatgagttcgttgttaagctattggatgatagttttgagctcagacctttaaaatgttacaacatttaagtcatgttactacacataaatcatcttcacaggacacagaacacagctaatttaagtttaatgctctcatcttcgccaatctcagaatatcgagttccttaccatgattgttcgttagctgtatcttggaatacaactaagttaattttcctaaaactaccatcagcaaaaccagttcactaatgtgttttaaagacgttaccaaaggacgtattaaaatagttatttctgggttgaggggggtgttttggtttaaagaccagcaaacttcaaaagaaaacgatgctagctggcaggggtacgttacgggttttgtcgggggcggggagggggtggagggaagcccagatttgggaaggaaagctcgtttcacaagagatcccatctctcgtttcaaaaggtcatttccattcagcagatcctctttccctatttcagagctcaccactgtattctaaacagaagccaatagagggagaaaaacaaagccaagtgcaaaagctgtgggcactgaaagttttgctccaccggccgcgcagcacccacttggggtcgggctttgggacttgggggagtcaggagcaggcgggggctggggagaggacgaggccctggggaggggctggaaaaggcttttcacagcgactggcacttgatatttccaagtcttctggatgtcactcaccggaaaccagaccctgcggtgcgaagactcaggtacagaccagcccctttttcatccatgcaatgggaaggggactcgggcatccttttaaggagctgagaaatgggtcctcaacttaaaaatttttgtttgtgctactgcggtataaaaaaaataaaacgcaaagtagcagacggggtgcaggctctacggggctccgtttccctctcctccgagtctggcgtggaggagcccctgggctccctagagcccccagcaaggcgcatcccgacccgggccgggaagcggggggaccccggacacactctcgctgctcaagttcgcgcctccgcgccccgaggcgacgcccccggcccgcgaccccgcgcgcacctaccttgcgccagcgcccggagcaagtgcagctgcagcgccagcagcgcccaccagccgcggcggcccggccccaactttgccgcccgccgcccgccgcaccgccccgcgcccgccgtgtccccgccggaggtctcgggcgccgcccggggtcgcgagggctccgggccggggcgcggcgccagcgaggggcgggcgcggccgggcggggatccccgcggccgcccggggcccgcgcgctcagggggctccgcgccgccgccgccgccaccggccgccgagggccgggcgccccgggccatgccgagcagccgccaccccgagcgccgcgccggacggacgggcgggcaggacaggcgggacggctccgagcgggcgcggccactccgcgggaggcgcggcgccccccggcccgaggtgagcggccgcccagcgctgaggggcggcgtcctgggtccccgcgtgaggggcgcggcgcgggccggggacgagccgggcgagaagaagttgtcaacgggggaaattcgcgtccggcgctcacgcagtcccgagcccgccgcgctagctccgaggggtccgccgggcgcggaggagccgccgccgccgccgcccccgcccggcgctgagaagaaagtgcgcccgcccgcacgtcgcggtcgcgctcgccctcagctgccgcggccgccgctccccattcacagcccggccgcacgcgccgcccgcgcccgccgcccgccgcccgccgttgattggccgagggaggcggcgcccgctcccagggcccgccccccaggccctcgcttgttttcaaagtcgcggcgcccgcccgcctgcaattttgtgccggccgcggcgcctggctcgggcggcttcccgcgccggctgcgccccctagggacccgtagtggggactgcaggcggcgtcgattcggcacgcgctcccgtggcgggctcgcgggcgggggtggtgcatcctcgcccggccccgcagcggtgcgggcgcccgagtgggaagggctcaggtgcagcaggacgcgcagatcgtgcggcagcccagggccgagggcggaatagggcgcgccccgagaggcgcccggctaccaccagctagctcagtgcttgggggtgacgcgccaagttaccgtaattgcaaacacgcgcaatcgggtttttaatttctagcaaccaaaggcaccactgggtgcaaactcgcctcctgttcagaggagtggatatggcattgtagaagcgtccaaggtcacttttggccggcgctggaggagggcggggtagggagggacacattgcaggtttcccaccgtggagtgggcgagtcttggggcagggtcggccagtgggagggtctcccagggcgggacccgggagcctgtggggctgggggtggggacgggcgccgacgctcagcatgtggtaagcattagcagagtttatggggtgaactaagcgcactggaggctgaaaggccagcatttttgtgggaggagagctggaggtgacacgcactgcctctggagttggcccgggaggagcctggggacgtgtgatgatggtcgcatgagatcatgtaagagatgaacgcagaggggctgggtgtgagcccagcacggggctgactccccaggaatcacctgatgcagtaggtttattgtcccagccaagaaagaccccgggcgagtggagagcaggtcacagggctggggtctgggataggagccagctcctgctcacagagcgcctatggtatttgtcaaataactgattggtggctcaatattagcctctgtacacgtcccctaagacttaacaatgaccacgtgaacaaaacagggaaactgaggtccaagtacagccgccgaacaggaggtggtttcagaaagaggcctcccatctgccccctttccacaccatgctaggaggggcaaaaaagttaaaggagccacggagtgccctgttctgaggatatagtgagggcgcatagatgggacgagccggaagaggacagctccccaaggacatggggatgagactggaggcagagaggcatgtctgtttttatcttctgttggtagcaaggctgggtttcttcaaacttgcaagattataatgagaacctgctgggcggggggaagcaatacctcctgtgcagtgagcactcactgtaggccagcccagggcagcagcagcagcagcttcactacctgctgtgtgagaggtgctggccctggtacagatggagaaactgaggcataaagaagtgggccgggcgcggtagctcacacctgtaatcccagcactttgggaggccgaggcgggcggatcacttgaggtcagttcaagaccagcctggccaacatggtgaaacctcgtctgcagttaaaaaaaaaaaaaagaaaagaaaaaagaaagaagaaaatgaagaa

SEQ ID NO: 586927 - DNA, 4001 bp, Homo sapiens
ttactaactaaaatgttacatggaacataaggctgtaataaataatcttacaccatttgaaaatacataaaaatttagacgagtaaaaaatttaggaagaagtgacaacgttaaaaagctgtcgcgcaggatcaatcaataaaaatgttgatcaaagtaatgcaagggctattaatcaagatgttaatcaaacaaaaggcttagaaaatgcaaagatttaattttttctctcatagtcaagcaattaccttttctatcaggtttagtgcatcttttaaccagccgaatggagtcctttacaaactgccgacttggctcaacaaactgcattacctgatccatgactgcctgtttaaaacaaaaaagatactcactggtattggttctcatacaataagcacttgctcatttatataaagatgtaaatgagaccagccactgaattcacgtctaacatgggtcaattccacctcctaaaataaaacaaaaaacaaactccaaagcctaaattgatattatttttggaaatttcagttaattatcaaaggcaataagaaaagcacagatcttactcatgatatcttcactgacaaagaacagcacacgcaatataaaaagcctatctctattaaaaggttaaaaaaggttacgcaattggtaacacatccattccttttctcactctgcagtcccatccatttctcattctacagtcccctcaccgctcctaaggaaccatcagtgttgagatccaacaattactttccatattttattttaaactacgcagaagccagtgtcttgtacagtgaatgccaactacggtgctgcaagagcctagaatagaggcaaacgtgaatttcaaccttgatttttctaaaacgtgccaatacaacatacttttctaaagtataaagaatggctaaaggaagacgcaaattctgagaagctactagctaaatttcaaacttttcgatttgaacacatcttttaaggaaacagggctatatattttaccatacaggttcttttgaggaatctattacccaatagaaatgttatccgatcttagctttgagagccactgctatagtaagtaaagcagccagggtgttatttgtattttcctccatttccagtactcagaacagtggccaggtggtagttcaaatcactggctatggaatgtaaacctctgtaagccccagttgccttccttagtgtagggtgtggacaacgaaatgaaataatgtcaatgaaacaccaggaattctgcaacgttctgggggcaaaaacacagtaatgtctgttttctcagtatttcactcaactttgctcttgaaatccaaagggcttaaactttttgtaatcatagttgtcacgaaggaagctaagaattctttatccagaaaaacgcacgctacacacaataccgcactcaatgtcaggggtagagatccaaaaaccaactatgatctctcgaactagactctagaccaatgctctcactttaaaccacggaagcggcggcaggaccagagctgagtacagctcttcccagacaggactccacaacagcacacagagccaaccccgaagggatcgggcagcaggacatcatctttggctgcagcacagaagacgccggggcaggacgctaagccctggagccccgcgggccggccacccagctcgccgggagtccgcggccctgggtctgccttccgccagaggccgagttggtgggatgtcggcggccagaccccggccctgagccaggggaccacttaccgcccgccccgcgacggccgcccggggagacacgccggctcgcccacgcccgctgcccccaagagtcgcaaaggtgtggccgccccgttcgcccgtaccgaccggtgggaagaaactcacctacccaaccgacacctaaaatgccagggacacgtagcactggagcttgctgatggaggcccaccggaaccggaatccgggtttctgccaacagcccgcccactcctccgtcctattggttccttacgcgaaacctcagtgcgcaagcgcagcgcgacgtgcgcccggccacgcttcctggaagagatgcattgcggagctcgctagttggggcgttggccttccttaggagtgtgagtctagcgttatcccttttttccggctggatcccgggttaccccaccagcccgacctcaacccactcacgtccacagcacgagccccagcggccttgcgcggtgcttgctctctagtagcggctgactaggtaaatcctaagttgtggttttttttcctgcggtccagcttgatgtgtgtccttacggtacatactttttgtatgtatataatgttggtcgaaatgaagcttatgagcaatataatgttatggcctaattcaaaatagtatccccaccccaaactttgactttggctgtcattcacggtaatgaatgccgctgtaattgaggcctttgtcaaacgctaggtttggttacgggagtggtcataatgtacacacagctccccacttacccacaaggatgcattccaggaaccccccgccggatggctgaaaccgtcagtagagacggggtttcaccatattggccaggctggtcttgaactcctgacctcgcgatccacccgcctcggcctcccaaagtgctgggattacagacgtgagccaccgcgcccggccatgtttccttttagcaatggagcataacgggatctgaggaacaatataactcaggaagagctgatggaacattaagacgtgttacaactctcagtgcttcttaaacttcttcagtaactgaaatctcctgttaagttttttagtaaatgaaatttgtaaccccagaacctccagatattgattcagtgggtcagggttagaggtcacacacctccgtatatctgactgtaggtggtccatacacactacacataccttgccttagctttaagagtcacttttaaattctgaacagactgagatgcgtttgactagttcttcatccctgggacttcagcccatgtgtcatctccttagaggcctatagtgaccatctaaggcaatcctgtctatctcatgctcttttttcctttttcacaataccttcttcatttgctgcatagcatttgtattaacatttatttatttattcctcggtctgtctccctacactgtaaatccccttactagaccataagctccaagtgggtataatatagcatctagtaaagtgctaaacacagtaaatgctcaataaataattttcaaaaaaataattcattccaaaaaaacataaaatcacatgttggcaagttcaccccaaccaccaaatgtctgagttgacagtattttcagcaaaacacagaaaatcaagtaacacatacagtggttccccttatccaagaaaatctggttcaaaaagagatgtgtaccagaaggtaatctgggagaggccacattcaaataactttcattacagtgtattgttataattgtctactcacctgatttcgggagtttgagaccagccagaccaacgtggagaaaccccgtctccactaaaaatacaaaaattagtctggaatggtgtcgcatgcctgtaaccctagctactcaggaggctgaggcaagagaatcccttgaacccgggaggtggaggttgcagtgagctgaggtcacacgactgcactccagcctgggcaacagagcaagactccgtctgtaaaaaaaaaaaaaaaaaaaaacaggctgataacagcaaatctgtgcaaaaatacgtaacaatcagaactctagaactctaattcctggttactaggagtgtaaaatggcataacccttttgggaaaagtttagtagtttatcataatatgaagcatatatacaccacctatggctccacaattccaattccaggtacttattgaagatatatgaaactaaattcacagaaagacttgtacaggaatgt

SEQ ID NO: 586928 - DNA, 4001 bp, Homo sapiens
taaagtggaccatcaacttagacttatttgatgtcaccttgtcaaggagtgaaaacagaaagcaaaactgataaaaacacagacaccataatatcatatactatggaaataatttaaagacagttactaaattaattaaataacgctacatgattttttaaaacttacataagtacaattgcacttctgtttgttgatgtttaagtctctattcccaacttgatactcaggaaaacattacaccaaaaagtaaatagatattctaattcaatgcatttcatttaacgagcactaagtccaaagaaacacattactaggtgtttaattttctaattcaaagtgtgaaaattacatctctcttctgatttgagatcctcattcacactagggcattcagaaaaagatgttccccatcatatgagaattaaagaatatgttttgtggcataagagcaaggtacagtagacagacatctctacaaataccttcaataatttttattttaacttataggctaaaaaataagcttaattagagcttctcactgctccacccccaattttagaaatctgagaatcataagaaatcaacaccttagggagtaaaactacttgagttaaaacagtttaatcttcaactccattttaataatacctgagttatagaaagatttactgccactaaatgtatgtatatcattttgggctctactttagcattactttacacatcatctatctataagacctatctaagcaaatgtggaacaaacataaaaaatcctcaataaaaataagcacatacattaaattgtaaccaaataaagcactagtgataaagctcttttttctctctttaatttatacttttcaaaagagaagtttacacaactacctatgcaagcagacagtaatgtgtctgcagttctcactgaagtacatatagaattaaataacataatatttcaaagactttagctttacacaattagccaaatacagtcttttgtacaatcataaggcactgtggaaaaactagtctgttccatccagtttatgttctcttggcaaaccatgatctactgcttatgttaagcatctgattgtcagatttgaacaaactgaatattcatgatgacgattaaccatttcatgtctaaaactaagaaaatgcaattcatcatagtaattataggtaaggcatgcacatctacaaagagaccatttttgcatttctatttttaagaaaatattttaatagaattaaagtcggaaaaattaacaggcataagataggataataagatatacagatcagcgtgtaccaggcatacagctcttttcagcaaatgtgattaaatgttctttgtttgcatttaagttgtcatatatcaaacagaagacatgctttttacaaaaagcgtttaaagcatctcagaaagatacacataatcacgtcggtttaccaggttaaactaaaggtttgatgatttggggttgggagggagttcaaggaattaagggggggggcggttattacaaagctaaccaaataaaagaaaaataagatttacctttgtaggataatttcagccttggcacattgttcttcccattctgatagtttgctcttgctgtaagtaatactccccagaaaagacagacaatcctagttaaccagcccatgctgcagacgctgtaggtccctttgctgctttagtcttccttcctgtattgtgcggccagagaagttcaaacaatctggaaactggaggtaacaggtgatttaggtcagtttcattcataaatgcagacaatcaagacctcatggcaacactaacacctcttcttctgtaacagtcactgaagcacagaaacttcaaaccctccaaaaagaaaaaaaaaaaaaaaaattccgagccaggcaccggataatgaggcacaactgttgtgtggaaagaaaaaaaaaaaaaattaacaaggtctgctgcagtggtgcttaagaagcagttccttttatctaagctcctctgatagccggtggcagtctctaatcctgctccctgcttcattcggctccggggaagcagaatgaaagggaaacagagagagagagagagagaaagagagagagagagagagagagagagagaaaccgtgagcagcgcggacttttcctgtacgcatgtagagggagatgacacaagatcccacagacaggtttccccaacactcactagactggctgacaatgggagaacaggcgagctcaacctactccccttccctcctgtcacacaacacatgcaaaaaacatctcgtagagattagagccgggagcagaaccctcaggcgtgcctgtgaaaggcatgtagctataaatttacttcccaaggcaagcgttgttttatagccatttttgggtgcaattttgattttaaaaatctgaattctgctacctacaaaatttacaattcatgctcattatacaatcctgctgaacttgtgcattgtatgtgtgcgtgtgtgtgtgtgtgtgtgtgtgtgtgtctatatatcctcatcaatacaactttaaccactgaaggttttaaagccttgttagagatcattccctcctcccaacaaaccccctgggctcaaccacccccttcctctgtcccactgcaatttcagggaagaaattcctactaaagcccattccaacaatcagttcaagacaaatataggtcctttgagaattataaattacaacgggggattctcaaaaggatactcagaatttaaaaacgtctatggttttccagcttctggaatgctctggctaacattttcaatgcatcacatctcattaattaaagacacttccctagttttggtttaaagggcagcggaagatgacaaagttcacaaaagtccctgctgagtgtcaaggagtaacatgaaaagaatatctctgtgtcttcatgagctgctgaagggttactaaattttctgtgggacgtataggcatgtattcaggcagtcatatgaacaccattagttccttctgaaacaagtagttggctgtggcctctcaattttctctcttatttttcattcagttttcctcaaagctgatatttttacaagaatctttaggggatgtataaaaaagttaacaggacagaactttctctcctttattccccaaatgattctgccctaccccctcctaccaccactccccaccccccacctccagaacagcacttggaatccagagactcaacttcaatagtagggaaacttcttggctgaagggagagagtgagtctcacaattaaaaacataaacacctactgaaagtggcttagtattcttaagaaaatgatctaagcattgtcactacagctttcattacttaatgtccacagaccaatagagaaagcacagcgctcgctcgctctgctttctctctctctctctctctctctctctctgtctctccctctctgccgttggatgtgtggcttgtgtgaatgtaggtggagaaggaggaagaggaggatttaaagagggggagaatggggaaaagggagtaggaattctctctctacttcactagattgactcatcaaacagatcttattgtatttgtcagtttcctcaagcctattgatcagccagtattgttaagaaaataaaatccaaaaataatgttgattttactgattcccacacttgttatactaggcactttcacgctctaggcaatggattaaggctacaaatgacaagaggcttgtctgtcttccatggattactctctatagacattcattctgcagaggaattcatgtcgctttgggattatttcaaggattggactaatgaattatcctattgaaatctcacatataattagtttaaatgctttaagtagttttaccattttcattagtatatattttatatgtcttaaaatatatttatatttttactcttgttttctagaataga

SEQ ID NO: 586929 - DNA, 4001 bp, Homo sapiens
tcactgaagtcactggaatcagttatctgccattttatccagatgaccaacaggcagttgttaaatgatgcagttgaagtaaccatggactagtgccaaattcaaaccaatgacctagtggtgagcaatccagtgagccatgtatccaccaatgcatattttaaataaatcaaccagaatgtgggctgtcaaaattcccaaagataaatcaaagagacaggtgtcactgcttcaaactatagatataaaattggtacatgctattaactaatatctgaatcccaaggaagaccagataatgtgttaccataaacctacaggagctctagtggctacatcatgtaaaataaactcaggaccattaaagaaacacaatcattttgcttctaccataattacacaataaagtgacccaagagtccagtaaagaaatttatttttacaggttacaacaatgctgatcttcattatttggcttttcaaattaaaatttcatagtcaaaattattaaattctttgtaagaaccactaacaactgaaaaagacagcttcattaatacagaataaaaagaattaaatggaatatgcaattttaaacaaaaattgtaagtagatttcctaggtggtgcatatgttatgagagttagaaatgaaattgtacgcttcttttaccacacagatggaggaaactctagagatgtttgtgttggtaattttcaaaagaaacagtttcttcctgcttccacaacctcttcaccctgtcatccctaaattaacttagaaagaaactgattttatgggtgactttccctcagtaatttaccccttggttctgttgacttcatagttaaagccaaaagaaaaaaactattaatatgcctaacctttgttatgtttactgagcaagttgatattatttacacattttttttacatattggtatcttaccttatatgtttctcccaaaagtacatatacaaccaattgcaaagaatactggtgatacaatggcaggtgaaacgaagatagtctacagggcaatttgatttacatcccacctagtgatgaggagtgaaagactgaaagccaagtgtcttaaatacacccccgcctccccaacagtatcttacaacttcttccctttaactcagacacagacgttcctcttggtgttttcacttctgctgatcgcaaactaacaacacattaagaaaagaattctcttatctcctctggagcaattttgcctttgaaggcactgtaatactcaacttgaaactctccgcaggtgtcaccgcctaaagaaacaactcgagcagggctctcagcaaggggaaagcttccctgacaaaccgcgtgtgttcttaagaaaatgtccaggcttgagcataccaatgtatgaaaaatcaatatacaggccaaaaaagttatactttgctaaatctgtaatgcggaaaatgaccaatttagcttaccgaggttgaaagaaatcagcacggaaaagtcatcagtttgctaccggggttggatgcgcttgtgtctccagtccttttcccagacgaccttattttctagcacgtcgcaaaggtgaaattctttcttcccggtcctctgagtttctttgtaaaggaatctcagcgctgcagtgccgcggcacccggagctcttctccgcgtcgctcaatcaagcacctcggagtgaatggaaagtggccggaggccgggggcgagcgctcttggtgtccgattacagcgccgcggcgcgcggctccggctgccccggcgcgccgccctgcaggctcgcatcaccaccgcgcagccccggccgcatctccgccagccgcgaggccccaccccgagcgcgcccgcgagagcctggcagggagccgcgggggcggaccgggcggggccgacccttagagctcgcggctggccagacgcaagaatgcgcggccgcaggctggagccctagctccgcaaccctgctcctttcgcagtccgcggcggagtgagcaacttgctgggtgcgctccacggtttttgttgccggcggctctcgaagacttacacaggctttgcctggccgtaaatatcaaagtgcaaagcagttgtggttttttatttttgccagggaaggatcactgcagccttttaaggcaaagagatgcgtttttaaaaggacgtgagttttgtccttattctgctgcgttttttttttgttttttgttttttgttttttgttttgtttttggagagggaatctcactctgtcgccaggctggagtgcagtgcagtggtgtgatcatggctcactgcaacctccgcctcccgggttcaagcgattctcctgcctcagcctcctgaatagctgggactacaggctcccaccaccacgcccagctaatttttgtatttttagtagagacagggccaggatggtctggatctcttgacctaatggtccgcccgcctcagccgcccaaagtgccgagagccaccgcgccgggcctctgttgcgtgttttctaaaacaggtcaagataaacgacaatcttgttgcacaagtgtatccttttaatgggtattgtttcctattgagtttccttaatgccctgaaagcagtaattctgttgacccctccacgttgactcatatccagtacgttgtccccaaccatactcccaaacataattacacgaagaaattatttgacaattctatgtggagaggctgttctgagttatgccaacagattgccataaccacacatctacagaaatacatcagaggtatttttccagcattactttcaggtacactcgttaaactctggaactgactttgatgtttaagtgaaaattacttctccggaccacaataaactagatgtttaaacatcgggagaaatgagctttgatccccataaaacaagcaggcacttgcttaaaatcactgtggggcacagcccagcagatgtcactctacagaaggaacgtggagtgtaatatctccaccttatacctgacaattcacataatgaaacaatcattaaattcttataaactgtatcatagaaaacccctctgggggtgcaaaatcattgttcagtgggaaagttgaatgaaatctcaggtaggaggaagaggtgagtgagacacatctttcatgtgtctggggcccacctcttgtgttcagtaaacatacacgtgtctcagactcacgctgcatagtcaaggaacgaaggatcaagtcaaataatgcaaatttatgagttcaaaaatactattccagggctaatattatctccaaacgtcaaaaaattaatatagtaacaacagttaaaattattttttgtgatgatgcgtgagaagatccttgacataaatttgtaataaggaatttaaccccccaaaaactgacaatattaaaatccagatgtcaatgtgaataagcactgtgcgtgcttctctgaaatacttctgaaactgagtaagatccaggttatatactctccactattatcctccttctgatatctcattcggcatttatatattaagcagggagaagaataaatcattagaaagatgagtgtgtggattaaattaatttagaaatgtggagctgttagaaattgatcagcaaattcacgtaagatggaattcgtttatacattttaagtttgagaaaaccacgataaagagttgcaagatgaaatgcatctcaaacggtgtatttacaaaggagcttaattccaaactcaatttacaaacaccaatgaattagctcaatctgttacacattcaggggtttggaggccttgacaaatagcttagatttaatcacagcccatgaaatttgtgccgaaattccctcaatattgctcaaataaacctcttttcaatgtgctcctgggatttaatggtatttgcttagctctgagacgtttacagttggccacacctcaaaatgaatcataaaaatactgataggctttagcca

SEQ ID NO: 586930 - DNA, 4001 bp, Homo sapiens
ccctttccgagtcgcaccattaagtgaattttttttttttttttttagagacagggtcttgcatacaatgatgcagtcctagctcactgcagtcaaactcctgggctcaagcaatcctctcgcttcagcctcttgaatagctgggattataggcatgtacaactggtggtttatttctttcatctttgctgcctattgctcaatatctaaaaatagttgcttcatgtagtttatctagttgaagagttgtttatggaagaaggtataattcaatactatttatactggcaaggttaaaagccttgactttgtttttaatttatagcctaaaccttaccaaaactgttaatgttcacttgaaactaagataattttaggggaatgacagaaaattgaatatatctatgattaagaaatggaagacattcaaatacaggttttagttatcgattgtggccaggcgagttggctcactcctataatcctagcactttgggaggctgaggtgggcagatcacttgaggtcaggggtttgagaccagcctggccaacacggtgaaaccccatctctactaaagatacaaaaattaaccaagcatggtggtgggcacctgtaatcccagctactcaggaggctgaggtgggagagtcgcttgaacccaggaggcggaggttgcagtgagccgagatcatgccctgcccaccagcctgggcaacagaatgagacttcatctcaaaaaaaaaaaaaaaaaggttttaattattgattaaataagacatcaataaatgatatttcataatgtgatcaatttttccagataaaaacgtcctagattaccaaaaaatatacttccaatttaaatgagtttgatacatataaatacataagaactcaaaaatacataaattattgtttaactctttaatacatgacatatattctgtacaaataccaacatataaaatttataatggatataatgtgctaattcaacttactcttagatttgacatccaatttgcttttattattggtatttcgtttgtctataaaatgtgatcttaaagatatcagaggatattcaaattgccagcataatttttgcctatcacattgagaataaagaagttttattctccctacatcccttttatttcttgaggtattaatgaagcccggagtacatcaaaaaggaaaactaaagtaaaaactatttgggcgtgaaactggacacagacacacacaaagttgaccaaccataattcatataaactttgcttttatatcaaacatttaaaaacaactagcttagcagatttcatttcttagaaaattgtttcatcttttttatatttaaacctttcacattgtctttttctattaccaagtacatatatagttgagaacttgaagctatcctgctgtcttaaattctttttgaagataccttactgtgttttaaaaaaaatcccctctaactaggaataaactagtaagagttatatgaaatgtgttaacatttttctatttttaggaatttatttgttttaacaccaaactgtttaccacttgcagatcaaattgaatattataaatactgggctgaaaagggtacttgaatagctttagcatctttttcctcacaaaaatgagtaattgggcttcgtgttctataattctatttttatgaactgatgccaaaacatttcacagaagtcaatatgcttttctaaaaagaaaaaatatagcaatcaaaaaagacatttcaaaatcttaataaacaatttagaaaatatgtatatatttacctttgtaggttagcttgagtcttggaatattttgcttcaaagtgccagtgactggaagaaacaacatggtcatgcttagcatcatcaaagcaggaaaaaggtgaaaatcttggcttctggctttaagtctttcatctttattagcattcatgatgaaaacaatgttctctttcaaatggtgttaatttaatctaaaaaagagtaaaaaaaaaaaaactattaaggtatcagcaaactgacacaggaagagaaaaccaaataccatatcatctcactcttaagtgggagttgaacaatgagaacacatggacacagggaggggaacatagcataccagggcctgttgggggctgggggctgggggagggagagcattaggagaaatacctaatgtagatgacaggttgatgggtgcagcaaaccaccatggcacgtgtacacctatgtaagaaacctgcacgttttgcacatgtatcccagaacttaaagtacaaaaaaaaaaaactattaagataacaattggtagactttcctcaacttactaaattataatgttctgaatgtatatagatttttaaaaataattttcccatcgctcttgttttactcttatagaaatgaatcagaactggggaataaaattaaggactggctttgctcagatgtagaaataaatgcaccacaagaatttaaactattttgttatttaacattttttccttgactaaagttgtttttgtgttttgtttaagcaaatatctgaagaaccaacttttgtcgaaacttgaattatttgatcagacgagaccactttcactggtagaagcctatacgtgccccatatcatccccaaatgaaaagatccaccaactaaaacagacaaaagctgtcattttgagacaagttctcttgtttctgagtttagagacatctaaaaattacacttaaatgtgagaaactaactttaattaggtcagggccccagtataggtgttaggcctggaacaatgcaatgttacctgaaacctgtattattccacacagggaagtaatgaatagaaaaacaaattccaaaatataagggtttataagagggaggaggtggtaattaactgggttgccataaaataggctaacttggttgttttctgtaagatgtagagtcaatcaaaacacgtattccaaactaagcctggtaacaaaaattacaaatcatattatcgagcatttatatgttcccaatacttttttaaaagtgctttacatagattaaatgatttaatttaaaaacagccattaagggtgggtaattatttatctcacttcaccgatgaaacaaaattgaggtacagagttaaatagttcttccaggggtacacggcaagtaagagatggatcaaatcaacacatcatcaggactttagctagagtctgctttcttcacacctaagtcttccagtgctttgcattatggtagaatctagtgatcttcagctcctgccagagtcttcaacttctcttccatgttaattaacttactgctgttactaggaaataggccacaggaccaataatttatttgatgatagatttattggtgatagctttgatcataataaaaaaagcattagactttaagtaattttgtaattagttaacattcaaaataaatattttatgcctatattgtttagttttaagagaaggcctaataagggttgaatttttcttaagtgagatcagctcttcagtgtattaaaatgtctcccagactttgaatatcaagatttcagttaccttaaatctcagtagttaagtcaagtcttgggaagtaaaataaaatcaaattttgatgtgtattatgtttatacatgataaacatttaaggatagacttcaaattttatgctgcatttcttcatgaaatgttaaacatgagtgcttaataagttgtttcatcaatcattacatttcattacattcaaagatacctataaggaatactaaattattctttgtatataatctgtcaacatttaattcttcttttagaaggttactacatatgcatataagttggtttagattctctttcaatcatgttgtattaaatataacaaatattgcatattttatttacatttaattgacatttcctgaacgtttcacctaaattaaataaaatttgagaga

SEQ ID NO: 586931 - DNA, 4001 bp, Homo sapiens
atggaagccaactaaatatatatacatttcaattcagtagataccaaagcccaggcggtaattatagcctttaggaatgatttgaagtgaatttattccatccccaagggtcttacaaaaaattactccttgccctgaaggacctttaaatatatttaaaaacaattacataaattagaaagtattataagatactataacaccatatcattcatctttgtgatacatttaaatttttttctaccaaaaccatacgagataggaagtgttcattagtccctttataatgatgaggaaaggaagcctcagttcgatgatttagcaagaataagacagcatcaaataaaatatactgtagattcaaaaattgtaagtctataccctttccactacagcatactatctcctaatacaagtttcagaagtgttttggagaaacacttctgaagcctggtaaggagaagaaaggagccctacatttctatacttggaaaggacctgaagttcataataaactttgtgactcagtgttaggaaaaaagcaatcaggaggagtaaacagctatacacaatgctgagagtacatttcctatttgactttacttccacagtgtatcttaaagcccctctccattcccatcatttcctgggaaagaacaagtcaggagggaaagagtcagtgtcctcagctgacctctgttttcaccctcttttattctcattttctttgctgctgttcttttccggttctgaagttgatctggctacctaaaatcacccctgggacttattcttagggattctgttccaccactctatcctgtaaataaaaccccctttttattctggtttccctaaattaaagctcaaaactcagagaaaacaaaccaaaagtgcatagaaataggtttacatcaataatattttaactgacatttaactccagtttagctacagaatacttggctggcaggctctgctctctcctgtgcagtgccctaattcctctcctctccaattgccacaatcccatgttgcctgagagcatcagcttcccagcggaaaaacaggttggagaaagagggcacattgtccaggtggctagtaagctatttacttagtatttcattatttcctacatcatggatttcaaccaattttcaatacctagtaagtttaaagtttttctaaaaaattcaaaggttatgttttatatttattgtgttaaacaaaaatgaaacaaatattgaaggtacacagaaggccaatgaatacatatctttcactaaaagtatgttttctttccccttttggcttaaggtgaggaagaaatcaaaagtatttatctggaagagaagtagaagaagagaaaaagagagaaggggtggtgccagcctcacaaaggggtacacagaattaagtaaaaacagaaagggaggagggggtatagtgataacccagaaatgacaaggataacacaagacagatagaaggaggaggaggagaggaagaagagaaagagaaagagaaggaagaaaaacaagaggaaggaagtagagaaaaaggtggaggagagaatgtagatgaaagaattcaactgatgtgtcaggagggtgcctggaggtcccagctgtttcactaaatgcagcactgatgagaaagaaggtgaatagacagaaagccccagccttttctctaacatatgttatgctaaaggggctataaatagttgtccaggattcctcagtttcatgggtattcctgcttatcccaccccatcatcttttcctttgaaaaacacagttctaaatcattttgttttattcagatactcacttgatgagcacttgttgaatgcctactaagtgtcaggaactgtgcatggcaccagatatcttacctgttcatctaagggaaggcaaagtgggagactttctttcactttccaagtaaacaacacatgctgagctgatagctgcctataggacactgtttagtttaactttaggcagtgtggtctggccttagtaatattagttctattgtgcgttacaaagctgggcctacaattacctttgttagtactgtttattttgtggatttggtctgttgtctccaaggtgccatcagataaaattccaactttccttaaagtataaacaaaataattcttacaataacttacaaacatgagagacatcaatattctttgctccttctagttatctactctaataagagctggtgttcattaaagaaaatctttgcttttaagtaaaaatctgatgttaaggatctctcttcatcttaagttgtaatttaacaattagctcatgattgcttttagaataaaaaagagaacagcatagattaattctctctgaatctcatctgatttactgagtaatttataaaaagcttcctaagggttaagtattctgcacagtaatctgcattatctcatgtaatcctttcaaatttttgcaaattatgttttaccactttaaagataagaaaatgcatattcagaaaacctaagtaacttgctcatgccatgcagtctgaagccagattcaaattagatatgcctcatccaaagtctagggggttttaggccactgaaattcgaatgtaagagtgttttctaatacctgggcttaaactagctgctatgtttcctatgccaaagctacaaactaaatccttgagcatagcacagtgatggctgagagtttaggtaccaaggatggtagtgaaacacatttctaagtcccagaaatcaggcatgacaatagatttctcttttattttttcataccagttgtggaggtaaggttaccaaggcaaaggagccctatggttagaatatcctgaaataggtgttagaactagggctgaaaacttctcgagtaatcagttgtcttggccaccatagggccatatgaaggaaagatatcaattctgcagagatgtcttttcttgaagtcatcactgtttttgaccaaaaatgttctcttaatatcagagactgcaacacttggtgtaaatgtggtatggacatgtcctgttcattcctagtccagaatatccagactataaaatatccagtcttgtcactatcattcctatcatgagtgcaaagaataatgctcacttaagactaaggaattaataataacactgatgttttctcttatgcctccaatgttatttaaggctttactgtgaaaaaaaatatcaaaataaccatcatcctttgtataaggtacagagtattacaaagtgtcatatgttacactagaaactactaacttatggccctgtctattaaaaccaagaaaataatctaaatcttcattctgcaccctttggaaaatattataaatggtataattttagtttagttttgtttttaactctcagagactgaaattataagactttaacactgggatggctatgtatgaaggggcatgcatgcatgcaaagtgatatttctggattcctgcagactaaattcctctattaaaccacagaagagttttatatacaaagataaagaaatacatctttgcacacactcccactaagaagtctcaatgatgattcctttaaatgtctttgatgaaataaaactgactgagcagattgttagcaataattttcaccagtaacaaccaatttcatggtttggtgctttattatgtggtcatagaactgaggccaccaagtgatctcatcccaaaaagaaacagaggccctctctgtgtaatactctcagctctgactagatgacaaatctgacctggatagcaaaacaacaatatgacaacataatttttaaagcatatttcattatgacatcatagctgttgaatatatttattaacaaagaacaggcattgattatatattatgtatagaatacttcccttgtaaagctgaaaaaatgatttgatacacataaattttccactccaaaattgacccagttcatatat

SEQ ID NO: 586932 - DNA, 4001 bp, Homo sapiens
tctactggatagtattataggaaatctatttaaactaagaaaacatccactattctaaaaatgaaaaaatttctatagtcaacatttactgaagattgtccaataaaaagacaaaaaggccaaacgtgtcacataaaattgaggactccctttttgtttctcctgataaatattctacctgtacttagaaaatacaagcttctgttctttctacagtgggggacaatttaaaagcttacacaattgaaaaatgattcttatgtaatcctgagtattacatctgctatctgtctcaatgtgtcaatggctagtgataataaatacttctttgctgacaatttattccgaatttatattaagtcagcaaagtcactttctctgagcatggttttgtttattatttgtttgtttacaggaggaattaccaaacctattcatgactggcttgtattggtcctgatgcaaaatctatcttttaatcatttatttatgagtatgatgttgctttacaagacaattgtagaatgaaatatttaaacatttgctgttagatcttcattaaggcaatataaatttacactacaaatgctagtgaatactaatactttaatccatattagccattttacaagcattgtcataaactattttcctttgccacacatgaaaaaattctaataatcaattcaactggaaaactaatttatattagttgttaatcattttaattacatgatgatgacagttatgggtagggcatcatttttctcctcgggatttttattttctcctcttacctccattatggaaacaaaacaaaacaaaaacaaaaagaacaaattgcacccctatttctatagccctttcccagcatccttgtttctcatatgcataaactgatatttaaatatctactgttaacttggtggattcagcctctcaaggctattttcaacctgcttcctcccttcctgtgttccgcgggctagtgagtgaactccttattgataaaatccaatgtttacagacaaaaataacatctctaagttgacatgtgattttgcactgttttcagatgaggtgagtatgacacattaatcagaggtacttagaattttaggtcagttttgcaataaatttttcaggtgcattttaaaggtctttgaagaccataagcctatgttaatgttaaacgactttttttttcttttttctttttctttttttttttttttaaacaaaaggatctggaaaggtaacctacctttatgtgacaggcgtaaccgggggtgggtagtatcagctgtatgacctcctgtccaaagctccagtaagtaaccccacaggagcaaggtgataatgtgccccgcggatgccatgctgccgtgttcaccgtccaagccctcgctcctcactttaaggagggtctgagttttacttaggacttccctccaggggcagcgtgcgagaggctttgtcagaaatcgaacgcgttgtcatcagaaagcacagttccgaagtgccatttgtcaggctgtatttggctatgtaaaacctttctttcctcgggacagttgtttataagccgggagcaagaggacattccaaagagtgagtcttcagagccatgtcctgtctagagcgctcttcagcaactacgccggtagattcaggaagaagctgtatttttcagtcacttgggcaaagctgttcattcagaaaaaaaaaaaaaaaagagagaaaaaaacaaaaccgagcacacgcactcccttctcccgtggaggtcctctcttcgggctcctggaagcctctcagaagtcagcctcttgcactgacttgccaaactgctagttttaattcacctttcaccttgctaattaaaaacaagaagtgccattccctctaggagtcgcaggatccacccagcagggatgcagtctgtcagtggctgtttacaggaaagttcaggcagggttgagcagcgtacttgctgtttctaggaagtatttctggtccacgtgcctcgctcccatcctccctcccagtcataaccagccccacgttactcagcagcaggagagaagtccacattttgatgggggaaatggggagttcgggaggggtgatgacatagactgattatttaagaataggtgacagacaaggatgtggcatcagaaagcgcttttaaattcttaccaagataaattgacctaagttgaataaatccaacttcttttgaaaataatctatttgtaaccatccagaatccaaattctgtttttcactgttgccataaggtttttttcaaaattaagtctttttctattgcttatatcttagggatgttatttttaaactcttttaagaaaagtgtgtttcaagagcctgaaaaaaaaaagttcatctgtgactgtctcataaatttgatagaaatgataaattatttacttaagcaaattggtcaaatgaaattaaaggcaaatcctttgtcctaaagcaattcctaaattttacttcaaatttaggaatgttgaagtaatttcccccaggtaaggtaactggcaaagttgagattcaccacccaagggatttctataaagcaggtattagaaaacttaggatgtgcaataccttaggattcaactgctatggacttccagagttgattttccaaggcactgtgtttgtgtaaataagcttaacacaataggtcaactttacaatctaccttcaatcaatctcaaaaactaagccaaacactcaggagctgttggcatggaaatgaatggtattatgttaagataccaataaacttgaatagatatttgatttgatagtggagagttaaatggtaaacactgatctcaactatgataactttttcttattctgtattttaaatgctaatagttaaaaactttttgagaattatgttttaaaatcacgaaactataacaaaaagataacatgtgtcaccctgatatttttgcattatatagaagcatatgtacagccaggcattctctacccatttttctaatcatgagatgttcttgtacaagcagagtatatttagcaaaatgtaaatgtcactggacattataaataattagatttccaaggtctacaaaagatagcaaactctaaacattatttaacagtaaaatgacatgaagttatttagagacttttaacctggaatgcttgcatattttaaaagccagtctgatgagctacagacctaaaggttgctctaaatgtgatacattgtaccttcaaaattctcttttgctttcttctaggatggaaacaaatgacaaaataaatagcagctcttatatgtgttatctaatagtaggattataggaaaagtaaatgtggtgcctacaccttttattgcaaattcatggctactctcacatagctgaaattctacttaagattgcatagtgcctgtcctaactctactatagaactgagacaatgtgagacattacaatcatttcattagtacacaaaatatgcacctctaaagtgttgacaagagaatatatgttatgaatgccaagatctgtctttggttttacatctcatccttcagattaagttggagcaatttagaagtaaatgccagaataatgggttgtttagattcctcaaaatgtgctttggcttatctgccagttgtcaatgtccttacttatttcttttaactactctttatgtccttttacctttatctttatcctatagaaaatatatagatgatgccaaaaaatgactgttaagaaaactatctatagtctcagtttcccctatgtggcattagcaatggaataaagagtctttgggaccaaattagtcacttacatcataaaataaaacaagaagaatcctcagaagtagagtcatcaaatagctcatcatctaaacaagactttttttgagaataaaagaggcttctattcataattacacacaaatcaataatactatag

SEQ ID NO: 586933 - DNA, 4001 bp, Homo sapiens
tctcctgccatgtgaggacacagctagaagccatttttgaagcagagagtaagcccccacctgacaccaaacctgctggtgctttgatcttggacttcccatcctctagaactgtgaacaatgcatttctattgtatataaattaccaagtctgaggtattttgttatagctgcccaaacagactaagacacttgctaaagatttgttgctagcatttgcatatcagcatttgcataatgtttgactaattggcttttgggatcccttctaatcctaaaattttatgttttagagtcatgtgaacaaaggagtattaaccatgatttgttaaacaagaaagcccaaagataaaatggaatgagcataggccaatgtttcagtccctgagaaattcctctgatggttattcatgaaaagcaatgacaggccaggcgcagtggctcatgcctataatcccaatactttgggagactgaggcgggtagatcacctgaggtcaggagttcgagaccagcctggcccacatggtgaaaccctgtttctactaaaaaaaaatccaaaagttagccaggcatgaaggcaggtgcctgtaatcccagctacttgggaggctgaggcaggagaatcacttgaacccaggaggcagaggttgcagtgagctgagatcacgccactgcactccagcctgagcaacagagccagactcagtctcaaaaaaaaaaaaaaaacttgctctaacctcacactcagtaaagcaatcagcaagcagccatccaaccatttgctaaaataacttcattaaaaaattatttattgtcagtgcatacattctgcaaatatatccatcaaaacagcactgttcttctcatttattgggcgattcagaagttttactttgaatttctttggtgttaagtagaaatagtctgttgcactgctaacaaggtcatcggactcaaaaaacatgtaacaattatctaaatcaccattgatacttaaaactccaattagtataaaagctaattcatgcccaaacataacaaacaagactttatcttctatgcctacatcagttttccaagtcaatatttttaggctatataatcttattgaagtacaaaatgcagagttatatttgaaagatatacttaactgtatctccatcagcaggtatttgtgtgggcatagccattgttctttctgccatgctacactaaaagagctggaaatttaaaaaaataaacatttttaaaaatttcttacaaaggctatattcttactatataatttagataattagggggcataatatgggtatttttgcaagctttagtttttagttcacactattcatctgttttaaactgtggctgtcttgctagatgggcttctacatgatgaataatatgtaatattcaacttataatgtagagtaatacatttaaccataagcacacaaaaagcatcttaaagttaaactccctttggaaatcaagaggataagagcattcttcttctttaaatgactccatggtcgtaagaaaggaaagtagaaaattttgctttaaaaaatggttaaaaaaaaaacaaaacaagacactcacaagcacttaactttccagagtagcataccagaggaggcttaggcatttgaatttacccattgaaagagaattgtgaaagcagaccttaaaaaacctaaacaagttctttagacactgaactaaaataatgataattctcatttatgaagcatctattatacagctagcattgtgctaagggtttatgtgctttatttacctctgttagtcctcatagtagatctgagatgtatgtattttcattgccatatgccaggtgaaaaaattcagactcagaaagattaaataacttactttcccagggattcagctgtgcagcagacacaggtccgaactgattccaagctggtgtcctttctactgtccccagttgtggaccaaataaatattcactgtgtttgtaacagttgggaacagggaggagaggtacaagagagcgtgctgtgctcatctccaagcagaactgcctgagaaggccatgctaccctacttttgaacacagcacagagatactaagaatatgagacatgtttcaaaaggaaatattatatatttataaagcaagtatttgaaatatttgagaagcaaacagaatcaaagaatggttctgtgccataatctcttcacttgctctatcctgaggattattgcactttagtatacaaacgtatatcattttccctaaaattaagcaatgttttctgatatagatagagttctgttttgtggtgtggtttaatctagaccagtatgtatgaaggtttttaaaatttatttatttatcagaaacttaatggtggacattgcagtaattttgagcctttttttttttttgctctacctcctgggttcacaccattctcctgcctcagcctccctagtagctgggactacaggcacccgccaccacgcccagctaattttttgtatttttagtaaagatgaggtttcactgtgttagccaggatagtctcaatctcctgaccttgtgatccacctgcctcagcctcccaaagtgctgggattacaggtgtgagccaccgcacctggccagtaatttctagcctttaatggaaatcagcaacaaacattgttgatttaagtcaacaatgtttggccaggcacagtggctaacacctataatcccagcactttgggaggccgaggcaggcggattacttgaggccaagagtttcagaccagactggccaacatggcaaaatcccatctctactaaaaatacaaaacttagctgggcatagcggtgcaggcctgtaatcccagcaactcaggaggctgaggcacgagaattgcttgaacccagaaggtggaggttgcagtgagccaagatcccgccactgcattccagcctgggagacagaacaagactctgactcaaaaaataaataacaatgtttatttaaatcaacaataaatattgtttttgaaatactgtagtaatttgaagtaaactactacaaaattcaagagtctctatctctgtataatgactgaatttttggcaaatctgccaaaaattatttgagaactagagatgcaacttatcttgtatttaaaagcctaattaagtgtcttaaacaaagaggggtttatttctttcacataagtctagagcagaagtttttcaaagtacgatcactgggccctgaggattcctgagattcttttgcggggggcctatgggttcaatttttttctaataatactagggttttttgttttttgtttttgttttgagataggttctcactctgtcaccaaggctggagcgcaatggcgcagtcgcaactcactgtagcctcaacctcccaaactcaagcgatcctccacacctcagcctcccaaatagctgggattacaggcacctgccatcatgccctgctaatttttgtacttttttgtagagacagggttttgccatgttgcccaggctgatcttgaactcctgaactcaagcaattcttctgcctggcctcccaaagtcctgggattacaggtgtgagtagtatggccactgcacttagccaatagtagggtttaatttgcctttctactgtgttgatgtttacactgatggttcaaaagcaatggtggttgaaactactgctaccttcagccgggcacggtggctcacacctgtaatcctaacactttgggaggccaaggtgggtgtatcacctgaggtcaggagttcgagaccagcctggccaacatggcaaaaccctgtctctactaaaaatacaaaaaatggcttggcgtagtcgctggcacctgtaatcccatctactcgggaggttgaggcaggagaattgcttgagcccaggaggcagaggttgcagtgagcagaggtcatgccactgcactccagcctgagca

SEQ ID NO: 586934 - DNA, 4001 bp, Homo sapiens
atcatgttgtcccatcatagaataagacaatgctaccatgcaaatcacctatgtagcttccacatttatttcatagcttcactcaactcttatctcctttagtcccacccactgaacagctgaatgagatgaaagattgtttactgctctcccgccacgaccgtaccacccccccatcaccacccaaccaccccttactcattcccttgcagtctgaagaaataaagaatccaagcagcaatagctgacttggtcattgtttatatccccccttcagtctatcaggattccataaatttcatccctacctgtacacttttaagtctaaaatactctcctccccatgtctgcacataaactttagggggaaaaactgactatactcatcacctgcatgtgcataaatatgtaaaacaggttagatgcttagtaatttagatgatctgttcatttacattctcaggggcactaacaaagatattttttcctttcatcaaaataaaaaagccagaagaaagaattcttaaagctgaactatttagcaataaactcaagaaatgtagtaagttattatttcagtaactaagaaaacacctggacgtcacaaattctttcctaggactgtaaaaacccaaatttgaaacagtgtactcttcaaaagtaactcagcaaatggaaatgtcctagaaaaatctcggttgcttatttcttactatacacacagctgaaatggaactcaggagtggaaaatgtaaatgaaatggcctgttctttttccaacatgtgggggaggaaaggaaatgaaagggctcgttaagagaataactgagaatattgaaatattttcaaaaattaatttccctaaacttcgccactccacatctccgctccctcccttttccaaggacccttcccaccctttctatctcctccggggggcgcccttcccaggcgttctctttcccttactcctaaaaattaagcccaaattccaaaccaaactaccgattctccctccgttctcaagactcgcccgccatccaccggccttccgggctgcgcctggagagaggcaaccccgagaggcgggaggaggagcggggaggcgacgcggtgactggagctgcggctgcagccgccgccgccgcctccaccacagcctcagcctggtgcatccttcttcctccctccccgccgccgcccgcccgggttggcccacacagcaccctcgcccgagcgttcacactcgtccccaccctcctagccaggcccactgccccacgaggggacttctgccgacggggatgcggccggggacaggaggaagcggggccgcggaagccggcgggcccgggaggagactgaggaaaggcgaagggacggagagaagcaagggcagggctgagaccaccacgctcaggctgctccggccgcggaggccgcggctctgcgccgggggccagcccgccgcggcacaggaaatgccgccgcctcggctctcctcacgttcaattcaaactgtcaccgccgccgcctcccctccccccgagcccgccgctgccgcgccccgggcccgcagtggcccccatcccggctcccctcgccgctgcctccgcctcgcctcagggcgttccctagctcggtccagcggccgcagagcttcccggcattcggagccgctgaccccaagtcgcggcacccgaagctgagactcacccatggtgctgctgttgacgctcctctcctcagcagcagcggatctcgcactgaccgacatcccctccccccctccgcgaccagccccagcggagcgcagcccgccgattctccaaaggcgcctacgccgattccgcagcgtagccgcccggcgtagctgccttgcttacgcacgctacagcaggcggactcctccacaggctctcgctcgactcccgctccctcctccgtcccccgccccctcagacgaggcttccgggcctagcggaggctggcttccatctcgcgagattaccgcctccccagctccgccgcctcgctccatttcgagcatgacttcattggcgtcagcaacgttttgctgttcgggtttagccgccatgtttaagttggccgggtttcgcaccactgaggtcatggatactcaggcctctttgcgtgtttcttcaacactgcttctaaggttaaccgcgttacatttgttggagaaaatcctgggaacgctgaaaaggactagtgggtggggtgcgagggtggggtcttgcccgaattaaagatggccgcagtcagctctgccccgcgcaatttcacgtcaagttttggagctgcgggagccggccagttggcctcagcgcctccttacggaattggcgtaaggcaaagaggcgcggctggaagaaccagactgagaaagtgccacagggcgggggccgcatccgcccctcggcttctggttactgacccgacggctttgtgagtgaaagtgaagagacacttcgaggcaggtgtctgtgctccccattcatccctgtttccgtggctatcttgactttcggggtgaaaagtgaggttaggccctgtttccccgacccttccctcgcgccatcacactctagtggcctggcacagccccagaggtcggccgctgtagcccccattgcggactcgccacattcatattggctcaccttgtcggtgcccggttcggtcctcttggagctcacactccagttgaggaaatgaatggacacaggaactactgggtaacaaaatactaataaagggctgcgattgtgtgagtttctactgtagcgatgaatgtcgctgtcattggaacgttccccaagtgccttctagtgaaagccttacttcactcggaataacctgtggtcttttcttgaacgtgatggctctcttggttgtattcttcatgcacatgtgttacttttcctgtttaactacatgttaaagaaatgtgtatgttcctgtttaactgcatgttttaaaaaagtatgtgtatttttaagttataggcacgtgcaagaaagttcagagcaaaatagcttatattagtgaaacaataaatgtctactaataggagaatggatgaataagtgtcattgttgaacaaattgacatacaacacgaaccaaaaaatcagtgaactaaagctaccatttttcatatggatagagtcattaacctaatattgaggaagaaatgaaaagacaggttgcggaaagatatatatgacataccataaataaaagtttaataattacaaaaaagtaagatcaaactaaaaattgtataaggaaatgatagataccaaattcagaatactggttgcttccagagatgaacagaagggaatgtaacaagaagggttcatttgtatctataacgtttgttttctaccagaaatatcttgaaaatgtggcaaaacattaagctaagtagagggcacatgggtgttcacttgtaattatttcctttactgttctatatacttgaaatatttccaagtaattttttttaagaaaagaaacttatagaagcaacttattttgtatcttgatatatgccatttcgtaagtctacatttttactgaactgcttatgaagtctgttgcaacttatctgttcaatcattgttttaagtttctgaaacttcaaatgaacttttactttgggaaattttgttgaatttctatttttgaaaaaaagcagtgtaccaaggagggtaaatgtatatagcctccggagtcagactgcctgagttcaaatcccagctctccatttattaggcttgcaaccaagaacaagttacttaaactttcctgtgatccagtttcctcatctataaacggagataatacttatctaacaggattttgataagagttaaatagactaatacatgaacacggtgcttagtcaatgcttagtaaatattacctaaatatagattattttaaaatataaaattaaagcaaatacttata

SEQ ID NO: 586935 - DNA, 4001 bp, Homo sapiens
gcctggctaattttttttgtatttttagtagagatggagtttcactgtgttagccaggatggtcttgatctcctgacctcatgatccgcccgccttggcctcccaaagtgctgggattacaggcgtttgagccaccgcgcccggctcatgaattctttaggacagcaaataatcctcattttgtagatgggcaaacttaacgaggttaagatcacacggtggtgaataagcggtaaatctactggtcagacacccttggagattcaagggtccagtgacttggagtgtagtgggaagaagatggggtggcccctgcagcacagctgtatggggcttggctcggctaagccagagccagcctttccttggcttctggtaggtctgttctgcatgccacccacctcccctggtgtcccgtggctcaccatcaatcttgaatcccatagctgcttgaatctgctgctgggtttctcctcctgttgtcagctggagcatggccaacaccgaggccaccccatagggtgagaaaaccacgttgcggtccttggaggcctgcgccacctgctgaaacaccctcaccccgaagtctgaggccaggtgggccacgtaggatgggggatggtgcacagcagacccttcaccaaagacaagggccaggcccaggactaggcaggtgagggctggagacatctgcatcctagagcaatggaaagagggctggtgaaggaatcgttctggaagacaggcgggaggggaggggagctggccagctgtgggccctgctcttcttgtttcctgcaagcaggtggtaagtgaacactagggcaaggtgcaggaagagaccatgacatgttcaggttctaagcccatcccactccgtctcactcagactgacttatccccgggcagtggcagggagtcttcgcccatcttgccctgtgggaatcttggaatccagtccatctcccttccctctgtgtcccgtaaaaaagccttagaagaaaagcaggtgagaagtcattaccactctctgcctttgcagcccagggggaatttagcccagactcaattatcaattatcacaacatctttgatttgcataagctttaaatttgctttcttttcttttctttcttttctttctttcttcctctttcctctttctttctttctttcttctttacttccttccttctttcctctctctctttctctctctttcttccttcctttcattcatttttagagacagggtcttgctctgtcacccaggctgggtgcaatggctcagtcttggctccctgcagcctccgcctccccagctgaagcaatcctcccacctcagcctcccaagtagctgggaatacaggcacaccagcacgcccagctaatttttgtatttttttgggagagcagggttttgccatgttgcccaggctggtctcaaactcctgggctcaagttatctgcctgcctcagcctcacaaagtgctgggattacaggcatgagccacagtgcccagccttaattctcttaatgctttcccagcgattgtttcattcaagttagcaggcatgaggtgggaaatgggtaagtgtcttgatgcagagggactgagagagtcaaggttcttgttactgggtgatggggttgttggtgacgcctgaccatcctccctgctctcctgcagtcacccctagggcagggtcgacccaaggctgcaggtccgaggaaaagaaaatagaggaatagcgggggatcatggagggaggagattctggggaggcgagttctctgccttaagcccgaagtaagaggttggagggagtttgcttttctcctacctgaagttctcagaggtgccttgcgattggcggttcgtcctgctctggcggcggctgctgagctgcaggaattcagctgctggaggggggcgtgtgggtcttcttgacagcgctcttggccctgcagccaaacacagctgtgctcctctgtgggccactgcctccttttataccagatgtgggcaggaaatagatgaactcatgttccagccccacccactcactggctctgggagtccgtctgaacagccagcgggtccccctcgacacctccctctctgggacttgctgaggcatgtgtgtgtgtgtgtgtgtgctgctctgtgtgtgtacgtgtgtaagagcattcaggaacaattgagcaaaccccaatagccttggcctgagaacctcccttgacctttctgccctctgcctgtgtctgtctctcccggatgtcctgccaggttgactgtctgccatgccgggtgacccaaaaagcctaggacccctagtgttcagcttggagaaaaaaaaaacagctcacgttgcctgcttttcctttggcgaaccaggtcactgtggagttatcaaagataacctccatcaaaacgtggaagttttcccccagggctgtccacccggtgctctggaccacctccaggaaagagcgcccctccctcctcctgggcccagcccaacagccacagggcatgcagccagccacgtgattgtctaggttttgtctgtctaggacttgggcccaacagaggactcttggtctttccctcatccctgccatgtgcccggccgcctccgatgatacacggctgactccccacgtgtccagactctctctgtgcccctgagggctctcttgtgtcaacaaccttgtctggctgaggttggaggtgtgctgggtggggtggtggtggctgaacgggaccaggggttaccatggtaaaagcttggtaaggaaacaggagaccaacgtgtaagtttcacttcttcgagctgcccgctaggacttggggcagcttgtcctttatcctcttcctccagacacagacacaaggggaaaagggatagaaacagagtgtcaattcatggcaggtttgcagggtgtgcttttagggcaagggggtgaggggaggaagagtgaccgatagattctgtggagcagtggtcctcaacgtttttggcaccagggactggtttcatggaagacaattttttcacagaccagggtgggatggtttcgggatgattcaagcacattacatttattgtgtgctttatttctattattattacattgtaatatatataatgaaataattccacaattcaccatcgtgtagaatcagtgggagccctgagcttgttttcctgcaactagatggtcccatctaggggtgatgggagaccgtgacagatcatcaggcattagattctcatagggagcttgcaacctagatccctcacatgaacagtttagaatagggttcgagctcctatgagaatctaatgccgccgctgatctgacagggagtggagctctggtggtaatgcgagtgatgaggagtggctgtaactacagatgaaatttcactcacctgccactcacctcctgttatgcagcctggttcctaacaggctatggaccagtacgggcccctggcccagaggttgggtacctctgctgtagagggtggaaactggctagcagtgggtgagcatgtagggctagactagtggattttgttgttgttgttgttttttgttttttttgtttttctgttttgagacggagtcttattttgttgcccaggctgagtgcagtagcactatcttggctcactgcaatctccgcctcccaggttcaagtggttctcctgcctcagcctcccgagtagctgggattacaggtgtgcaccaccacgcccggctaatttttgtattttagtagagacggggtttcaccatgttggtcaggctggtctcgaactcctgacttcgtgatccggctgcctcggcctcccaaatgctgggattacaggcatgagccaccgcgcccagctggatttggggttttgacagggtcaggtgcccttggccgtgtggtctggatgttgtggatggaagggtggccagggtgctgcccagggggtcctgta

SEQ ID NO: 586936 - DNA, 4001 bp, Homo sapiens
cttctcctttcataatgatatccagggcttaggaaagaaatcctctgggggaatatttgcctatccaagcacaaatcgatgtgaatgtatatccatttaacctcactggtatatacaaccaaactggataaatcacatcactctctcccaaagtcatatttaaatgttgattttccaagttaacagtttatgttaatcaaaataaccaaaatatttccaaatccctacctcatatcttgcagtgcagaaacagttcacaggtatataaccaaaaccaagcataaccctctattatttatataatttaaacaataaatatgttttctttcctaaaactctaaattagagaggagtttccatttaccctgttcacttaaccactcctccttcatgtttagagcaatgctctggggtataacttcagagattccagcacagcaatatcatagtctgtttaaatgtggggtaacctgggccagataaagcctggataaaagaatgcaaaaatattcctaggtttcatttcaagaagtgaatttaaacctctccttctttttagaaaagcagtcaaatgaccaaagaaaaaagaaggaagtggaagcagagatggggttaactaaaatgccactgtagttggctccgggccaatgactatgaaacagacctcacaattttccagggaaactgcaattacaaatctcactcctggtgggaagcaatgaccgttactgctttttcagaaaaaaaaaaactttttaagaagtagcgctaaatggaacgagtattggcacctgcttggtgagattattttgggcattaaatgagtcaataacgtgtaatgtgtttaacacttgctcagacacctagcaacacctgtttactgctattatcatttctgttattactataaatgcaaacatcatcgaaggctccctttgtaagcaaaatctttttttttttctttatggggtgcagtgctctccgctagctcctaaaattcctatgggagaaaccagactttttctgaagaaaatgtttcccccattctttcccacctcctacaagcctcagacgcccctggcagccttaggtgtggccgcccagttctcgattggcagccacagccccgggcgcctcctcgcctccctccatccttcctacggcctcaccctccgggaggtccgtgacgatggcttcaggcgagatgcacacgccacggtcatagacaggcagctcgtcgcaggccaggctttcgggccagctgtggttgtacatcttcatgaggggctcgcagtcgtcgcgcgcgcgttggcacaccgacttgcacggcttgatagggtcgtgcaggaactccagggtgcaaatgggcgcgtacatggcacagaggaagaagcgcagcacggcgctgcagttcacgtccaccagctcctcgtactgctcgatggccaggatggcgttctcctgcgtgctgtggtgcaggtggttgggcatccgcgtgatgttccagggcatgtgccggcacatagggatgcgcaccgcctcgcagggcgcgccgcgcacgcccagcgccaggtgcagccacaggcacagcgccactaggatggagaggaacatggcactgccctctcgcgctgcgaccccggcagacagaaagcgcccttctcttcctgccaccctcatctttcgctgtcccttcgccgaggaagaaatcctctggggcgcaggagagtttcttcccccaaactccagtcggcagcaaagcggggccgcggggtccggccgcggagctccgccgtctggcacacagggcacgagcagcgccagctctcagccttcggggcgcgaacccgcccgggcagctccagtcccggactccgcagctcggagcgcagccagccacggccattgcgggaccctatttatcccgacacctcccctgacgtgggctcggaacgctcccttggcagctgcagccgcggcgcgggctccccctcggccgccccacccccaggcccgtcggtgcagaagcggtgacatcaccccctctgggccgcagcccagggctggaagcctgctttccccctaaagtccctcctttttagtctggccagtcttttttcttcggaccaagaaaaagaacctctggcagttgttttcgacaccggatacaagagggtgcgggagagaatttcaagagagagaaagacactctttggctgaaaactgaactttgctccctctgccttagagtttttccaagtatagagttgggggaaaataggagcttctgctgccctctaattctgaaatatatttgctttctccggtagggggcatgaggagcgctgaggacagttgggacaatgtcctgcaaggcaggcgagagtgcagtgaatgtcagaacaggagggtcacgttgtataaatcactcccactccgcccttagttgtgtggagtgtggtttgttgttgttgttgctagtagacagtttgggccgaaatttttccagtataacacttggtttgtttctgctccaggaagttaacagaactgggggaaggtgtgctagcatcttccagcttcagaaatgtcttctaacatttcctcttccttctaactccctgttcccctctgcagcattagtggaacccaggagaaaacattgggcaccacaatctgaaaggtctcccctgctctgatccttcatgccaaaggatttccacctcagcagcctaaaatcttgatttttgatgtgctcagagactgttgcttgagttgagtaagaagctgtgtactatgggatgcaagtatgtatgttttgctttctcttttatcttacttgcattaggaaaaggtagtccaattgctggctcagctatctacagaaaagggaggatttatttatatgagattgatgtatatcaatcttcaggtggtaagacttctggtatatgctatttattagggcatcagcaatatggaaacatgttctctgaatgttaatctttaaaaacatagtttaacttgaatttaaggcacatggtttttctctccaaagcttaaacctacacaattagtttagttttgactgaggattaaaactaaagactaaggattaaaacagctgaggaaacaacaagcacaagtgacatctattgggaatttacaatggtcaaggtatgaagctaagaactttaaatgcattatcttattttttagggaacatgaattaaacatagtaagtgaaaaggataaatgagacaaatacatttcaggattcatccaaagagtctggttcttatttaggggaagcccagggtgttcttacactgccaagccactctagaaaggtaatctagttcctatagaaccagtctccacctccaaagatgccaagccaggctagtaaaatatcacatgaggaggaaagcccagatgacatctcaagccatttctagcagtaaactccaatgagtctaaacccttcactgggtgaaaaagattttcagctggagttcctacctggggagcaagagaaagagctgaactaccctacacttttcctatgaatctgagcagggcaaactcggagagggctcaaatttctgcagccagtttgaacctgctgcatctgtttaactatgtaagtaccaagtcacaaagtcttatgggcttccctgatgttctctgaggcatgccctttaagaaaaggtaagaggaaatgaagagcccttcttcctaaagctttgtgcctgccccattcggcccattggtagtgtctctggtggttcgacagacagggggcagcagagaaggatgcatcaggaaaacctgtcaactgtccctcctcttcgggacttccagggaggctgtgattctagaacaccctacttcagcattcagtccattctttccatgccttacatttatttaacaaggctcgggaagttgcctcattcagtggcttctctctggtgactccttttggtctcctcaagtgc

SEQ ID NO: 586937 - DNA, 4001 bp, Homo sapiens
acgttttttaaaaaaagtcctggttagcattttgaaatgaaaaaatcaaattggttcaaacttgttcaaacttttaaagtcttaagatggatttttgaactttaatttttcctgcttttcatctatactggttttaaatctcaatttttagaaaaataatgtctcagttaactaggtgaagtaactttcgaatttaaacaaacaaacaaaactggtaagaatttgacagcggtcaccagaacagtactctaccaagcataagaaatcctggaattattctatcttgcagaagagggtgaacatcctaaagattaaattaaaaggcacttctaaaaagtataattgtgtttacccaacttcctagggaaatgtctttgttaaaaagctgcatttcattcattcatattccggatagtgggcattttctaataaaaagtaaaatctcagtaaatgggctacagttttgtttattcctagaaaggctctcttttaaagtgcggtgtctgcaacgttgttatgacaataagtcaaattcttattgatattccaagtataaaataatccgtagcaatgttactaaaatgtgctcaattttgctcttcaaatatgaaagcgtttcatctgtgtttcagaaacctaactcagctgtagacaatttggttttcccttttaacttaaacttgttttactaagatcatcaacagattgtcagtttcccaagcacctgacactgaggcgcttagatgggaatccgcgttaaggttttatttagcatccttcctcatcagaattttagcgtcttatcagccactgcaattttccctgacataaaatatatatgttcatagtacaaatgcacgcaaatatttgtggccgaatctcggcaacccgctggaaaggattaaacgtgcggttgccgtgactaaacgcattcattcaccctacaagatttaggaaaatgtaacgttgcaagggaagcaaggtctctgtgtaaacctcgtaatcgccaccaaaagtcggtagctgggagccttcaaagcccgccaaacacactggaagcatccacagctgttttaaattggttttggtttctggaaatagcgcactcggtacggcagcatctctggcctccagccggggttaaccctgacctgaacgccctgtttagctcccagcatttcatgattccgcttccctgctccgtaaaaccgaagaaaaccgagatttccgtcaccgagaaatgcacttagcaagagggggaaattcggtgttttaaatgtcacatttttgtgttctctaccactatcaagaaaaggaaaaaagatgtgtttgtgtagcggggacgcagcttgacacccatttcctttggctcgcatcgcggtcgcagagcccaatcgcggggaaacgggccccccagaaaaacaggcaacgacccccagctctttgctacagggatcgggagaggactaccctggggctgggcggggagggggatgttgggaacaggaattggagatggaatttctgcgcccgcagagcagggaggggcccgcgggggcgcggagaggaaaaaaaggccaggggtcaagcctggggagagagaagctgggccggggaaatggggtacagggtgtactgaaggaggggtacggtggggtccgggacagaaagagaggctggtgcccaaagggcgcgctcaggcgcccggaacccgagcgggggagggggaggcggcggcctgttggccccgggacctccacgtcgcgcgcaggccactaacctgtcagcaagaatgtgccagtggtcgcggggctcatcctgcgtgtcccccgaccctgtcccgtccaagcacaggggtctcccagctcccaccaccggggcaattgcattcttggcctggctaggccgtccgtcctcgattctcccctcccctccctttcttcttccctcccagcttggccagttcagcatcagcatcccgcaccccctcggtaatcccgtactccctctagcggcgggccactgcagcgtggccaccgcccccacccccatcccccatccccgcacccccctccaccccctagcccgcggagcacgctgggatttggcgcccccctcctcggtgcaacctatataaggctcacagtctgcgctcctggtacacgcgcttcaacttcggttggtgtgtgtcgaagaaacctgactgcgccctgaggagaacagcggagaaggtccaccgagcctggcgaaaggtccgctgagcgggctgtcgtccggagccactccgggctgcggagcacccagtggagaccgcgcctggctcaggtgtgggaccccatccttcctgtcttcgcagaggagtcctcgcgtggtgagtatgcggtgaggacgttttttttttaaagatcacgttcattccccgtgcttatcgggagctgcgggagatggagtagcaccccagaatgtctccacgcaaaacttgtcacgccttcactggctgtaccccaaaacaaatggggaaaccaagccttaaaggcttgggtttccaggaccaagtccagatacgggctgtagacagagatgagctgcggacagtgatgagctgcagacggtcaggagctatagatcgatttgcaatttgctcttcaaatgcgctaccaagtgccatgctttacaaacagataagcgcttcaaatgcgctacaaactggcgcttcagatgcgctacaagcacgcttcacgcgggcgacaaactgatgggagctacaactggcgcttcattgcgctataaactgatgggcgctttatgtgccacaaactgacggatgggcgcttcagtggcgctacaatccagaacgaggagcagcgatataggagctgcagacagaaaactgaattgcgctttacatgcgctgcaaaatctgagctgcagaagagtagcactacaaaaaacgctacaaaaacgatgcgattagccagcccgacaacagcgcttcattgcgctgcgaggcacatgaactgcagaggtacatgagctgcggaacaattcacacctaagatgcactacaaagtggtaagagctgcagaggtacaggagctgcagaccgtttgcgctacaaataaagcagccgtagtgggacatgagctgcggagtacaattcctctgttttcttggagcaggaccccaccctttcaccttttggaatggctcccactctatttttctgcaggacggttctcgcatgatggtgctggtagacaaaatggagccccgggcaaaaattagtgtttaacattctgcccacaccattcccgctatagcagtggagtggaggggcactgattggagtggaaatgggaatcttttggtgatggcagagcaggctgcctgcctacttgtgcttgattgaagtggcggtgtagttgtggtggcgcgaatcagcgtccagcaacagtttgtggaaactgtgggtttgctgagtatggcgggggaattggatctgtggattgctcttgctgcatgaaatgaatctggctttggtgactggtgggaggggtttgggaggggggattctggcggcggggggggggggtgtgcagatactctgcagccctgtagcagccagtctcaggcctgccccgcccatcctagtgtgccttctctgcggtgcttagcgcctcctcctacagcgcctcctcagagcgcgcctcccctgcagcgcgccttcccagagcgcgccttctagatgcggcctcctcaggcccctcctcccagctccttagcgcctgcctgcccaggccccacctctctctggccacctcattctgaggtgagctgctcaggccccgcctcttccaggcccgccttttctgtggtgagctgcccaggccctgcctctcccgggcccacctactctgaggtgaactgtccaggccccgcctctcccggggccgccccctctgaggtgaactgcccaggccccacctctcctgggcccgcct

SEQ ID NO: 586938 - DNA, 4001 bp, Homo sapiens
gggcgccggctgagcgctgcccggaccgcggccgggctccccgggcccggtggctcatggcccgcggcggactgggctccctccctcgttcaccgcctcgaaggctcctgcgctcctcgcggtcccggcgcgtcccccgcgcggctctctggcagccgagctccgcgcgctccaagcccagccccagcgcggcgcgcccctccgcccgcgaggcgcgcgcctcccggccccgccccgcccccgcccccgccgcgagccccggccccgccccccctcgcgcgtcctggccccgccccctcccgcccccacttgcgccgctcaggccccgcccccggccatccgcggagcccgagcggcgccggtggccggtgcttgctggctccccgcagctgcggtgccgagactgcccggtcctggggcccggagagaggggttaggagccggctccgagtcgccccatctgggcgggggtccccatgtcgccgagccggccccaggccaggcgcgggactcccactcctcctcgtggaggccacccctcgagcccgcggtggtggtggccccgggagcgcggagcgtggggccgggggaatgtcctgcgtggcgggtgtatgggacgcggacgccctcgaagcgcccctcgctgacgggtgcttcgcgggagccgccgctgtggccagactctccgcagcagggacaatgggagcctggaggaggcctggatgtcgcaacggaggaagtcgacgcctggttctcataaatctcgagggcgccaccacgccccctccctgcagccctccggtgcgggaaatcgcccccgggccacagggcgggacggcccccctgagcgcagtgcccccaccacccagccttcgctgtgatgggggcctgatgccacccggagaggtgtcagagatcatagaggggcgatgaggggccacaaccctggcaccttcctcacccctgcctggctccagaactcgcctgctttagggcagagaccagtggggctgaggaaacagtcccgctgggctttgcggggcatttgtagcctgacccctggtgctgagggcacagcgcgggggctctgggaggcttcctgaaagaggtgcagggggctcagcaggcctggaaggggtctgagaggggagggagggcttcggtgggggcagaggtgtggaaagggccgctcagagaagagagtagtcttgctcctggagatagcagggggggacccctgggtgtcttctcccctcatctccctccttgtcccctgcccccacctctggcagttctgtcctggtctccttgccagccggagctgcctccatctgtcgccctcccgggcccaaactgacctctgacttttcccagagccatttcccatctctaatttacagacaagggtttttatcaaacccttcttagggatggaaaggtggggcttccagagttgaaggtggaggggacagagccttcacctgctgcccaaaaccccggtgctgccctccacgggggcacggaagacaggcagaccccttccctgccccacatctcggctctgttccctccgcaggaccaggccagcagacactttaatgaaagcttcggcagtgggccagccctcgatcggagctgcacacaggcctgcacgcctggttgggaaccaggacacctatgaatgaggccgggaagggggaggagggggtgcccgagagtgggagaaagggaagctccatacatggcctggttgtggtctccaccctcctgggagaggggagagcctgacccgcggtggactaacctggttcagagtagtgggctgaactccactgctgggatgatagcggccagagagggtcctgagatgggaagccatgggcaggacaatagcttggatccatccccagggaggaagaagtgaggaggggccggcggcagagcgcctcggacccacaaggaggaactgatggagatgtggaagtggctgtgggggtggagggggcgtggttggccaagagcagctgtcgcctcgctggggataggaatgaaggtcagggaggaaaggtccatcctgggtccctgagggcaggaggcttgaggggcttggaagaagtcctcatgggggagatgaggggtgctgggacggggaccccaaagaaaggcccctggatacacatgctttagactgttcagaactaaaatggagacagaggtagcacaggggaccctggcctggtgggctgcagtgggggacctgggtttgcagccagtcttgtgacagctggacaatgagttaatgcacccactccagacccagagaatgcgctcctctatctgaggctgggctggaggtgaggtggcccagaacctgtgtctcggggggttcccatgcgaggctggtgctcagggagattgatgggcacgggctttgcagcccctggcaggcgggggcccatgggaaaggggagcacagaaagggaagcagagattccccaggaactgacgtggaccaagacacgtcatacacccaaccacagcccgacaggtggttttttttttttttttgagatggagtctcactctgtttcccaggctggagtgcactggcacgatctcagctcactgcaacctccgcctcccgggttcaaacgattctcctgcctcaccctcctgagtggctgggattacaggcatgcgccaccatgcccagctaatttttgtatttttggtagagacggggtttcaccacgttggccaggctggtcacgaactcctgacctcaagtgatccacctgcctcggcctcccaaagcgctgggattacaggtgtgacccaccgcgcctggccccgggtggtttttgaataaaggaatgggtttccctttttgatggtgctacttgtcctctcaaaagcactcggacactggatctgggtttcagcagagctctgaatgtactcatggaattcctggagatgagaagagggggaggaatgttctgtgtgcccagctgtgaggccagccccagctcccaggggtggcaccgcaggcatccccaccagcctccagtccctccagcgtcccagagcacagggcaccagggtggctgcaaccgtggtttatttcaaatgtgcaaagctaaatatgcaactacaaatctaactcaggaaggcctgccagtggccctgagaggtggccgtgctagggtggtccacagccagttctgattggctaggagacgttcagacccctcataccaatccatgagtctgaagagactggggctcgggggctcattagagactcttccttatctagaaaccagaatatcttgctaaagaagaaagcagaaatcacatgggtctgggggcagggagggggtaatagaaactgttccgctggctggggctctctctcttggggtgcagtgggggagggggcagactctgtcaagcctcatatactctgcagggtggggctggtggcaaaggcaggctgggggtgctggactcaaagcctgctgtcctggaaggaagcgtcttccacctcttacggggcatggggggatcctaggagagcccaagaggatcgcagtgcagacaggcccaagctggattaaccgcagctggaatcggtggtcacccaattagcctcgcagctgagggacctctgccaccagggctagaggtcaggctgcgggcagagccctaacctgaggtgggggctgagagggtctctgcggcttagcctggccgggcattgggggctcgctctctggacctagcgggcctgatgtgaccgagacattctttcaaggggacccgaggtgacctggggcctctggcagctgctggacagcggataagggcagtttccatgggggattcttcaggggagtctaagtgattagatgcactgagcagtcggggtggaggcgcagccgtcactgtcacgggggaggccccggggtatcactgccacaagtcaccagccgcagccc

SEQ ID NO: 586939 - DNA, 4001 bp, Homo sapiens
tactatgtatcaggcactttgctaaatgttacagataaagtttggatcagggagttagacctttcagatcctggcttggacataatggcaagttttgtttgtttgtttttctttttgtctctaagcctccatattctcaaggtgatagtgataattagattatgtaatgcaaataaagtgcctaacattccaccctgtatatgataatgaagaatgctatttgaagtattaagtttgagtaagaagtagatcctaccttcaataggccagctttctacgacacagctctatgttggcggattatgaagcaacttgaaagcgagctaaagaaaacatgactgaatagataaatccattaccaaaacaaaaaactaagaatgcctacaacacataattaattccagaactgaaaagaaatgtgctttgggttagtttaccagtttctgtagcatgtacactaatgttctcttccactaaacaaagtaacagtacattataaatagaacaaatgttccagctatgtggttttatgcacaataggatcatcatagggtatacaacttgggacaattttagtgaagtagtaattgcttgatgcaacaggatgtgtaccccattaaccacaattctctttctaccaccttcagaaagtaatctccttttcttataaggtaaatatttacaaatcctactcatcaaccatcagccaataaagcagcctattttgaaaacctaactggcaacagcaatctcacaaacagaagcagtacagctgaagttaagagctttggtgtcaatcaggccaggtttcccagttccagttctattatttctaactagttatgagacatcagaaggtttcttaaccattccgagcttcagtttatctgaagaatggcaatactgaggcctacttcttatatttatgaaagtggaatatgctattacaagtaaagcacttagacaagttcctgaaaacaacagccactcaataaatgttagcaatttgctattatctacaatgaaaaaaccaggtctttagttttgaagctaaaaaaaaaaatgtgtaaggtttaggttcttttaaaaaaatattttatttttgtagggacagggtctcgctatgttgcccaggctggtcttgaactcctgaccttatgtgatcctcctgcctcttcctcccaaactgctgcgattacaggcgtgagccaccacacccggcaagttttagggtcttataaagcattaagttaggtcacagttaagtgatcaaaatggtgaggaacaggaatgaggcaataatgtgtattaagcaccccgtatcttaccctcctatcctacttaatgaggcttcatttgtaacatcctaaaagttaagcagcattggcgtaactactgacaattcaattctggaaaggtttaaagacaaagaaagactgctaaaacaaaaagaaaaggaggttatgtagacttgaactaagtttaagtggtgagtaacccaggtgaacagtaaatggaccaaccatcacagacgcggggctatgggtccagactcacggtggctcctcccagtgaggaagccgaagccattgggcctcaccagtgagtcccagcgcaacaccccaaacccgaatctggggcgccactgaggggtgagcgttagcgcctcgagtgccggccctgggagtccaaacttcccgccggtgcccccagctgggcccgagcacccaagctacctccacacggaggcctgagtcaccgttcgcgcgacacagaaaccggggcccagcggttaccttcggcagggaactcttcaaactcgtcgtcttcctctaacagacctaagtctaccggctgctttttctctgacatctcgactgtccgcgcccaacacctcccagataagcagaaaagttggaaccctcactcttcctcaaggaaacgccaccgtcactaccgcctccgacgctgacgctaccatagagacttggggaaagaatacgggagcagcgcgaggaatgctgggatactggaggtcggcccagcgcttcctgcggggttagcgctttttccgagttgtagaggtgatttttttttttttttttttttggtctctaccttgttattcggactctctgtattgccaaagttgagatccgtgtagttttcctgactataagagactcataatgtgtaaaacaaacaaacaaaaaaacccttagtttgcaaccgaggaaggaactctagagagactacagtgtgactgcaaacattcatcagcccttcacatacgttattacctccagtccttaagccagttccctaaaggtggtattaaatgtctccacatcacagaaaattcaggttcggtaggaagcagccgaagtcactcaggtagttctagacaaccgaaatgcagatttttttgcctggctccaatctccagacttttccattaggcagtgtttataaggtcttagaattactttgtggtaaaatagctttttaaatagaatttgtgtggtgtgtatgtgtgtgtagtaactctggtttacaggttattatacagtaatgctatttatggatttgtgtaacattttatggtgttcaaaatatatcatttagaattgtttgaatagcatttgaatatcattttgaatacagtagtgaacttcatggaactctatatataatatatggatgtatatggatgaatattatggaatatacgtacacaaattgagtattattgtaaatgttgatacatgttccagattatatctataaatgccattcctttattcaacaatgtaaggtcataccgcttaccaggagctgtgcatcaaacatgtatagacaaggtccctttcttcaaggagcttatatgctgctcagagacatgtaaacagataaatcacaatgaaacacagtaatccacttgaatctgcatcttaatattagtgagaaatgaacagagtgtttgggaatacagaaaattgaataactaaatgtagaacaaacttggccaagaactacaattagatgaaatttttaaaaaatgtatctcttatactatttgatttatatagattactgaaaataatggtatctcactaccaaaaaaattatgtcaggtaatgcatatcttatttagtgtgatttagtcattatacaatgtatttgtattttaaaacatgtgctcccaaatataggcaatttttatttgtcaattaaaataattttttaaagaaggtaaaaaaaaaaagattttgccaaggaatcagaaaacccaaattttagttcctggacctattatttatttcatttgatatatgatgaagtttgtatcaatccttagcaaaagaaaaaaatcaacagcaatatggtgattttttccccctaaaactatattcaatttaaagagagattgttgatttaaaaatcaacaatcttacgtcaagttccaccacccctgccctttcttccattgtactggtttgtgaaatccagaatgctgaaacttaaataacttcttatttcagatgagatggggcatgttcagggtggtacggccataaatgtcatggcacatggcacaatgagcaactttgcatttcaagggtcgtggcacggggaataattttggaaaatgatattaagaatacatatttgcagaccagtttgtattataaatctaggctcagttccttctaaaggggagtttagacaaattacttaatttctctgtaatacattttggttattcgcagtcacagttaagattaaaggagattatgtatataatgtgcatagttcaatgcctggcacataataagtgatcaatacatgttagctattattaactaaggaacttatatttttaaatatttcatattctccttgtcaacgcttaaagtctctaagtgtgtgttttgtttccttgatgatatctttttaatactttttgaggaagtcagtccctctaataatgtatatttagt

SEQ ID NO: 586940 - DNA, 4001 bp, Homo sapiens
gggcagaagctgacccactctggctctgggacctcgggtatccacgcccccgccgctctctccgcagtgcctccctcctctcgggttccgagggaccctggcaaggcccctcctccgcggggagtgagggtgacgagaggatgggcgcctcgggctagccggagaactccctccagccagctgcacgcaacgggcaccccatggcccgtgcagagttaattgtggatcgcgctgctgtctggcactggcgcgcgcgtccacactcgcggtccagatttaaggtggtcgggagcagatgagggagagcaaggaaatcaggaccatttcccattcctctcccttccgacagctggagcaggctaccttgcctgcccctcgcctttctcggcctcaagcaagcctgggaatcgggtcgggaagcagggcggcacggaggtagctcctctctctctgccgtcagtaccctccccctgcacttgcgccccaccagcgccactccatcagccgctgtacgcacctagccctaaaggtaggacttgaatattttaatagggcaataaaaaggatgttgacctatatttgcaaggaaacccatttctggcttcagttatacgtgcatggagtttcagaaagtctagaattggctgggagattggcagctcagaaatctcaaaggaggtggggagagagagaggaattcatattttgcttagcttcccctccccccacactaatatttattcgctcttaattcttatgcaagcaggttgaaaactaaagtgatgcaatgccaataagttctaagtccctcccctaaggtacctcgggcttggaagaacgaaagagcatccttaaagaaatatcaatacattcacactctgatgggcacaattgcggacacgcaatcgcaaagccagctctgcgatacagccagccacccagggacgggcggagtctcccctggagcccctgccttttgtcagaaccgcctcctggcttttccagttgagaattctttggtggggaggtgcagggtgggggtagtggtgggaaagaaaaccacagaggcaacgggaaacgtgggggctctgagctccaatgcccaaggctacgttcgttcgttcgtacagtaccaggagaccacttcatgtttgtgggagggggattcccagcctctccttccatttccactcctgacttggaaagggccgacgcccccaaagtgaaggtctccccaagttacaagccagggcagaggtaggatggggaaggccattgtagcaagactcatcaaatcagggccataatgaaccacgtctgttaccgtcctcacccccaccacaccctaaacttctccagctggacccttgacctccattctcctccaggaagaggaagagatggggggcgggcaggtgggtggggaaggagcgggtgaaatcaccttcctatctgcccgaagagcaaacagagttaagtctggaagtgttcggcttctcgtaaccccctggaaagccacacattccacgccccggcgctgggttcctacctgagtcatcagcctgtccgctccggtgttttcttcatccttaaatatgatgtcggggttgtaattgggggtgagttccttaaatcgctcggagtttctggagatcttcccttcataccttccgctggcgcctagggtcttctcggccacattggggataaactgcttgtaggctaaaggggtcagctttttggggtgcctcctcttcccgaaccccctgcccggtccgcacgccagtcccgagcataccagcagcgaggagacgaggactagcagcagacatctcgccagcagcagcatctcgcccatggaactgatgacttccgagctgtccccgtgcgggtccgtgcgcgagtgcgcgcggcgggtgtgtgcgtgtgcgctctctcttgcgctttcccttcctcgctccggctcgcccgctcgctctctccctcgctggctgcctcgctctttctcttcctatataaccttgcccgccgcggctgcgggggactctccaccgctccccacccagacaggggctggaatggcaggctgccggccgctgataacggaacacatcggagttgggtcgcgagacagcaatcaaaagacaaaaagagtctgattttaaatggtagcaagcctggagagcttgtgagagaggctgcctttagcactatattatagctgccaggggcgcatctgattggccaaagccgcacaagcttgtcttctgatgttaaccctgaagaagactacgttttttttttctgttgctgctgttgctttattttcacctgaaggattcgagttaaaaaaaaaaaaatctttcctaagataaaggtgggcgggagggaggagcgcatgtcttgtggtaacagcagttactcccggctttgtgtacatccttgcgtttccccctgactttccctggaatggtaggtgcttcagttaaaaccaacttaagtttttaaaggacagtttaaacccccgcaagcttcagtcatcaagcacagagtcgctcacacatttgaggggcacagctgcccagctgttatttaatttttcttccccagggactttatagtgcaggctggctctccctgcattttgaagaaagaggactgagcccctcctgaagactcagcctctgtggaccgaggataattatgagtgaccataacttaaagcactggtatttgaaatgctttaagtgccttagaaaaatgtaaaaatactgctcttttattgtgcttcaattaatacatttttttttttgtagagctctgcaaatgggatggaggcgtgctcaagggcagttacagagtgaactgcgggcgtcagggtggatgggcaaagcaggtctgggggctgcaccccagcacaggggagagagtgggggccagtgtgtgcgctgggtgtgtggaggccattgcagggtgttggggggggggcaggcgagtgggcgaagctgtgctcacacaacccccacgatcgatcagagcaaagtgcagagccaggggtgagctgaatgtggaattcaggctccttgcaaagctggccttgtgtgggggctcagcaggccagcagtcttcaggcacaggagccaccagtcctaggggctgcagcccaaggggtcaggggccctgggggaacagtgttctggttaacgaggggcttcctagaaagagggcacagtgcccaggaggtggcaatctttgagtctataatcacctcactttttgcagaaaaaggaaaaaaactcaaaagtcctaagtaaaccaggaaaataaaatttgaagctccctctcaaccctgcttttctttttttttttaaaaaaaaaaaaacagatcatgcccttccccttctcaatcgccatcccactcatgtgcaatgattcctctagcataggattagagagtgagggttatttacgtggaggggaaatcctgaccctgaggagtcatcagatgctgcaaatgtggccctgtgaagttaaacactctcccttgaccccgggcccttggagtggagggggagaggacccctgtgaagctcagccctcaaacgatggaagtttccagaagttccctttgcagatcaactttttgtgtgtgtggtgggggagagaaggagaggagcatcttaggacacatctgtcttgggcatgagaggctgagcgttaacaagactcggtggcctgggtgcctttggggaggttgacccgggctccccttcccgcctctctttcttgttcctttccatggtttgtgacgaatcgtgatccctggaggagagcaccgtgggggagcagcgtccacttgaccaggccccggcagcctccactgagcggagctggagctcagctgagcccagggattctccaggcggtgtgtctgcgctgcctgtcccgttcccagtaaaaacagacacaaaacaggacccgtgttctctccagaggaggcc

SEQ ID NO: 586941 - DNA, 4001 bp, Homo sapiens
cctacatatcatattatctgtgatttatgattatggatccaaataacaaactgtactatgggaggtaccaagctttaaaacatgcacccagaggtctatatgttatttcttaaattcaaaaatacagacatagaatatcctgaaaatggtttcatctatttttggaataatgataaacatttttctgcgctggttattacaataatattctgaacaaacaattccagcattgtaaaaacaaaaaatgttaagtgtagtaaaacaaaatcagtagtcatgtgatgcaataaagctgcctgaagtcagtctttagacttctttaactatttcccttagtggtacccgttaatgacaacaagcatttcttagagtgaaagactatcccaccacaaatgcattcaacatactgtaccataatcatacaaacataagtctacattcatacacttaatattacactaccatattaataatgccaagcaccaaaattgaatgacagaatattaggagatttggactcacattgctataggagtaacatataaaatgtgtcatcaaatgtcacattttagatgacattgctttttaagagctagaataagcaatctgtaatctagttattcataagcaatactgagagataaatattttatagacatctaaaactaaaaatcaaaattcagtttccagaattctgacgtacacaagacaaaataaatgatggttgaaattccagaacattgagataggtaagatttgtgctaccttaaaaacatatattttctaccttgtacagaaatataaattattggttcttagtgaacatacacacctccgtatccagtaaattaatgaactagtagtggattcataatgctactgaagaaccacgtttttagctcctaaaataagttcctataaatggtaatgtaaaactgaaaaagggaagataagggtacaaagatgaagtactttcatcgtgtcacacaggaagtagaactttaacatatccttccttttttgctttaatatattactgaggctggggacaagtggccatttgagaaccagaccttcttcaaaagtcttaaacgtgagtgagctgaatgtttaagaaaaacgggagttttagaaatgacaaactctttcaccccataacccctaacacctgtggctctgacagctctttgcatctctacatcctctacctccattggccagaccacccaagaactacttatttgacttctgctcccttctgcttgctcacgcagcattcattatcattatcattctctctccctcttccactcttcctcccccgcccttctgtcacacacacacacacacacacacacacaccgtcttcacaatgcacatagaaacgtcctgatcccatttgtgtagatcaccaaaaagggcttcgccaccatccccgcaccaaatttcaacacacacgtccactccctttctgagacaaaacaacccctctcctctcctccctgtgccgaccccactggctagaagacgtgggaagcgcggggagggaggataagggctctgaatgcttctgtccccaccggctcaccgttccctcgcccccgccccgacagcattatcgccgccttcccgctctttacctgccaacaggttcctaatttcctcagggagggggtagggagaggaggtgctgctggggttgggcatgttagggagcgcagggcgtgcggggaaaggacctgcgctgaaaaggtgaccgacggggtggggctgcggctgcgacctagactcaggctagcggcccggattaagaacagcggggctacgagtcgggacactgccgggccggggctcacaacaaggaagtcactgaatctccagcgagctgcagctggactgtcggcccagccccgcccagagggccggggcggggagatgggtgggaagggacacgaagggcctgaggggtccaactgcgcatgtgtattcctcggttttcccggccccagaagaaagagcctgtgggcaagccacgcccaccgctacgccgggaagcaggaggaggagccactggtgggaagggggcggactgaggctgcgtcacctgatgctgcgtcacctgatccagcgtccggagcgccttacagccattttcggtactggtgccatcacaactgctgatcgtttctgcaggattccagaaaataatgtatccatgatacagagtgtatacaagttttgcgattacgccttctgcgtaacagtcagtcccaccgcagtttaacccacaaggaattttctcttgtcctaaactattatggccttctttgtccgattgaacggaggtaacgaagtctcgtcttccgccagtcgtccgggcgaagccagtctggagccgctccggagcgcgcgttgtgattggctcttacattacttttctacctaattcgtatccttggggtgacagattttccccactacaaggaagactgggaagttctaagcaccgtcctttggcaggaaaaaacaaacaaaacaaaacaaaaaaacagaaggccgaatagacattggcaccactgtccatctacaagcatcaaaaataaaattgctggtggtggttagtagaataaaattataaaatctgctcactccaacttgaccatttagtcaacaaatacttactgtcttctatctgtaaagcttcttaaaagttttctcttttaaaaaaaatggcttctttaaaacctttaacaggcatacatctttgtgcttcccagatattgcattttttaacaaattgaaggtttgtggcaaccctgcatcaagcaaatctgtgggcgccatttttccaaaagcatgtgctcagttcatgtctctgtcacattttggtgattctaacaatatttcaaactttttcattattattgtatatgttatggtgatctttgaagttactattataattactttgggacatcacaaacagcacccatataagacagcgactgtaatccataaatgtgtgtgttctgactgctctaccaaccctataccttcctccatatctctccctctcttgggcctccccattccttgagacacaacaatattgacattaagccaattaataaccctacgatggcctctgagtgttccagtaaaagaatcattttactttaaatcaaaagcttactttaaatcaaaagctagaaatgattaagcttagtgaggaaggcatattgaaagccgagacagaccaaaagctagggctcttgcaccaaacagccaggtagtgaatgcaagggaaaagtccttgaaggaaagtaaaaatgctactccagtgaacacacgaatgataagaaagcgaaggaggcttattgctggtaaagaaacgttttcatgttctggatagaagatcaaaccagacataacattcccttaagccaacgcctaatcgagtgcaaggccctaactctcttcaagtctacgaaggctgagaggtaaagaagctgcagaagaaaagttggaagttagcagaggttggttcatgatgtttaaggaaataagccatcttcagagcataaaattgtaaggtgaagcagcaaatgctggtgaagcagctgcagcaagttatcaaaaagatctagctaaggccaggtgcagtggctcatgcctgtaatcctagcactttgggaggatgaggcgggcggatcatgaggtcaggagatcgggaccatcctggctaacacagtgaaaccccgtctctactaaaaaaaagatacaaaaaaaaaagaaaattagccgggtgtggtggcaggcgcctgtagtcccagctactcgggaggctgaggcaggagaatggcgtgaacccaggaggcagagtttgcagtgagccaagattgcgccactatactccagcctgggcgacagagcgagactccatctcaaaaaaaaaaaaaaaaaaaaaaaaatctagctaagatatctgatgaaggtggcta

SEQ ID NO: 586942 - DNA, 4001 bp, Homo sapiens
gcgatggcacagacagagaggacggtgagtgccaggatgaagtaggcaaccagcagcatggccagggcctgcagtagcccagcatgacccaccacgaaccctgaggcaggagcagcaaatcaggtcacaggggactcacaccccatatcccccaccccctggttctgcagagctccagggtggagctaaatgcaagcccacagagagcccctccccaaacccttcagccaaccgcttctcttgggtccccttcctaatcttatcccagtcccatctccacccctccccatcatgtcctcccatactatagtcagtccacacccgccccaggacccactcaccaatcctcagaaaaacaactatgctgaacatggacaggacagtgggcaccaccacacccaggaaggtggacagcttccgggcagacgcccctccaggacccccggccccattggcagggagggcaaccccctcctcccccaggagccggtaggccagcagaggtgagctctcgctggccatggctgagcacaggtagaggaagccacaaatgggttaggtgacctgcaaaggagattatgttgcatcaaaagctcccccacagagctcgcccacccccaaagaccactaatcaaacaccctgaagcctccccaaaagacagagctgctctctactaaaaatacaaaaattggccaggctcggtggttcatgcctgtaatcccagcactttgggaggacgaggcaggtggatcacctgaggtcaggagttcgagaccaccctggtcaacatggtgaaaccccgtctctactaaaaatacaaaaagtagctgggcatggtggctcatgcctgtagtcccagctacttgggaggctgaggcaggagaatcccttgaacccaggaggcagaggttgcagtgagccgacatcacaccactgcactccagcctgggtgacagagtgagactccgtctcacaagaaaaaaaaaaaaattagccaagcgtgaaggtgcatgcctgtaatcacagctacttgggaggctgagacacgagaatcgcttgagtcctggaggcgtagggctgcagcgagccgagatcatgccactgcactccagcctgggtgacagagcgagaccctgtgtcaataaaaaaaaaaaaagagacaaccgcaaggaaacaggaacgcacccacaccctgcttaccggcaactcaaaaaagtccgtgggctgcaaatggtaccagccactgccccacaaaaaagtggtaccccaaacctgtcagcaggggtttcaaggcccctcccggctcctgggggccaccccttcccttatgttcctgagactagggatggcaccggttctggaaaggggcaaaggttctctgacggcacaggcttctccagcctctccttccttaactagcaatgcaagaggaaccaaatctcccaaaagggaagtaagttacgggcaggagagccttccccatcctctccttcggtgtcctgagctgcccctaccaagccccccaatgcaatcaccgcacccacaggtaacaagaaacttccaactctttcaaaaccccaccctccgtcaatcctctccctcaacccatctcaaaccccctcctcctcgccttagcctccccgattcctcccatccacacgaggcacccctccccacaaactctaccaacccaaacacaccctagcgaaacagaaacacagaccggctcccaccgagcgacacaaggtccccgggtcctcctcctcccccaatccgggctcctgcccctttgcgcccgttggggtgcaagggagccaagatatccttctccccggccaggtgcaccccacagctcgggggccgcgaggcgctcactcacccacccgcaggacgcagcgctcgggggcgatccccgcgagccggggggctccgctcgggcggagagtgcacgggggccggaaaagacagctgcggctaccgggatgccaggcctggagcctgtccccacccccaccagcacgcgcgcgctattggtccccgtcctcggccccgccccatggcgcgcccggagaagcccgaccctctctgctcttccccagcctgcgctgctccagctccacgtgcgcccggggatgcaatgcagccctgcagacaagcgtctccggcaggacgtgggccgcgggtctcggagcctccttcacttaggtacaaacaatcgtcgccgcaggggccggaccccagtccgagctccgaggtgcggtgagcagccaccccactaaagggggcgtgtgaggatggcggaaagcggcagggaggtgggcggggctgcaacacctgggccaggtgcgtcacgggaaatccggcccacttcgttcagggacttctggagttctagtcctccaacctctcaaaaccctagaacctccaccgggtcccagcctcgcccctcacccgctgcggggatcctcccttcgcgcccgatccagctgcgctcttcgcttccgccaccggagggagccattggccgccgatctgggcccagggtcgctttgcaccgtctgatgcccgctttcttgcctccctgcagtgttctcacttccagcagaaatcctagagcctatgaactctactgagagctgagactccttcttcactctttacagatcccatgaacagcagtaccacctgccaacgcgtcctcatatgtaaaatgggcataaactcgaacctccctcctaaggctgtgagttcagtgagcatttaatgggcactttagaacaacgcctaaaggtttgataaattatcccttgcaaatagcactgcattaaattagccactctgtgaggtaggtaccgctatttcaatttttcagattaggaaattggagcttggaaagtttcagatacatttccttttttttttttttttttttttgatccaggaactattacacaggctggagtgcagtggcgcgatctcgtgtcactacaacctctgcatttccggctcaagcatcctcctgcctcagcctccgcagtgcctggaactacacaggcacacaccacgcctggctaatttttaaatattttgtagagaccgggtttcgccatgttgcccaggcctctctggaactcctgaactcaagcatgcgcctgcagtcccagctacttaggaggctgaggcaggaggatcgcttgaacctgggaggcagaggttgcagtgagctgagatcgcaccactgcactccagccagggcaacagaacgagactctgtctcaaaaaaaaaaaaaaaactttttcagggtcagttagttataagcactcccttggcataccctggcctgtccgtcactgaactctgcttccataaatctcaacctccaccttaccttgttagtctgtggttttgccttggaccttgtcttcatcaatgactgcagcccctcctcttcagttcacctcttctactgcgcttattaaagaaaaaaatctgactcttgttaaaacagtaagtcagactttattcaggactattttgattggcaccaagaaggtggcaaggagctgggtgcagtgggtcacgcctgtaatctcaggactttggaaggctgaggcaggaggatcacttgagcccaagagctccagaccagcctgggcaataaagtgggacctcatctctacaaaattttttttaaaaattgggccaggcacggtggctcacgcctgtaatcccagcactttgggaggccgaggtgggtggatcacgaggtcaggagattgtgaccatcctggccaacatggtgataccccatctctactaaaaatacaaaaattagttgggcgtggtggcacgcacctgtaatcccagctacttgggaggctgaggcaggagaatagcttgaacacgggaggcggaggttgtggtgagctgagatctcgccattacactccagcctgggcaacaagagcaaaactccatctcaaaaaaaaaaaaaagaag

SEQ ID NO: 586943 - DNA, 4001 bp, Homo sapiens
tggtaatgacctaaatttgtcttgactagtttaatttcctactttctctgccataagtaagaatgtatgctgagactaactcaaaaatattaaaatatagcagggctccaggtatgaagcaggatatggtcatgataggattcagccaaatctagaggactcatgggaccaggagagttgcaaagtgaagatcataatgtgtcttagatgaagttcttggcaaggagatggggtgagaattcagaatagagcactatttctgtgctggaatttgtcatctgatggggctgccagagattcatataggagacctcacaaggagccggggtgggagtggcagggtgggagggaaagggttagtcacacagaatttgaaaaacaaaaccaacaaagccaaaaacagctgacaaggtcttttagttattattattatttacaaattctgtacgaatttgagggcttagaaatttggaccaaaaggggtggggagtttttcccttccctccatgtagctctgtgagacctcagcacaaggagagataagccaagaatgctgcagctagaagattgcacctggtgggagacaacccacagatgccacagcaggggccagtcccttctccagctttgcaggtaggataggccttgacagtgtccaaaaggactttattagctcacatgaattcccttcagaggtcccaggatcactggcaaaggcttctggcagaggctggagggaccaccatattatagttaatatgattctattataacccagactggtgtaacctcgattagtacttgttagaggagagcatcagcagggttcttgcccattaagaggagggactgtgcataatggagtgctgggaattgccccacctgtggagtcaacacacccaaggagactggcactgcacacttactgtgtgccaggcactgctccaaataagtgtttgaagagtgtttcttcatttcattctcacaacaagcctgctactatacacatctttcatatgagaaaacagaagcacagagacattaagtagcatgcccaggtgacacagtttgtaagtggtaaatctgggacctgaagcagagaatctggctccaaagcctgtcctcttactaccaagtgacgtttgtgcctggcacagagaaggtgctcattaaatgtttgctgattcaaatcattttaccaagaaattaaacatgcttgagcttattgttctggacttaatgccctgactactcttaaaaagcaaacaaaaatgcttacaagtacaccacaatgaaacaaaacctggaattatcagaacatggtaaatgctttattagattttctgattgaccaagggaaattactctaagctttcaatgtcttcttttcctacaagggaactaaatttccaggaagttctgtgacaaagccacagagctgagaagtaaattagtctgtgctggacctaggatttcccttgttcttccacctctgtccccagcaattgctttgctgcctattctcaggggaaggcattgcactagccatgcatgctccctggagaatgacaacttgaactgcaaaatctcaaaggttgtgcttcttttgttcttcctctcatctagttgataggcagagaacaattctgattgaatattctatttaattatgtttaatcatactaagaatcaaccaatgttaattattaaaaagggagaaaatggccaaaacatcatgtacaaccatcctgactttaggtatgaagggtcaacattcattcagctctgagccaggcagttaaacagcaaacagttttaataaaggacaattaaataagtcaggaaatccaccagtctgttctccaggttcactcaccttggtgtggaggacgatgggcagaggtagtaaaaccaacacagtgaaaaccacgaagagaaatcggcgataaaccagaatgtaactgaagaatttcattgtcctgagcaggtggcttcaatagtgtcctccaaataaagcagatgttaaataaccaacttggattaatatttttccagcctgtcaccttcactcactgccctagaccgaccaacacaagttaaaattaaatctcattttttattgttttactatcacaattaacatgaagagataggcccaagacttttcatgagaaatcaaagaccatttgctcctctgggttttcaaggaaaaactgttctttccctgctttctttgatcacattcactgaaatacagactggacaagcctaggagaaggcaaaaccatgaagctggttgtttgttcacaatgaggcacttccaacccttttgatgtcctctgacttccagactccctaactggagtagttaccacattgtcatggtgccatgagtgagtctccacaggcagcctccatggccctttctaaggaagtatgttttcagtgtgtaaattgaaatagcaactaatagttggaatttcagtgtatgacagtgaaagggaaacttttttgtttagagatggatttttaacggacttcttggacaatgtattgcaagggtcttctacaaaatttatagcaaatgtccctgttggttagaagcaaagttttgtgtatttcttggaccctattgtctcttttgatagaaaaccaaaataaccatgaagtgttatataaaccctctattttaagacctttgaaggcttgatttgatactgttgtgctgatacagactacataattatcagggaatctgcataaagatgagtgattagggacattcaagtggtgtgtgatgtgtgtgtgtgtatggtttgtgcacatgagcacatgggaagttggagactgttccaacagtgatatggaggatgtattttgaaaatcttcagggataaggaccctggtttttttcacgttgtgttgtaaattgatgatccagtaaacctcaagttagcaactactacttgtctttagatataaatgaaacacattcccagccctactagaatttatagtcaatatctcttgacatagataaccttactcttatgtaatctatagttagcatttaggtcttatttctaacttcatactaatataactctgcattctctttccatcaagagaaacaattctctcaccagtactcaccatattaatgtaaatgagaaagcatttttttcctgtaaaaaatttaaattcctaaacatctattatggacagttattcaggaaaatcagaatagtaaacagaaaaaaagtttccaaaccagaaagtcttattatatcttaaatttcttagatgaaaggataattacaaatgatattgtaataaaatggtaagtgataataaataggtaacaatagtatatagtgttaaaattaatttatgaactgatttactcaaaccagttgtagtacttatttttttccattaacaccctgtacagttctctagttcattgcatgcttttttttaaactactactttttgaagaaaccatttttgctctcagatttccttcagctacctggtgagatgatttgagcctcactttttcatcttagaggattttactttgtgagatgacaccaaaaaacgaaaaggcatttgtgtgacatttaaaggaaatgagagcctatgtgtaggcaactggaaccagacagaggctaagggaaaagcacttgacatttgttagtccctcctttctgtgccctattttctctctttaggtcctcatttctcaccagaggaaggctccaggaccctattcttatggcctgggctctagctagctgaatctgctgtgggtgttcattattacaaaacagcctcaccttctccttaccttcagccaacctcttattcctcggtggttttctcttcactgtcatagagagaaaaaaatctaataaaataatttgcactaaacatgaatgactgatgtgagctgaatgtctctgcaagagtcactggggaatgaaactctaagggagact

SEQ ID NO: 586944 - DNA, 4001 bp, Homo sapiens
caagaaaagccacaaaaagaaaaaaaatcaggcccatttggacaaagcagaaaattgactagggtacagtccaggaagaatgtcagcagcaatcactgtctgctaatcccagcccagttttaatcagcgtctccctggcactctggagtatttattctatgaaagatttaagccagtttgtttttaagaagaaccatcctaatcccctctgtttaactgtttaacttaatcttggttaccaagttacttaaggagcagagtggaagaattgctccccctcctacaaacgtgattaacctgttttagcttatttttcctaaagtctccagggcagtgccagctgggggaaggggacaagccacagacaggaggaagagaacagcggagggaagggaagggaagcaggtgaccaccaggagggtgtgacaggcaagctggatgctgagccagagctgaggttcctctgttctcacaaaccaggtgaagaatgaggtcacgggctagagtttgggggctcttatctcttttttatcgtgtcactttttgtctgtccttcaagaggacagagaagaaaacacagaagacacaaataattcaaggccacgtgcatgggagcagggcagcctgctaagttctgctttcattccttccctaaacattcattccctgaagttgataggcgccttcgggattagagcttcaactgtggtcatcgaagcccaccaggacacgaccacagaccacggattggctccacggttctcttcctcccccaaccttctcctcagtgccactattgggagctctttctgtgtctccaggggctctcagataaccagggtcccaggtgaactcccgacaaacacaggtgcaccatgtcgtttgcatgggtgtcgctggcccccgctgctggggcaggctggcctgctgcttggtgcaacacccatcagtcacttctgccaaggcccctactctgtcctgaccccggtgggggccatggggttgggggaatgggactgggataggagatgaacatgacagcttttaggaagaagatatcttggtttcctctggaaaaatccttccatttctttaaacccaccacaagccactttgagggactgcctgagcgccccatgttcccctaccgacctcccctctttgccctcccactgactcccagacccccggtgggcgcaggtcggtactcacgctgctggggtggaggacgggcagaggcagcagcaggagcgggacgcagacgaccagcagcagcttccggactcggagcaggccctgcagcaggcccatcgcgcctctgtcctctccagctcgtccttggaccccgctctgccggcgaaaggcttcctgcctgggcactgctctctatccagaaagacttcttaaacctttcttggcttccgagagtcctccttcgtcttgggggcagaacgggagggcagttataccctcgctgtttctacaagaggctgggctcctggcctcctgctttaggtgggattgatgagcatcgttttgtgaccagcaaaaaggaactgggaaaggatgataaacgggggcatagtgggcctcctctcggcttgattagtaatagagtaacttcattctaggtgtcagcagaaacccccttaatcctttaagccacacctttgctgctgctgctcggccttgaagaaatcatttaaaagcttaaaaacattaaaaacgctcagagcacattgtgctctccatcagttttcctccctcggatgacctattttggggagtacctgtttcatctcccacctgggctcgctgttggtaagactctagtagcccctttccttaaaacaagcacctgagcttgtcagagttgcatgcggacttcaggtggggctgctggtcgctcccaggacgtggtaccttaactctgttcacatgtctttccctcaaattggttccctacttataatttgccttgagcctgggcctgcaaagcagaaaagaaaagtccccaagacattcctttttatcaaaggacaaaacttgctggaggcccacctttaactttcatccaccaatgggaagccgggacagagacagtagctccgcccacttctcaaagccaatcagcaaattgaaaagaatgagtcaatttctctccccgcggccgctcttgattggtcacagcgggggcctgctgattccgcagaacctaggcagcctgctaagcttatttttcagtttctcaaacttcctagggctggagtgatgaccatcatcgtaaacataatctcacgtacccaagcacagctttattgtttcggatcataggacacagagctttcgctgggagggccacctgctgatctagaccttgggaagggaatgtgcctggtggcagggagaaaatgcaacattacttctggagaatttgcctcagagtgtacaaagttaagcctttcagacctccctgctggcaaagatcgtttgcctcagcaccgaggggggaatataaagggtctaggccagcagagggtatgagctcgtgagaaagaccccagatcttttgggaagtatagctgcctccctggcaaagtctagatgccagtctcatgcccagatgtcagtggtctctctggctaaagtaggtgctcaaatgcttctctctggggctctccaaaaaggaaaccgaagaccttctttggctggtacgaaaggaggaggtgggagggcagggaagaagttgacaagttcagggacaaggtcttagctgcagttgaactctggaatttctcctgtttacagattggaagaagttgttagcttcttttctcagaacggacatgtggatttggggcaaggaagaaaagcaaaagcaaaagcccaaacattctgtaagtagtggttcttggcaacattaccttaccttgatctgggagatgctgagcagagtcaaagggttataaaacccatgttgtcttgaattcacagaacacaggaatggcgttcgaagatctgcaactatactacttggaaatgatccccaggctaaagtgaccagggaagtgacccaaaaaacaaattcttcttgacttttaaggcaggtgcaactgtggacagctgaggtcccctttgaaattatcttgccatcgtaggatgggctaggatgactcaactctttaaatgcatgttaaagactggctactgtatttactacattctggcctcatttttttttggttatgattttgaaactcagaatgaacaataccacgtgtgtgatgttttggtcgcaaacattaaagacagcgaataattataagcagctgtggaagtcaacatccactgttaaacccatgaaccattccaaattcctcggtgagatactctgagataacaaagattccagtgagcaactcaatcatgacatctttattataccatagatgaatatttgttaaataaaaataggtacagcaagtgtacaataagaccagtagttctccttcagaactctacccatttttcagaggaaggaaacacttttccagaatacaatgctcaagaaatgtaagccagatcccgcttgtatgaggtatcttaagtagtcagactctcaaaaacagaaagcagaataatggtgccaagagctggggcaggcagggggaaggggaaaagaggagttgttcggtgggtatagaacttcagaattacaagatgagaaagttccgggggtctgtttcacaacatgcatggagttaacactgctgtaccatatgcttaaaaatggttaagatggtacattttacctgatgtgttttttaccacaataaaaaaaataagattgaaatggattaggaaagtaaggggtgttgtaaaaagtcatttaacaagcatttgattttagaccattggacctgcagaaatactttgatttgttagattcaaggtgaggtgacagagcaatgaagtctgcagcagttaaatgtctgttgatg

SEQ ID NO: 586945 - DNA, 4001 bp, Homo sapiens
gtgcccaccagcacgcctagctaacttttttgtatttttagtagagacagggttttgccacgttggccaggctggtctcgaactcctggcctcaactgacccgcccgccccagcctcccaaagtgctgggattacaggcatgagccacagcaccaggtcacttattttacttaatattactcaagtcttatactccatttctatgcacacgtctcaatttatgttcctcaattaccttatctcctaataaagtaaaagtatttacattacctgcagatataaaactaacagtaaagaatgggtacctagtcccacctactctagggaattagttcataccaagccttgtaccttggttgcatgcaaatttaatgcaaaaaaaaggtcaagggctattgggcttgaaagggttaaggcagcttccaaaattgaatcctagtgatgctcagagaaactgctgaaaagttatagatagatatacacacgcacacctgtgtgttcatatgcaaacatacatgagcccacacacccagagtactttcctaaggatgaaactcagagtaattacagaaaagagaaatgccacttagaccacagaaactaacaacatgaagaagcctacggatttggggagcctggagagacttaagtcatagaacagcatttaaatatatttgtctgcttacaatttccattgcaaatgtgattagtttgcttgaataaataggaatatgatgtgttggccatgttttcctcttgagggttatcacagagttttgattaaggacaaatgtttgaaatgttaggtatatttaagttcactgcacttaaaatgagctaagaagttgtataggcttgattagagggctgccttcgtgaacttaaattaaaagcaataaattccaaatgattcaagtgattgggactaaatatggtattctgccagagaagttgaaatgcagtccaaagagactgaaatggtgtccaggtttcaagaaatggtgaaagaggaaaggtcaagtgttggagttgcctttcctctgggttagtgaatgattcacattacacagaacccctttcaagtacaacttcacaggagtgacaggctcccaggacaatctgtttcatcgttcccaaaaagaagcctctcaaatgctccgaggcgggtatctaagtgttgtcagatggagagagggagggggaagatgggaatgatgggaaagcggggagggggagagtccctggactttttattcacaaaggcgcagaccaagtctcctaggcagtttccaaaacggaagtcaaagtaacttccccacccgcgggagggcggagcccttgaaacgtaataggatcaggcttcagcccgggctctggcccctggaagaagccggagtcaacaaccagcggggtcaggagcaggagcgcgctgggaaggtagagaggacccccagcgcttgccggcccagggtgcaccaggccccagtcgcgcccgctcctcctcgtcggccctggctcagccccgtcaggcaccaacttccctccccggccaagtgggagtgtccggcccacaaagtttccgctgcgaggtcgggcctcggtctctgcaccgaccgcctgtgctgcccgggaggagtggccccctccctccagcagccgcaaggtggaacggctgcccggcaccccattttgctccgcctgtggcaccaacccagacacgtgagcgcccgagcctctcgcacccccaggctgatccggcaggcgcgctccccccggcctcgggcccgcggttaccttggcggccgccatgattcgccccggttgcgggcgactgcgggacccactgactggctggctggcgtttgggacccgggcggctcacttctagtcccggcggcggcggcggtgggggcggcgatacggccaggcagcgtgcgttcctggcctgcctccccacgccctcccgccggcgcgggtcatgtggatgctgcccgcccattggctgggcccagccttggccgccggggtgcgcgtgatccagcggcctctgccctgcagccggggagggctcagatcctggggcagtggctggacagggacacgtgaccccgctgcgctgtccagcagcggcggcctctgcggcgtgggcagaggtaacttggccgtgtgcaagcccgtcacctgagggcaggtggccccaccagggaagctgctggcttctgctgataccaggggctactgggccctcggaccgatgggaggggcaagtaacgacagatggtgcacggcctggggaagttgagaactccactaggacacatactttgctggatattttttcccctgtgcgttccctttgaaggagctccactttacactggatccaaaaagactttgatccaaaagcattgacttagaaggcgagattgcaaatattgctggcacgcctacttttagatcaaaatcggtgaactcttaagaacccaacaagtgaatgtagtgcagaacgtatattcatgaaactactccatttcagccctacctgttaaaacggtagaagtcaaaaggcccgggtcaaaagacttcccccaaataggccctactaaaataaataaacaagcattttaatgaaaatttgcttatatgacctccaggccttactcctcttcatcaggatttcattcttctgtccttgtaatcaaaatttataagacagtggtgatcagggaaaaggacttttaatgtattgtaggttgtggatgtaatatggcagcaaaaagcacttattactaatcagtttaattcattaacgttgattgagtgccttcctactatgtgctaggcactgtgcttggtgctggaaaccccgaaatgacttaagaactggttccaaccgttaaacagcttcagggctattgggaaagagacacataaatgtttacttcagtataacctgttaaggcagcagactgttcccagggctcaataagaatactgagaattctcatgccactatgaagaaatacctgagactgggtaatttataaaccaaaagatttaattgactcagtttcgcatggtttgggagacctcaggaaacttacagttgtggtggaaggcacctctttacagggttgcaggagagagaatgagtgccaagcaaaggggggaaagccccttgtaaaaccatcagatctcataagaactcactatcacaagaacagcatgggagtaaccgcccccatgattccgttgtctctcaccgggtccttcccatgacatgtggggattatgggaactacaatttaagatgagatttgggtagtgacacggtcaaaccatatcaaaaggtaacttgatcttgagctatgggattggggcagtggcacgactagtggaaggagtctggcccagcaggtaggggctgtgtcatggtgggtcttaggcgccttgctgaagggtatgcaccttaactgaagggttttaagtcaggaagcagcatgactaggttttcgatatagaaagatctctctatggtctgaatgtgccccccaaaattgatgtgttggatacaatctctaatgcatcagtgttggaaggttgggtccttggggaggtattttcatcacaagggctctgccctcataaatggattaatgctgccataaaaagaggtttggggagtgggttcactctctcttgctcttctgctcttttgccatataagaacatagcattcctcacctttgaaggacacagcattcaaagagccatcttggaagcagagaaaccaggccgtaacctgccagcactttgatcttggacttcctagcgtctagaactgtgagaaatacatttccgtcctgttcttctagtctcaggaattcccttacagcaacacaaaatggactaaaacactgcttgcagtatggaggatgggttccaactgaactaccaggatgtccagacgagacaggctggggatgggctaggactagagg

SEQ ID NO: 586946 - DNA, 4001 bp, Homo sapiens
taaaccttccaaagatccagtcttcccttcattatactttcctacaataacaaatttttttgaaagagtacactcaacctgtctgaacttcaagattataatttttatctagtactgtacttatctctgccacctactcaaattacccttaaggaaaccaaggatacctgaaacgccaaaatcaaatacttatttttcaagtcttaaccttatctgtcctggggatgaaggaactggtgcagtgttcactagaatgatagtaattatggagctcttaaggagctctactctgtgccaggcactgtactaagcattcaaaaatgttcatttaatcttcacaacatccctgagaagtactacccccttttaatagattaaaattggggctcaaaattacccagaggccaagtagttagtgaagcccatatgattccaatgtttgcagtctcttcccaattctgtggcattttctccatctctttcactatttcatcaacgacgcttataatcaattctcttatttcacatgctctccttggcaatttcatttcctcccaaagctttaactacattctatattagtgcttcccaactttttaaatctttctgtaaatataaacattttgtgctctctgtagcttatattttgaaaataagttttttcccatagaaattacaatattgaatatgtttgttcaaactacacttccttccaccactcaagatctgttaacctctaatgaattgccccatgattgacatcaatagaccttgatgcagaaatattttattggagagatatcaaatcaatctctatttcctcttcccatgtccacttctgctagacatttctctcgagtcataaacatctttaactgtctaataagcatagttccatgactgtcgccccaggcccttcaacataaacctgtctaaaaccaaactctcatttcccttagcaaacctgttctctgcgttctccagctaatcttgtcacaacccacccttgtctattctttaaggtacctacctgcaaaaccgtaacgctgatactctgacttccttgagctaccaggtaaaaaaatcaaccactacaggagtgcctattatggcctggagtagaggaatgcaaaatagttcaaaatatcctcttcctcctgaagaaacagatttttttttttttttggagaggcatgttccaacttataaaattaaaatatattcacaagcattttaatttgatctttaatctctgttttacaggaaaaaaaaatgagatgttactttccactccttcattgttgaaataaacttacactcaactaaaagaaaacaggtctgaatacaataaaagtcaacaggacagcgcaaatagccaactacccaaggacacaaagtgacctggaggcgttctgcggtggcgctgccgtcaaggccggggccgcctggccagaccctccctcagacgccccccggggccgccctcactcccgcacgtccctctgcagctgtcctcagccggtggggtcggcagtgaccgcgggaaaaccccgcttgctgtgcgacccagggcgcgctgagcaggggctgcggctgccgccgctgtccggctccggttccggccccggccccgggcccggccagagctgagtccggactcagccaaagcccctcgccttcagcttcccagacgtccgaccagtggaaaattagcatacctggggcagaaggcagctgcagggccggcagtcctggcaaacctagaaggcgggaataaccctggtgacgggcggggccgggctccggcgctaactgcatccactaggtttggtcaacacagagccgcgccaactctctgaggctgcgccaagacctgaagcggcggaccgagagcccgggtctgagactgagagagcaacggaatggaggcggggtagaggcggaaacacaacctgcagggccagagcgaggcgcgagaaggacggcggcgtgagggggcggggcgcgcagcgcgagaaggcaggcacgaggggcgagcgcgaggcggggcacggcgcgtggcgtgagacggggcggggcgcgcgtatcggcgccgcggccgcgtgacgcgttttcaaatcttcaaccgccgcagcccactcgtttgtgctttgcgccttcctcctccgcgccttggagccggatccggccccggaaacccgacctgcagacgcggtacctctactgcgtagaggccgtagctggcggaaggagagaggcggccgtcctgtcaacaggccgggggaagccgtgctttcgcggctgcccggtgcgacactttctccggacccagcatgtaggtgccgggcgactgccatgaactccggagccatgaggatccacagtaaaggacatttccagggtaagaagcccctcctccgcctgcagtccctttaatcctttcctcccctcgtggttccaccattgattcttcagacttctcccgccgggtcctcagcttcttttcttctgaccggcctctggggtctgaaggaaggagcccccgttcagtgttttgcctaagaaggaacggatcctgacccggcccctcgagcgctctgccgtttacagcggcggtcccagattgattcccggtcgtgccttcggttgaaaactagcaaacaatgtgcagatccgggacctcgccgggactgcggcgctgtctgctcccgggctctcgcatatgctaagcctccgcccgggcccttggaggcgacggactgcatcctcaatttaaagtcagacgcgctcgtggcttttcgcttcaggattagattgagtgattgtgggtggatttttggtcttacccttgaaagtttattttcctttcctcataagttgggggaaagcattgtatttcaaacaccccattgctggtttcaacattacaaacagggaaacaaaagcaaatttccattttcagtcactttatttggtgaaacattccagcacctaagttttttgtacaggtgtttgtgtgtgtgtagtaactaccaatttaagaacagattgcgtttgaaaaattaatttttaaagcagttgcttggatctcagatctgtttctaatgaaaataatgaaaggtttagttcttcgtaatggaccgttaagttcttaatacgtagacaaattgtatgtgaaatggaccgtttagttgttaatatgcagacaaactttatatgaaactaaaacttgagcagtctgaaacccttgaggactaggttattctgcgtaacagaggattctttcatcgctaaatgaagtttaaacaccagttttgaatgttcagcagaatggcagatgctcaataaatagttgagtattaaatatccccatggagtttacatcctaaaaaaagaaaatctttcaaaagagttttatatagttccgtgcctcaggaataaacacacgaatatttcttgctgagtcaactattattttacaatatgcggtctgtgaaagtatatagggcattttgcctctatcctaagtagtactacaaagaaatacatttcaatgctaataacttaaactggtagggttgtaaggatttttattctgtaatattgtataatgaaatattttaaaaatagtaaaagtgtctgtgtaaaacatctgattctaaacatctttaataggtggaatccaagtcaaaaatgaaaaaaacagaccatctctgaaatctctgaaaactgataacaggccagaaaaatccaaatgtaagccactttggggaaaagtattttaccttgacttaccttctgtcaccatatctgaaaaacttcaaaaggacattaaggatctgggaggggtaagtgaaaaccgtacactggcatagaaggaaaaatttgtaactagtactttctactgtgtaatcatttaaatttttcattttggaaaacgcttctattagcaccaagcttaacatttttatcagctgtttatcgttaacaaaaaaccattt

SEQ ID NO: 586947 - DNA, 4001 bp, Homo sapiens
gtgaataactgactctctccactacgtcttcttctctgctacatattcaatgtcaggggtctcagcccctacccccaagagagacaaggtaaaagaacaaggtgaggcaccatcagggtccttgcttttgagcatgaaagcctcacactcctacactcaatatccacaacacaaaacatgagcctggtggcctggggacaaatctccttgaggtgacttgctttattcttccccttgcttctcaacaaagtgacacagaggctagaggagcctcttctcttctctttggagaatcaaagacctttattgtagagaagcaccagactgtgttattacatatttattcttgtaattgaaaaatattcattctcattttctgaacgattttgtttcttagtcgaatatgagctgtttaggaggtattaaacatttgttcatttctttatatacttacttattcccttatccagagggagaaggcaaagtatgtattgtgttaccccatttttcttgtttctgaaatcaaattagttgcttcctaaattttcattaggaataatccttggccggatggggtggcacatgcctgtaatcctagcactttgggagactgaggtgggaggatcacctgaggtcaggagttcgagaccagcctggccaacatggcgaaaccccgtctctactgaaaatacaaaaaaaaaaaaaaaaaaatgccaggcacagtggagcgtgcctgtagtatcagctacttggggggctgaggcaggataatcacttgaacctgggaggcagaggttgcagtgagcagagattgtgccactgcactccagcctgggcgacagagtgagaatccgtctcagaaaaaaaaaaaaaaaaaggaatgatctttatgcagtcaaatttcatgacacagtttttccaaatgactaacttacttcagaaaagagaattatttagtccaataatttgataaattgttcctcacttgcatatataaagaaagttgtataatcttttcctgacattttaaagaataaaatagattttatcttgatagagttagtaatgtatgggataagtacccatacattactaatgtattatattatattatactacttgtggcatagggcattctgctactttccagtgaccattttctccccatctctcttctctttccagtctctatccttcttactctcattgccttttcttctctccgtgtttcccttagtcttggactttctaggatgtctagcagataaatctctcacttctagaccatatgtcccctaccccctccctttttttttaagagacaaggtcttgccatgttgcctaggctgacctcaaactcttgggctaagctatcctcctgctttagcctcttgagtagctaggactatagatacatatccctatgcctggctgggaccagatggcctttctgaatcctttctagtaggtgattctctctcctggagaaactctttccttaaagcttgctttttttttttttttttttgccaaccctcagagcagacaatctatctataaagtcagatttgagtggagaattaaaggaattatctgaataattaaaacaagaacactaatatctttgaaaaggctatttaagacttaatgatgcctacaaccatttacttgttaaagtctacttaaatatttattctacattgctagcgctccagacatacatgcatatcttattagtggattcattcaaaatattcacacacatggaataaactcaagaacataataactcctaaataggctttgatcagaaaaaataccattttcaaggaacagaaaaccagtttgaatataacaatcataaatttggttcctacctgacacatactctgtgaggagcttctgcaacagtggtacattttcaagataaagttctaagttctagttctaagaggcagtgtccatccactcaggtctacaggctctgtgtgcatccatatgcatagggatgtctatatataggctatgtaagacagtggacaaattacctttctgtcagctttaataattaactctcattaacttttacaacaatgaaaagactgcaatgtggtcttgacctttgagactttgatcagcagaagtgatgatgaagattgcttcctcaagttccttgtgagattaaaccaccagtgggtggtttaatgcacttgtgtgtacgtaatttcattggtttgcagagattgcacagcagatgctcacgtgtacttaaaaaaaaaaagaatcttctcaagggttatctccttgacatttcaccaacctgtttagatgagagtttagtggtggtgttttttggctggatgactccatggaatctgtcatgggctgcagaagtgtggtgtataggttaactcctggtatgataaaggccctcattaggaacactcacccaactcccagccacaggccatatctgcattccaatttctgcccccaccacagctcttcctaagagcaataaaccctatgttgctaaacacaatgaatactttcaactctcatcttacttaaaagcatttggcattgctgactacactttcatgaactcctctttttattttaaaaattatttaactaattagttaattttagagatggggtattgctgtgttgcccgggctggtctcaaactcctggcctgaagtgatcctcctgctttaacctcctgagtagctgggattagaggcctcagccatcatgccgggctaaaatcttctcttcttgaaatgctaaaaaaaaatttttaacacacttgtttttcacctcatcctttttgccaatttctcctctaactctttctttggcatttcctaagattctgttctgaatttccttctcctctcttgctaccctcttaccctaaataagagtcctatggctcccagcaacattcagatttctaaccccagctctctaggtccacatatttaactgcctattccacatctttgcttggatgcctcataggcatctcaaacacgacacatatcgagattaagacctcttgatctttcctcccaaatctgctccatctctagtcttccccatttcagtaaagaatattcccctttactcatgtcagagacctgggaaccatctctgacacttcttcttgcagaccttctccccacccgcagccaatccatccttaaaccctattgagcatgcctccaaaatacatcccaaagccatcacttttcttcatcttcactcttacctttgctgcacttcttgcttcctctcgcagccctccccatctctttaccactcattaatcagaatgatcttttcacactagtcctctttgtggggctgatgattacacagagggaaaacaggcctccaaagtctttgcatgatctccccctgcacaactctccaacctcatctgactctgctcttacttttgttttctccactcccaccatggtggcctcctgtagtcccaaatttgcccactctttgcagacatcattttctctgcttaaatgcacttctctctctctctcggtttggctgttacttagcttcaacatcactttctcaaggagaaccactttgacttcctaatctcaattagcccctcttgtggcattctctcagagtatttttttaagtcccttggttaatttgcatgtactttttaaaacatagcatcataatttaaaaatacacaattatttacttggctaatgtttggctttctcattagaatgaaagccccacacaggcagggactttggcgaattcactgctgtatgcccagtacctagaatgaatctaccacagaacaatgactcaataaatagtggttcaatgacagttcaatcaatgaattatgtttgctataagacaattccaaaagaatgtggacaggtcattagcgtttgttagaaattaatctaacctgtgtttttaaatctggctcacacctgtgctaa

SEQ ID NO: 586948 - DNA, 4001 bp, Homo sapiens
tgtggttatattttttaagagtctttaaagatatgcagtaaaatacataaagacagtatgctatatgagatttgcttaaaaataatactggagggagcaagtaggtgtagatacaagaaacaagagtaacttggatttgatcacagttgaggccgagtgatgggttaaaaacggtgggggtggggagttcattatactactacgtctacttatgcatatatttgaaatgttctataatgaaaggttttagaaactctaatttctttatgtttgtgacatctagttacggcatgtttgggtttagagactgagggtggctttccccaggggtcccacagcctgctgatgaagtacttggcacaccccgcgctcccctgggttctagcttgcatcctggtctctaactgaatggtagcccgcctacttagcttgagtgtttcaaggactcctcctggtcaagagctgggtttccctattcatttcatttaaacaagctcccaagaaggcaacagggacccactgtaccccaagaggcactccaagtttccttcagagaggaaaaagagagacggggctcctagaacccactctccccaaaggcgagtttcccaggtaagttcatttcgggcccgagactgatggagccaccctcccaccagaagggcggcgtggaggaccggagaccgaaagtcgggcctctgggagaagcagctggcgcccaggggctccgccgcccgcaccccactctcgcccgctggggacgcccttccctccccaaggcgtggacgccccgctccgcttctctctacgcaggcccgcgcggccgctacctgcagcacttggccaggctctcccgcagcgtcttgcgctcctgcaggcgccgctcgtgctgttgctggaaagcgagctcgctgtagaccggccgcgacaccatgtagctgcagctgtactcggggagctgcggcggctccgacctgccgcctggcgctgccatgacctgcgagccagaggacagcgaggagggaggacacgcggtaagcgaggacgatcggaggggaagagcgaggaacagaaagaacgggatcacctgttagctgcagccaggcccccctgcaccgcgagtctggtccgcgtcctgcagccctcggcgctcgcgacaagcgccccacggcgcgcacggccagcctgcaggggggcacctgagaaccttcgggtctcgtggcctgcacccgctgcccggggttccccaaacttgaagcgagtaagcccctgctctgggggcttcccgagttccacccagtcccctatggcccgcagccagggcgctgtccgcgttctgaaatctcccccaaaccgaggggctggggcaggggccaaaggcgcttgcaaggctggaaggggacactgagattccctccctccccgcacctgacccgggacgcagctccaggtgcgcactggaggagaggtgcagacccccgggccaggcgtggaaccgtcagggcgcgctccgcgggtccccaagaggcggacgctgcaggcacattccagcagctgtcgcagccctctcgggggcagaactttcagcttattgagcaagtctctcccctcgtcctgttttccgagcagcctgttcgctctcggcgtctcagaaagaaagctgtactgccccctgcccacctgatccgtgaccacttaagagtcccatccgcaaccctcgaggcctccccgggagtggagcccgggccgggcggtgtgggcatcttcagggcgaactcacctgtctctgctcgcgccccgcccggaatgccccgcggactacccttccgctgcctttatagcgctctcagaaggcagtgggacgttttatttacggagcaacagacaccttggtcgaagggaaagacacacacaggctgcggtctttcccaaccgatcctatcaggaaagaaatcctacccctcctgcattcttcccctttcccgaaccgggaaggctgagactcttactggctgccacgcaggggccacccggatcctcactcatcccgttactaatctcaagggttgcgaggtcaggggcgggccaggccctgtgggactccttaaagaagagcagagcccgcctagaggaagaggtccgtggtctctgggagcctgccacaggtgctctcataccacatggggaggagaagaggaacaatggccaggtttctatattaataagtccttgaatttctagaaagtcttttaggagtattcaatgggtggaggatacagagagttcacgatttactcagattttagccacttattctacgtgtgcatgtgtgtgtgttttatttcacaatccaaatcaagccgtccaggtggccctttcttacccactagactctgttttttctttttctcattctcctggacaatcagggaaggaataaactggactacatggaaatcaagactagaagagagggaggaggagctggagctatcctacctcatcagtgttttgtcttctgttgggatgaactttgttaaaactaatgcatggttaagatgaaaggcagaaggaagggtttgataaaccagaacattctcgcctgattgttagtgttctgaagtaaatacagaagaggctccaaaatacagacctctgtacatcaaccttccgtaatccacctgccttgcatatgcagaccatgacaattctacgagctcctggaaacagaactcagaactcctccccagagaaccctgatgcaaattctctgaaatggtagtcagcatgtgcgttttcctgagaagtgaatgagtcaacagctttcaacagatcttcaaaggcttacttcacccaatgaagttaagaaccactaaagaagaaacctaaaaggaaaatccaggtcatgaactttgcaatttttattcacatacagagaagaggggaggaatctcttgtgtatgttttacttatgtataccactggttcttaataaagggctttttttgcctccagaggtcaatgcctggagacatttttggttgtcacacctagggagatgctattgggatctagtgagtagagaccagagatgctgctaaacatcctacaatgaagtttgctatcactccaaggttttgcatgcgacttaaactgtacatttattaatcaattgctacatgtactaaaatatgtatctctctccatatatgtatatatgcgtgtattttttcattattgttggatgtatagctcaactccactacaacagaggaaagtatttgttttaaagtagaatctgaatatactcactctgtataccctcatccataccttcaagatctggtgaaaacactatctcttgcaagaacattctttgatgctgttcagaattaatccagacccttttctgtattctcttaataccttatctgatcctctcttaagttacttctcactatctaccttagtaacacaattttatttacatacaagttctctctccctcactagacaaaaacttcttgagggcaagcactgtgtctcctttcaaccattattatcttctctcatgttttttgaacagatttatctatagcccaaacataccttttcaaaaaactaaaaattactttacatatttgatctaaggctttgtttttctccattaagagcatgctgtggatatctttgcaagtgagtgcataaggatttttcttaaccttggagatggctgtctaggatttcagaatatcaactcatatttgtagctccatggcaactcacctacacaactcacaactctttattgaaggcattctgtaccaatataaatatagtccatatcccattctaatatggatttctgctccttgttgcttgctattttgaacacttttagtctggtccagtcaggcctataaaccactttgcatcagaacttggcaatggtttgctggttcagaggattaaggagtggggtaaggctggcagaaggacag

SEQ ID NO: 586949 - DNA, 4001 bp, Homo sapiens
agtcacaaaatgattaaatttatccatgctgtgtcttttgtgcaagatttcactagtttgaaaccaaaagaaaggaaaatcatcatcttatttttcttaactttattaacttaatgataatgagaacacctgggaatacggacgtgcttcctatttatcatgatttccctagaaaactgtttcacttgggttactaaaatgcagactacctgcaacggtagaaaaattaagataccagggggcaacacatgatatttagaatgagatgaaaactcaactgactttgatcgtcaattaaataggcagtgcacacctgcatctacacctcacaaggcaatccattgattgttagaaacttcctcagtcttccattcttctgttcttagcaaagcgcctctatgcgaaaagcactcaaatacttgttggattgagtcaattcttttggtttcactcataaattaatgaggaacgtgtaactctgtatagtttcagagtagttaaagagagaaaaaaagaaatgctacataagagaattggggcttcaggtgttacctaatagactagaaagctttccaagagtgcacttaagatatgagctatagcaaccttacctaggcaattcttcaccctaagtttctttctaatgcaaattagtttgaatttctctctcttccctcctgtcctttgcctgaaagtcttctgatacaaagcaatactaccgtaattagaaggaatgcctgacaaaaatacattttaaatttcattttcaaaaaggttgatacttcgtattgcatactccgaattcccctgcatttctatgctgtaaattcctaaactttagataatacatttatatctagtgcacattgttcagttttcagataggaaaaagctaaatctcagtctgtgcccgcaaaaagttgatattttttgttgttttaagagtctccatgaatgttgtttaaattctagaatccacagtactcatcgaagctaggaaaagaattttgcccaccccacagcgtatctgaggctttcttcacagctagctgatcggatccttgcagctgtttcttctgtaggtctcggagctcactgagaacgtccagcacgccttcccggcggggcccggcccaggtgcgcactagatgaggcagtcaaccaagtcaattggttcccgatcaactaaatctctcctaaaaataaacactgccgcgagcttcgagagttcagcgtgtcagagcctctatgatggcagagcacctgccgcgatgcctgattggtagggagaaggatttcccgggagggggccaataccaaattttagggctgttaggctctgagcagtcccttcgtgaccggataagtcagagacccggggtttgagccttgcccggcgctgagcggagggcccagtttcgggaccacagccttgctccctgggagctccgggcggccaatgccgggcaagcccagcccggcacaggaggaggcagggcccgtctccggaaagagggccagaggcagaactgagggcctggttttgtgtaattcgatttggatacaaacaggccagacccaaactggaaacggcgaagggctggattagcaccgaagggattcgaggaggcaaacgggaagtaaaaatgctgtgtggagctgcagagggcaaggggacaggggttgcaaaggaaagagcttcgtgagactttctccttcccggcgtagggaccagcagagtgcgggcaggtcagccctgtcaccggttcgtttagggaaaaagcgcgacatggggcctgggagacaggggcagaggcggtgacagcgagggcccctgctcgggtgggcccgcgggcctcagctcagtcccctcccgagggaccgcgacccccggccccgcggccgcccgcgcgcactcaccagcccgggctgccctgggcggagccgccccgccgcgctccacagccgctgcctcttcgacgcgcgcgctgcctccaggtgcggctctaggaggaggcgccgcgggcagtgccggccgcgccccgcgactcccggtaacccgagcccgccccgccccgctagggccaggccccgccgccaccctccgcgctgggacgccggggcgcgggcatccctgccgcctacggatctcttcccaagcacctagaactttccaaagcgtgcttggaatttaacaccttggtcgtcgatccccgcaaatatactctgatgagaccggctttcttcccataccgcccaggagtttctccaggtggcattcctgtcgccttgaggtggaacatcagtagaggctcgaggctgaagcaagcacaatacacaaggtatagcgttcaagtggaaaacattgcgtattatgattttaaaatgaaaaaaaaacacaaaaaacctgacttatcttttcaattacaatcattatagagactccgattcgtacaggaacatttcgaaaacaggaaatcctgaggacaatgtgagtatgagtttttttttttttttaattttcaaaaatctttgatgaactgcctttggttaacacttggtttgcaaatattgactattgcacgacaaggcaatgcatgataagttattttctgggcatttaagttagaatttataaaacaacttttgctttttattaagtagaataatgtaacacgttaccccaagctgggagaattgcttgagtccaggagtttgagaccagcctgggcaacaaagcgagactccgtctcttaaaaaaaaaaattagataggaaatagcttgttttgcatctagcaactgggatacaagagagcaccgcagccagagtgccgggctccaagagggtgaggggtagaaaatgatttcagatacatacttccctctggctttatgccttagcaaggattatagttggttcattaagagcatctttttttttttttttgctttgtgcatttctgcgcgtgcacactgtagtgacacgtggcggactagctgtttggtcttaaagctgtaaatgcacgcctgcagacaccagaggcttctgccaaggagaccccacctccagaacctgggccaggcctttggctgggagcgctggtgctgttcttcatccgagaggaaaggctagagattccctccctactccacacgagggcgatctcttcaagggcaccagaccactctccgcgtccctagctgaggaaaccaaatttgcttttctccacgcttttgaacatctctaaacaaatcttaatagggtaatttactaaggaggagttgggctcctgggacgtgcatttctggtgtccttcatttgccacttggcctttgccatcctatgaaattattttgtcacatacctgtctgtagcccagtacttcttacactttaatgtgcataggaatcacctgcggatcccgttaaaaacgcagattctgattcagtaggtctggggtggggtctgagatgtgcctttctaacaggcccctgggtgatcctgataggctactggaggaccaaactttgagtagcaacactggagacagttggatgataaactggttttgccggtagcaccaggtacctaatatactaacacaataatggcaatgttgctaacacctgttcagtgtttacatgtagtaggcactgttctgagtacatgtatttacttgtatagatattgctattatttctggtttagagatgagtttgcttttaatatgagtcttccccaccccctacccccttcccatccttgctggcttaattacatttatttggtattagaatattagggagagtatcaggaagaacagctagtggatgctagaccttaatacctaggtgatggggttgacctgtgcagcaaaccaccatgacacacgtttacctgtgtaataaatctgcacatcctggacatgtactccagaacttaaaagcggataaaagaaaaaattaaagaatattaaaaagatctgaaaacgtatactca

SEQ ID NO: 586950 - DNA, 4001 bp, Homo sapiens
cctggacgtgcagtgccctgaacactcctggccagaaagccgaggtttctgccttgcccggaggccacgccacccaggaaggcggacgtgcttggcatccagccaggaggcggctgctgtcccctctggcttagtcggcaaagtgggcagctgccacccacactgcccggcttggccagccactgtccccatggtggagggggtggggaccctgctgcagccgctctcccccacctttcctgggccacaggcctccaactctgtccttcccggccccccacatccaagcctactgcgccccagggaaggcaacccagggcctcctgccctgtccccccttagttaaaatttaacgacatgcacactggcttaataactccagtgtttacagggcttggccctgctcctccactctgcgctgccgtgaccccttgatgcctgacccagggggcccttgagaagacacaggtcatttttttggccttgaggccacccctcaggcctcagtttccccacctcacaactcagtagaggaagaagagggtgagagtacgtcacaaacagggactgggtgggtggctggtggggtaggctcagctgcacacagtaggcattcaacagttgcacaagctgccacttaacactgctatgggcaaggcagggctcccaccgctctcccccatttattaatttttttaatttctatttttgtagaggtggggtcttgctctgttgcccaagctggccttgaactcctggcctcaggtgatccctcagccccggcctcccagaaccaagattacaggagtgagccactgcttctggccaaggcccctcaccactttgcagggagggcgactgaggcacagagaggccaagtcgggggtgggggggggggtcgtgcagctcagactggagcctggcccagtgaccccctccggctcctcccatttccactgggcctgaagtgcacagtggcccagggcagctggaagcgctgggcgtcgggaccccaaagccagtctggcctcactcgggggccgcgctcctccggccagccaggaaggaccaggggaaccgaattccacttggaaagcgggcctgggctcgcactcccggctcagtcaccagccctggttagttgatgcctggtacacccctggtccccgttaaccggggctaacgatgcctctgctgccctttccgcagcccagcggtctaagctgctccaactcctgtgggggtgggttacaagcccctccggccaccccctttctgcagccccccggggaccgatgcatgcaggggccacaggctggccccccgggcccaccgccctccccggcccgggtcgccgcgcctttctgccgcctgtccggcctcatcagccgcaaagttggctcgcggacctgcgcccccaggcaaaggacagaccccctgggccgtcccgaggtgaccccggagcccaggccccgcctctcccggccgctttttccgagaacgaggaaggggccggcgggggcaggggagcgatggggtggcgcgggggggtccggggaggaacttcgtgcgggaggacccccgcgcggtgctcagggaggcggtggcgccgaccccctccatggcgagggcccaggggtccgggtccgcgcttgtcgccgggcgcggggggctgggccgctcaggacgcggccggggtggcctcgggttcccgggacaggggcgggctggggagagggggcagcgcccgggcgggcgggagggggcgggggaagccgcgcgcgccgcagacaaaggctccgacaggtccccgccggcgtctccccgcgtcccgcggccaccgcttacctcggcccggcccggcctggggtcctcggcgcgcccgccacgccgccccgctcccccagcctcgggccgggcgcgcccggcgtcctccgccggtccccgagtccgcccggccccggtccacgagcgcggcgacgagcacagcccaggccaccacgccccgcctctgcccgccccccgcgcccggccccgcccctccctcctcctcccccctcctcctccctcttccctctcgctcctctctcctccctccccctcccctcccccttcctcaccctcttccctcctcccttcaccctcctctcctccctccccctcctccccattcctcctctctttccctccctctccattcctctcttctcctccctctccctccccttcttcctcctccccattcctcctcctctcttccccctctccctcctcctccctccccttctacctcctctctccctcctccccattcctcctcttcccctccctcttcctccacctcccacctcttctctctcctctccccttcctctccattctccccactcctcctctcttccccttccctttctctcctcctccctcccactcctccccctttctcttccctccccttccctcctcccacccctcccctcctccaaagtcctccattaccctcctcctgctctcctcccttctcccctcccctccaccctcctccctttctcctcctcactcttcctcccttcctgtctctcccctcctccctctccctccctcctccgctttccccattctcctactcagtcctccctctgtcttccctccctcctcccttctaccatccccactcctcctccatcctcctcttttctccccctcctccctccctctccttccccttcctcttccctcccctctcccccatcttccccctcctcccctctgctcccatctcctttcttcctttctccctccccccacccttccatccagctgggctgtgcaggcgccaggcccaggctgaggctgaaatcaggatccccaacacaccagggtgcggcatggtggccccgggagggccgggtgacctgcggctgacccagcccaccacccccgctgcccacccctcagccttggtgcccaggctgctccccctcaacagatccactcgcctgggaggccagcaacgccgccagtgggtgggtaggttcagtcacgaggccactgggtgaccagattgaaagtttcgaaggacgggtaggagttcacctgctggagaaggggcggagagcaagtccagccaggagtgggggctgtggccgaccctcagtcatgccctgccctcacttggttcctacctcgacccgctccctttctcctcccagcttgggatcagaactggctaggttgcttcccatgactccctttgcctgggagcctccgtttttctcccaggtgaatggaatcatgaccccgccctattctccctctactcacctgtagcctggctctaggacagactgagcagagcccaggggacccaggtataggacatcagccagccctgggggactgggagtgttactggctgggagaagggtccagcctcgaggtgaaatcaggaaccaggtgggaatcacacctgtcctgggtctctgtgggggcctgtctatgggaatcaggagagaccctccgggtctgagccaccaggtgggatggatacaggcgcctgcccaggcccccaccaggctcctacctgaggcccttccttcactttccaccagatcagctccttctcccccttaagcaacatctccgttgtcagcgctccagggagcccccacggtttcttctgccccgccaccaatggggtcagcacctttgctccaggccttgcccatcccttctaaaggactgggagccccctgaaagtagagacctgctttcgttctctttggatcctcagtgcgcagtgaggcatacaggggctggcatacagcaggagccaaatatttgcttgaagggcagactgcattgggagctgaataaggaagtgttgagtgaggtgactccattcacctgggagcctccgttttctcccaggtgaatggaatcacctggtggcgggggctgctgacgcactcttagggcgggacacccctctccttcctctg

SEQ ID NO: 586951 - DNA, 4001 bp, Homo sapiens
tgatatcaaataaaataaacttctagtaggcaccacatgaagaactggatgaccaaaatctatgggctgctcaagttcaaaactggcagggaggttgaaaaaggtattggactaggagcttagatatcttgggtcccatttctggctctgccacttacaagtagtgaagggtcacctaacttctttggaccatttccacttcagtaaaacagtttataattcttgaccaatcttctgcacaggattgttcggatgatcaacagagatacaagttgagtatctctcatctgaaaatctgaactctgaaatgctctaaaaaatatgaaactttttgagcactgatatgatgccacaagtgaaaattccacacctgacacctttgctttctgatagttcaacgtatacaaactttaattcatgtacaaattattaaaaatattgtatacaattaccttcaagctaaggttatgtgtataaggtgtataagaaacacaaatgagtttgtgtttagatttgggtaccatccgtaaaatatctcattatgtatatgcaaatactcccaaatccaaaaaaaaaacaaaaaacaaaaaacaccaaataacacccgttcccaagcatttcaaatgaaggatactcaacttgtaatgtatagattcagaaacacgagctagagaacactataggtattgttttactgccaggaaaaggagcccaagagaggctaagtgacttgaagggctacacagccagtggacgacggagccaagagtgaaattcacaacccagctttttagtcctggaggcttttccacaccacctgttgtctcttctgttatagcttctatccactgaactttgcacattcaaagtgacctcaaagagccctctcaggtcacttggaccaatcttctacttgcttttttttttgtctttttgcaagccacctcaaagagcactctcgggtcacgtggactgatcttctacataaaaatctgttctaccgcatcatttatgtatgtttgggcaaagtactcataaccatttccaaggccaataaagcaaatgctttgcaggatgccgtaataaaaataaaactttctttgcagtatgtacaaagtcagactgctttacaagtcaaaaacctttgctcaagtccagcctgtgccatttaacaggatcgaaaaaagagctagagttggatgggaaggaagagagagtggtttggtgaaggaaccttggttctgacactagctctctgccgaccttggactggtcatgtgaaaaactcttcagacttcaataccccccgagtgtggaaaaggggtgacgacagcaacaccctgagtcttcccctcgcaggaatgctttgaaactgttaggcgggactgccgccggtgcgcagttttgggaagcagcggactcagcggggtcccaggctgcccagacaggacggattgctggggggctcaggccgtcctgccccgggctccgtgggcggcggggtggggacagggcgtgggcgcgtcccggggggacctctcctctggcttcctccgccccgccccgggagaccgggtgcggcccgagcgggtcactcaccgggccaggagctctaggaagatcacgttactgcagcagcctgcgaacaccaggcccaccgccaaggccgggcgcatggccggtgcagggttggggaagcaagcgcacagagtaagcgcccgcctgtaccgctaccccaggaagccggcctcctgcctcttcgctgcgcagcacatcgcaccgtcctggaaagccgctctcactgggggccgccgcggtctccccttctcccgcggccaacaccgacgctgccaagaagctgtagttcgcagtcagcttcggtcccattcatccgagggggcgtccgagccccggccagactacatgtcccaggatgccgtgcacctttacctcaggatgcgacgttcccgcttccgccaggcagctccgccagagaggacagggggacgaggtgcccggcatgactcgcgcgataggcggccgcgggtcttgctgggaaatgaagtcccaaagcgtcagtgtttcttgcgagaccgcccagagcgctgaaagtaactcggccgccagggtcacaacaaacttgctggcagcggcggcactagaactacagagctgtgactgctcgttggaggtgttctagcatctgaaacaactctgcttcctgaactgatatatatatatgtatctttggtgactctattatgctgccaggattaagaaccactgagaattcaagtaaagcaatggctctcaaccacgtctgtacattggaatcacttggagagctttaaagatgactgatagccaagtcccacccccagcgattctgatttaattaggctgaggtgcagccttaaaggtgatctattgatattatccctaatcctagctctttaaggtactcccttcctttacctccgtggttctcaaacttagctgcgcagtcaaatcacctgggggctttgaaaactgccaacgtccaggctcttctactggcaaaaatgccaatatcagcaatcagatctttaatggtgaaaagaaggcatacttccctcttcttacagtggaattctcatagcacttacaatctgagccattcgacttgactcttacttactcaatgaacaaatgtttgttaagcacatattacgtacataagctagtgcggcactattctttatttgtaaaataggtatgcacactttatccacccagcaagactagtttttaagggaaacgtgtttacacttcctttctgcttcccagtgtctactataaaaggttagcatcactgctcagtattttaccacatcaaatatttccgttgtaattgaatccaacagcaatagcaaagtacacggtacaaagctaggtaggattttggaatgctatattgtttttgctatttcctgtgagacacgaacattctgaagtctttctcgagatctacaaaatagtttggaatgcttttttcccagtccgtgactgggagatcacattggaatcatctgaagtactcgttatcgagtgcagattattgggtctcgctttagacctaccaagtcaaaatccttgtgtatgggttctagaaacttgtatttttaacaagcactccacgttctaattctaatgcattctagaatttgagaactgctgccttaaaaaggtgagtaggaagaagaactaacataaatagaaagcctactacctgtgaaattcagtatttaatgagcacccgtcttgagtttgcacagtgctggcacattaaacaatgaattatatatacatatatacacgtatatataccagttatattcatatacacatatatacacacacacatatatatatatatataactggtatatatacaggtatataatagtaccagttctacctcagaccaagtaaagtggactatctgggagtgaggctgaagcaatgataatatctccacctccactatcaataatcctgccaacaggaagctggtctggattttcatctggatttcattagaggtgatttctcttcacacagaccttcattttccatatatgccactaatttggaagcccttaaaggatgttctaaacatttctcattacatctcagataaaaacccaagcatgtctaagtgattgcacaagaaaaaaatggcctgagtactgtaatatttgcaagagttctgtatctttcttccttcctccacatttctgtcttcacctactgcagtgagtattaatttaatgtgcatgttaatcacttggggatcttgttaaaatgcagattctgattcactaggcctgcagcatggcctgagattctgcatttctaagtagctcccaggtgatgctggtgctactgacctgttgactgcacttggagagcagaagcctgtaaaatcattaactctgaagacctctctatcctcccctctc

SEQ ID NO: 586952 - DNA, 4001 bp, Homo sapiens
agacaactagttttcaagataaaaatctttccctcttctaccaaaggatttataatcaagttaatggtcactgcagtgacatgacattaacactgatgaacagagcacaaatcagaaccttaaacaatgaacaaggcagttgatcctgacagctagaaagcagcaagatactgttgacttaacttttataaaagtattgtttccgggtcaccttcttaggcagagactcgaaatcaaacactaatagaagaatggtgtcattcaagagacaagccaggtatggaatctaagaccctccacttaaaagtagcttctctgaatctcaatttctgtttttttttttgtttttttttttttgacagagtctgaggccgggcgcagtggctcacgcctgtaattacagcgctttgggaggccaaggcaggcggaccacgaggtcaggagatccagatcatcatggccaatatggtgaaaccccgtccctactaaaaatccaaaaattagcctggcgtggtggcgggcgcctgtagtcccagctactcgggaggctgaggcaggagaatcacttgaacccgggaggcggaggttgcagtgagccgagatggtgccacggcactccagcctgggcgacaagaacaaaaactcagtctcaaaaaaaaaaaagacagagtctggctctgtcacccaggctggagtgcagtggtgtgatctcggctcactgcaacctccgcctcccaggttcaagcgattctcctgcctcagcctcccgagtagctgggattacaggcatgcgccacgacgcccagctaatctttgtatttttagtagagacggggtttcaccatgttggccaggctggtcttgaactcctgacctcaaggaatccacaggcctcggcctcccaaagtgctgggattacaggcatgagacaccgcgcccaacccgaagctcaatttcctcatgtattaattaaatgagataatttatatggagttcttagtatagagcctagtatccaagaaacatcaaacaaactgaaaagaaatcatttaagcaccaaagcactgaagacattcccttcaacaactgttatatatatttatgtatgtataaatttgtgtaaaggtagaaataaaccggtggacaaaaagataacaactgaatgattttgctcaccccaggaaccactcctccctataaactataaacttttcagtaagagttaccacgagatagcctaccatcttacatttcaaaaaaacactaaaaactccggggacacattcccattatctcctgtcaaaactgagaataaacagaacacaccctgcgaagaataaggagggaatgacgaataatttgaccaaattccttgactgagttcatgctagttaccagaaaacaaaaccagtcactcactgagaccacgcttcttctctgacctctatacatcctttccaaagagcttccttccccacctacctgaaaagcatcccctctcccctggtccgaacgacaagcccttttctgatcaagtcagaatctcccagacccacggccggaggacaggcgggcgaggagcacaaaagcctctgccgcatggatcggggccgggccgcagggtcccccgggggtccttctcctccccatccaccccatcgcagcctccccgtgacggccgggaccccaggcccgggcccagggaggagaaggagggggcgagcggccgaccctgcctgggcgccccacccaaggggggccgccacctacatctccccaccgccctcccgacccgggaagcccctcggattggacccgcccccgccccagcaggtcttcggccccacgcatcaccgcttgcgcacccgagatccgcagtggtcgccgctctccagccccggctccgctcgccgggtcagcttggctccgctgcccgcctcccccgccgccagctcacccctggcggtgcgaccagggtttccggacgcccacgtgaccctcccgtcgcggggcacgctgggagttgtagtcccgccacgcggcctcacctgccggcgcggaggagggcgaggagggcggaggctgggagcccacagaactctgctgctgcggacctggccagtaatgttagctgcaaaagacgagaggtagagagaagaaatgatatggggagaactggtgcatcctttttttttttttttttttttttttttcaaaaaagcggtattcggtctttgtttttataaaaagtaacgtgctgctaagtgtgctactgaccggcctaaattttaggtgtctaattaaatgcaggccgggcacagtgggctcacgcctgtaatccaacactttaggaggtcgagaagggaggatcacttgaacccagtagttcaagaccagccttagcaacatagccagaccccatctctacaaaaaatgttaaaattagccaggagtagtggcatgtgcctgtggtccctgctactggggcgaccgaggtgcgaggatcgcttgagcccaaaagtttgaggctggcagctgtgattgctccactgcaccagcctgggcaacagaacgagaccctgcctccaaaaaaaaaaaatccaacacaagtgtctcacacctgtaatcctaacactttgggaggccgaagtaggagcatcatttgagaacaagagtttgagaccagcctgggcaaggtagtgagagccgccccccatccaccaccaccaccgccgccaccgtttcttaaataaagggaaaaaatacagacacttgttcgaattttaaagaaaaaaaacttctcttaatccagaaaatctccacaacaaccattacatacctgttctcaagataaacaatcactagtcttcaaataacagaacttgacaacaccttttgtcaaacatagttcctccttacttaatagtagtaattggggagaccactcatgttggctttatccagaagcaaaacaaacttcgcataactttttgttgttgttgttcgttttttaaacttcgcatatctttttgtttgtttgttttttgtttttgagacggagtcttgctctgttacccaggctggagtgcagtggcgtgatctcagctcactgcaagctccgcctcccgggttcaagggattctcctgcctcagcctcccgaatagctgggactacaggcgcccgccaccacgcctggctaatttttttgtatttttagtagagacggggtttcaccgtgttagccaggatggtctcgatctcctgacctcgtgatctgccctccttggcctcccaaagttctagcattacaggtgtgagccaccgcagccggccaaagttcgcatatctttatagcaggaggtagttttacaaattggagcaaggcgcccatacccactaatttagtctcttaccctcatgtaggaactggaagatacaggcactaactcacgtctgaatttcaaaaagatgacccccaagtccttgaggatacatttctgagttgtgatactggcaagaggctcatttcgccgttataaagatttgtgtacattcgaaaaggacagagaaagaaattttgaaggaacagagagaaggctgagaagtctctttattttcagcagaggaattaagcctgttatttttcatttttatttgcccttatacagtggtagttttgtttctagcccttatacagtggtagttttgtctctaggcatccaaggagaaatatgatgtcagggtgagcaaaaataaatgagccaaatatgttacttttatttttaaaaatatattgtgaatcgtttatttttcagcctaaaaaaggtagcaaattctgacacatactacaacatagacgaaccttcaaaaacattatgctaagtgaaataagtcagacataaaaggaccagtacagtacagttccacttatatgaggtagccagagtagtgaaattcatagagtcagaaagtagcatggtggttgcccatggctggaggg

SEQ ID NO: 586953 - DNA, 4001 bp, Homo sapiens
tccgaccttacccgccacccgcctttcctggcttcgcctctcaacccggagattggggatgggggccccgggcaacccccagtctgggcgccccggacgggactgaaggactatgcgggggggccggaggggaggggtggtctggagccagccggggagtgggagggccggcggcgcctcggggagactaccccctcctggtggcagggggcgcggcaccctggctttagggaactctgagaaggggaccccggaatgcccgcttccgaccagcactccatccgcctccccatccttctccccaagaccgcggttccccgcgccccagtctccgccctttcctccacttccactccctccccgctcgagtcccgagttcccccctctccttccccctcccttcctccctctgcggccctggccgtcccccgccaccacctctccgcctacccgctcgctctggacttcgtgccccgggggtctcggggtctctccccgtcctccggcgcactcgcgcgctcccgacgactgccccgtgcccaccccggggcgcgcccccgccgctcccaacttctcccaactcaactttcccccgcgccgcgggcaggccagccccctgcgtgcgcgccccccggcgcaccgtgcgcggtcccgccttcgcgggtggggaggcgggagcgggggccggggcgggggcgcgcttccaggcacagcccggcaccaggggccgcccccgccgtccctctgccccaagcttctccactcggggctcgggagccccgaggatgccgtcccttggctccattacggcacctctgagtgtaaaggagcccttctcacgctagggatcccaggcagcaaaacgcaggcacaaggaaattcggggaagtcgaaacataaacgtatcggggttgagattctcttgcccccctcaataacccccgtgcctccaagaaagcccctgagggacgggtggcgagtgggtgagaagggtgacaggggctggaggctggccgcccggtaccctgagctgatctgggagagggtaacttgttagaggctctccacttccagagagggacagagattcgctgtgctggcctccttcctcttgaatggaacctccacactgaaccgaaccctaggcagagccatcacttatcattcaagacctttgtgtgtagttcttttttgcccaacgaaatcacaaagtcttccagataaggaatacactttttgcttcttttcccttgtgtatgcaaaagcattcagatagaaacgagttaattaacacgtgtttagcagcaactctggttccggtgctgaggagtgctgtttgggatccttttccctcggtccatagccctcaagaatgcaatcatgagacaattagagaggcagcgtaagggaatctataatcagctcctttaaggggtgaggcagaggctgctgcaagttgagcatcggtctgtggtcttgtctgtggagggggttaaccaacctgcctgccacaccctggctgactccagtgggccctgttccggagactggggtctgagggggacccccagggctccacccagttttcctcagcatgtcagagttcagcggctagagtcgggtgggctccgagacaacaaacggggctcagcagagagggggtctttggcgtgtgtccctccactaaaatccagcctcgaaggggcacagctgttctcccagccctgcggtcagctgttccctgtgaggtcatcatcgctcacaggcattccccagtcaattctggggtcactaggtggcttggggagaggtggaaacccgtgctgaggtcgtcaagaggccgttgggaacacaatgccaccaaccaggtcagcgctgggccgccagtgcccgggatctaggccgccaaaccccaaacccctaaccgagagcgctccgcccccatttccgctgcattctggaacgcgtagtcccggagcggcccttttcaagagggctgggagcacataaaaggaataacaacagcggggcacactgggaaccacggcgccgcggcggggcgcccggaaaacggacacgcgttgcttcctgggacttgaagtccaaggtttgcctccgcggtagaaacggagccctggagtcgagtgctgcagagagcgtgagcgcagacggctgggggttgtagtcttcttgtcctcggtctcgggcattgcggggagacctagtcgttttaggactacaagccccagaaggccctgcgcgggcagacggggcggggctggaggctcaggtgccgcctcctctgcaacgccggggccagagtcttaaaaccgagggcccgcaggggtccccgcggccgccgcgatgcagaaatacgagaaactggaaaagattggggaaggtaatggaatctcgagatgttcctgcaagagctcctctgcagatccttcggcattccttgaagccctggctcccttaccgtcagcaatgcctacaggctccgatctcagcagcggctgcagccctggccccctagctcagcactccgtgcagacaccagtcttccccgtgttagcatttcccgcagggctctcactccaaccttagcgttcccagtagacccgacctcccaaccgcgacacttcctgaaatttctcaccccagcctcagcagcacttggacaacctcaccccgacccccagcctcgtttcttgctgcagacctccaacctcaatatttctgcagcccctcagtcctctcccagacccctcctcactatttccagacccttccggagcaccgccttcattttagacatccttgccctggcaaccgcactcgcccctcctgccgagcccctggagcctcggtgggcaccttctcctccctccccacctgccacatcctcactcacaaagctcaccaacctaccttcaccctgaatcccttcccttgcatactgagacgctgccttcacctctctcaggaggcatttcctggcttagggaagagtgccgcatcctcaccctgacccctgacctccttcccctaggcacctacggaactgtgttcaaggccaaaaaccgggagactcatgagatcgtggctctgaaacgggtgaggctggatgacgatgatgaggtaggactggggagtgggatacggcctggggaggggtttgagggcctgggctgggtgggatctgactgctgcccaccggccccctcacatatgcagggtgtgccgagttccgccctccgggagatctgcctactcaaggagctgaagcacaagaacatcgtcaggtgtgcgggaggcgggtgctccttgccggtgtggccgcttgggggaggcgggggctgacactggacgtctgtcaggcggacctgcctggctgagcccttcttttgccctaggcttcatgacgtcctgcacagcgacaagaagctgactttggtttttgaattctgtgaccaggtgaaaggcggggtttggaggacagtagccttgggaaggtataggggcccagattgaggttaaactctgtcccattcccccactcatatcccttttcaggacctgaagaagtattttgacagttgcaatggtgacctcgatcctgagattgtaaaggtgaggagagtggtgttgggggacccctcaggctggggtcggagtctgcattcggtgtaagcaccccttgggctctaagtttgggccctgaacagggacactctagggtgttagagaatgagaaaaccctgtttctgtcctccaggggtctccagtcttagtgagcattttcacgtggtcatctttgacccgcacagtgtcattctgatgtcagtgatattatttacactcgagagatgagaaaatgaggttcaaggagatacactcattcattcaacacatacttactgaatgcttcactgtgtgccaggtgcttttctaggcccaagaccaaatgccttggtccaggttccaggggagccagtcct

SEQ ID NO: 586954 - DNA, 4001 bp, Homo sapiens
tggtgggaggactggcggtggtctgcagggaggagggggacttggctgtggcaggcacagtgtccctcccctgccatcctgccccctagccccactcctcccactaggaccccagtcccttctttgctggacagtcaaacctgatccccccacctccccctcccctgcctgccccctcacactcaaagtcttcctccccatagctgcggcctggctcctcccctccacgagacccggcctcctgtaggatctcctcaaaccgctccacgcccagggtgcggtgaagttcgtcttcctcctgctcggggaacccaggcgtcccagggcccaagctctctggctctggctgtgaggaagaaggcagagagaaaacacacagggctcactgggaattgtaccccgaaacctcacccttcccagtgccagagacccaggaaccctcccccgccagcagctatctcctctaatgctggtggctctatatgcccccagcagctgtcccttaaatatagggacccaggccaggcacagtggctcacacctgtaatcccagcactttgggaggctgaggtgggtggattgctggaggtcaggagttcaagaccagcctgaccaacatggtgaaaccccatctctactaaaaacacaaaaattagccaggcgtggtggcggacaccagtaatcccagctactcaggaggctgaggcaggagaattacttgaacctgggaggcggaggttgcagtgagccaagatcgtgccactgcactccagcctgggtgacagagtgagactccgtctcaaaacaaaaacaaaaaaaaaggaaacaaatatagggacccagtcctcccaagcagtctgccccctcaaatgcaggaagccagtcaccctaccagtagacatcccttcaaacacagtgacccagtgtccccccagcagtctgccccctcagatgcagagacccagtccccccagcagctgtcccctgggttctgagctaccctcatcccagcccagcccccttggctgtgtagtcagttcagggcaggtggaagaaatcccgtgtgtccagcccatctgcagcctggagggagggcgtgtgaaccgggaagttcacatgacagatagtgaagaaactccagttggcctgaggacaactgctgagcccaaaaagtaacttctggcggcgcccaagctaaccgacccagagcctgtccgagtcaaacaaacccagccccgcagggaccggaatggatgcccttcagcccccaggagagctcccccagcccccaggcccccggcccgagccctgggccaggtccctagccccacccctcaccccacccccacagcccccacctgagtcatcctgcgggcgcggagcagcggccggccggcacagccggcagggaatgcggcgcttgtaagagctcagcccagctaagcggcagccgcctggccaggcagccttggtccagccccccacccacccacggtctcagctccaggcgccgccaaatatttgctcaagagcttctggacctgaagggcatcgggatctccaagggcgggggtatgcagccccctccatagcggtgccagcagccagaacaaggaagagcgcggggagggctggggtgaagggcgggtcttaggggcgaggtggggactggagcagctgggactggcagaacaccggataagagaaggtgagcgggccagggggctggcttctcccctctgtgaggaaggctcctgtccatctcctggctcccctaagcgcccagccccactcccaccagaagcagccccgtgggacgaggggacggggagaggcgcagggagcttgccgccatggggagagagggtcgcagacccctcgcacctgaggccgcaggaggaagtccatggccggcaggggtgaacctgagaaggagggggaggggaccagcctgtgccccttcccagtcacgtgcccctctgggccagtgtgaccaatagcggagctgattgtggcacggggttaatcattaagactccttaggaaaatccaaagggggccatgtggagcggtggccacgtgggggcagggaggggcgggcctgggtggcacgtgggcagggggcgtggccagtcgtggcaggcgagctccgcccagaaccctggcccgcgtgcagacttgacctgcgcctctaaggccagccgggtctgagacgggttgctgggtgagagacccagggttctcaaagttcctcaaccgctgaggctaagctacctaggtcttcaggtaacagcctcaactccctccccaggactggaagacgtctgatacccccactacccatccccccctacgaccatcatgcaaagtcagggtagggatggcagcatcctcccagtctccacactcacacacgctcacacccctggttggcgaggacccttggccggagcacccaaggctgcccagggagggaaggttgggctggcgacctgggggccacactcaccgtacagaaagaatctgcgcccttggcggggcgccgaggggcgctgctcatggccgaatcttagcccttttcgctgtcgctgcggctttcagggcaacgaggcggaggcataacctggatgggggagaggcctgatcaccatcgagagccctgggagggcaggagccaccacgcgcaggctgcgctgctggggatcctcctggagtatgaagggcctcagagtggcccttagcggcagccacagcacagaggagagttatttataggaagaaaagagaagaacaaggagacaggagaggactgaggcgaggggggccgaaaagggccgagaggctgagtagagggaggaggagagaggaggtgggaaaggccgcaagaaaaatgagggagaaaggagtcaaggcccaggcccggagagaaagcaacaaagatgagggagggagtgataatgagctggggaaagaggggagtgaaggcccaggcagacaacggagcctcgcagggtcagggcacccaccagaggtgggcctgagaccagagagggtgtggtggggagggtgagacaccccgtggagccggggccgggctgccgagacaggaagcagacgaatggaagaactctggagagagcccaagatgcccctgcagggagggggtgccccctccccagtacaggccggcaggaggcttccctcccccaggtccttggggaccggcaggagggaagcaggctggctgggtggagggcaggagctcaactccactcactcactgagagagaggaaggcacagaaggtgggcatgggctgggcagagctttataatgggggaggggcatgtgatgggctgggagggggtgggcaccgcaaccttgaggttctgcctctgaggggcagtctggatcccgcccctctagagcctggagccaggaaaatctgagtggcagtgctgccaccctcctgactgtgactgtagggagtctggggaggacactgtgtggtgggggcagagaaggagctgcaggagggagcccaatccctgcaaatagggggcgcattcctagcgggtcagcacagggggcacccaagactggcaaaaagtgacggtacccaacaacccatgctcccagtgtgttgctggggactgggggtgcctgacttaggagtaagacaagtcagtgtagcgtcaaacaatataggtctgggggggtcacccaggatggggagcctggcaacacattcttggcaagcactccaacttggctaaccacgctcttcccctccccctcagcaggccttcagccagggcgggtggtgtgggtgagcgtgagtgcacccagtctgggaagggtgtggggagagtccgcccagagcacctgcaggcgcccactcccacctcaggctgtgccctcgtcgcgctcctccacactcctctgcaccccctcccctgctgtcccagaacacaaagcagcttctgtccagagcatcggtgc

SEQ ID NO: 586955 - DNA, 4001 bp, Homo sapiens
gtcggggaggctcccgggcgccttcgaggcttccgtcctgggccctggggtgtcttgcggcggcgtgcatccggaggcaggtgggtggacagtgggtgatggatgtggtgggaggactggcggtggtctgcagggaggagggggacttggctgtggcaggcacagtgtccctcccctgccatcctgccccctagccccactcctcccactaggaccccagtcccttctttgctggacagtcaaacctgatccccccacctccccctcccctgcctgccccctcacactcaaagtcttcctccccatagctgcggcctggctcctcccctccacgagacccggcctcctgtaggatctcctcaaaccgctccacgcccagggtgcggtgaagttcgtcttcctcctgctcggggaacccaggcgtcccagggcccaagctctctggctctggctgtgaggaagaaggcagagagaaaacacacagggctcactgggaattgtaccccgaaacctcacccttcccagtgccagagacccaggaaccctcccccgccagcagctatctcctctaatgctggtggctctatatgcccccagcagctgtcccttaaatatagggacccaggccaggcacagtggctcacacctgtaatcccagcactttgggaggctgaggtgggtggattgctggaggtcaggagttcaagaccagcctgaccaacatggtgaaaccccatctctactaaaaacacaaaaattagccaggcgtggtggcggacaccagtaatcccagctactcaggaggctgaggcaggagaattacttgaacctgggaggcggaggttgcagtgagccaagatcgtgccactgcactccagcctgggtgacagagtgagactccgtctcaaaacaaaaacaaaaaaaaaggaaacaaatatagggacccagtcctcccaagcagtctgccccctcaaatgcaggaagccagtcaccctaccagtagacatcccttcaaacacagtgacccagtgtccccccagcagtctgccccctcagatgcagagacccagtccccccagcagctgtcccctgggttctgagctaccctcatcccagcccagcccccttggctgtgtagtcagttcagggcaggtggaagaaatcccgtgtgtccagcccatctgcagcctggagggagggcgtgtgaaccgggaagttcacatgacagatagtgaagaaactccagttggcctgaggacaactgctgagcccaaaaagtaacttctggcggcgcccaagctaaccgacccagagcctgtccgagtcaaacaaacccagccccgcagggaccggaatggatgcccttcagcccccaggagagctcccccagcccccaggcccccggcccgagccctgggccaggtccctagccccacccctcaccccacccccacagcccccacctgagtcatcctgcgggcgcggagcagcggccggccggcacagccggcagggaatgcggcgcttgtaagagctcagcccagctaagcggcagccgcctggccaggcagccttggtccagccccccacccacccacggtctcagctccaggcgccgccaaatatttgctcaagagcttctggacctgaagggcatcgggatctccaagggcgggggtatgcagccccctccatagcggtgccagcagccagaacaaggaagagcgcggggagggctggggtgaagggcgggtcttaggggcgaggtggggactggagcagctgggactggcagaacaccggataagagaaggtgagcgggccagggggctggcttctcccctctgtgaggaaggctcctgtccatctcctggctcccctaagcgcccagccccactcccaccagaagcagccccgtgggacgaggggacggggagaggcgcagggagcttgccgccatggggagagagggtcgcagacccctcgcacctgaggccgcaggaggaagtccatggccggcaggggtgaacctgagaaggagggggaggggaccagcctgtgccccttcccagtcacgtgcccctctgggccagtgtgaccaatagcggagctgattgtggcacggggttaatcattaagactccttaggaaaatccaaagggggccatgtggagcggtggccacgtgggggcagggaggggcgggcctgggtggcacgtgggcagggggcgtggccagtcgtggcaggcgagctccgcccagaaccctggcccgcgtgcagacttgacctgcgcctctaaggccagccgggtctgagacgggttgctgggtgagagacccagggttctcaaagttcctcaaccgctgaggctaagctacctaggtcttcaggtaacagcctcaactccctccccaggactggaagacgtctgatacccccactacccatccccccctacgaccatcatgcaaagtcagggtagggatggcagcatcctcccagtctccacactcacacacgctcacacccctggttggcgaggacccttggccggagcacccaaggctgcccagggagggaaggttgggctggcgacctgggggccacactcaccgtacagaaagaatctgcgcccttggcggggcgccgaggggcgctgctcatggccgaatcttagcccttttcgctgtcgctgcggctttcagggcaacgaggcggaggcataacctggatgggggagaggcctgatcaccatcgagagccctgggagggcaggagccaccacgcgcaggctgcgctgctggggatcctcctggagtatgaagggcctcagagtggcccttagcggcagccacagcacagaggagagttatttataggaagaaaagagaagaacaaggagacaggagaggactgaggcgaggggggccgaaaagggccgagaggctgagtagagggaggaggagagaggaggtgggaaaggccgcaagaaaaatgagggagaaaggagtcaaggcccaggcccggagagaaagcaacaaagatgagggagggagtgataatgagctggggaaagaggggagtgaaggcccaggcagacaacggagcctcgcagggtcagggcacccaccagaggtgggcctgagaccagagagggtgtggtggggagggtgagacaccccgtggagccggggccgggctgccgagacaggaagcagacgaatggaagaactctggagagagcccaagatgcccctgcagggagggggtgccccctccccagtacaggccggcaggaggcttccctcccccaggtccttggggaccggcaggagggaagcaggctggctgggtggagggcaggagctcaactccactcactcactgagagagaggaaggcacagaaggtgggcatgggctgggcagagctttataatgggggaggggcatgtgatgggctgggagggggtgggcaccgcaaccttgaggttctgcctctgaggggcagtctggatcccgcccctctagagcctggagccaggaaaatctgagtggcagtgctgccaccctcctgactgtgactgtagggagtctggggaggacactgtgtggtgggggcagagaaggagctgcaggagggagcccaatccctgcaaatagggggcgcattcctagcgggtcagcacagggggcacccaagactggcaaaaagtgacggtacccaacaacccatgctcccagtgtgttgctggggactgggggtgcctgacttaggagtaagacaagtcagtgtagcgtcaaacaatataggtctgggggggtcacccaggatggggagcctggcaacacattcttggcaagcactccaacttggctaaccacgctcttcccctccccctcagcaggccttcagccagggcgggtggtgtgggtgagcgtgagtgcacccagtctgggaagggtgtggggagagtccgcccagagcacctgcaggcgccc

SEQ ID NO: 586956 - DNA, 4001 bp, Homo sapiens
agtgaaggcccaggcagacaacggagcctcgcagggtcagggcacccaccagaggtgggcctgagaccagagagggtgtggtggggagggtgagacaccccgtggagccggggccgggctgccgagacaggaagcagacgaatggaagaactctggagagagcccaagatgcccctgcagggagggggtgccccctccccagtacaggccggcaggaggcttccctcccccaggtccttggggaccggcaggagggaagcaggctggctgggtggagggcaggagctcaactccactcactcactgagagagaggaaggcacagaaggtgggcatgggctgggcagagctttataatgggggaggggcatgtgatgggctgggagggggtgggcaccgcaaccttgaggttctgcctctgaggggcagtctggatcccgcccctctagagcctggagccaggaaaatctgagtggcagtgctgccaccctcctgactgtgactgtagggagtctggggaggacactgtgtggtgggggcagagaaggagctgcaggagggagcccaatccctgcaaatagggggcgcattcctagcgggtcagcacagggggcacccaagactggcaaaaagtgacggtacccaacaacccatgctcccagtgtgttgctggggactgggggtgcctgacttaggagtaagacaagtcagtgtagcgtcaaacaatataggtctgggggggtcacccaggatggggagcctggcaacacattcttggcaagcactccaacttggctaaccacgctcttcccctccccctcagcaggccttcagccagggcgggtggtgtgggtgagcgtgagtgcacccagtctgggaagggtgtggggagagtccgcccagagcacctgcaggcgcccactcccacctcaggctgtgccctcgtcgcgctcctccacactcctctgcaccccctcccctgctgtcccagaacacaaagcagcttctgtccagagcatcggtgccgataatccgggtaggggcacattcccgggaccagccccgaccggcccagaggattagtatctctccccttgaccaagggattagcacctcggacccccacttgggcattaaccaccccccaagtgaactcgtaaattccgcagctcttccatgtggggctggcgggggaaacgaagggggataaagtagaccctgggtttcaggcagtgccgcctctcacacccagcacagaacttcccgcctggacaaaccgaccccgggagtcaggtccaactctccgggctcatctttcccattcccacccagctgctccctcttctgtctgaccccttgtccgaccttacccgccacccgcctttcctggcttcgcctctcaacccggagattggggatgggggccccgggcaacccccagtctgggcgccccggacgggactgaaggactatgcgggggggccggaggggaggggtggtctggagccagccggggagtgggagggccggcggcgcctcggggagactaccccctcctggtggcagggggcgcggcaccctggctttagggaactctgagaaggggaccccggaatgcccgcttccgaccagcactccatccgcctccccatccttctccccaagaccgcggttccccgcgccccagtctccgccctttcctccacttccactccctccccgctcgagtcccgagttcccccctctccttccccctcccttcctccctctgcggccctggccgtcccccgccaccacctctccgcctacccgctcgctctggacttcgtgccccgggggtctcggggtctctccccgtcctccggcgcactcgcgcgctcccgacgactgccccgtgcccaccccggggcgcgcccccgccgctcccaacttctcccaactcaactttcccccgcgccgcgggcaggccagccccctgcgtgcgcgccccccggcgcaccgtgcgcggtcccgccttcgcgggtggggaggcgggagcgggggccggggcgggggcgcgcttccaggcacagcccggcaccaggggccgcccccgccgtccctctgccccaagcttctccactcggggctcgggagccccgaggatgccgtcccttggctccattacggcacctctgagtgtaaaggagcccttctcacgctagggatcccaggcagcaaaacgcaggcacaaggaaattcggggaagtcgaaacataaacgtatcggggttgagattctcttgcccccctcaataacccccgtgcctccaagaaagcccctgagggacgggtggcgagtgggtgagaagggtgacaggggctggaggctggccgcccggtaccctgagctgatctgggagagggtaacttgttagaggctctccacttccagagagggacagagattcgctgtgctggcctccttcctcttgaatggaacctccacactgaaccgaaccctaggcagagccatcacttatcattcaagacctttgtgtgtagttcttttttgcccaacgaaatcacaaagtcttccagataaggaatacactttttgcttcttttcccttgtgtatgcaaaagcattcagatagaaacgagttaattaacacgtgtttagcagcaactctggttccggtgctgaggagtgctgtttgggatccttttccctcggtccatagccctcaagaatgcaatcatgagacaattagagaggcagcgtaagggaatctataatcagctcctttaaggggtgaggcagaggctgctgcaagttgagcatcggtctgtggtcttgtctgtggagggggttaaccaacctgcctgccacaccctggctgactccagtgggccctgttccggagactggggtctgagggggacccccagggctccacccagttttcctcagcatgtcagagttcagcggctagagtcgggtgggctccgagacaacaaacggggctcagcagagagggggtctttggcgtgtgtccctccactaaaatccagcctcgaaggggcacagctgttctcccagccctgcggtcagctgttccctgtgaggtcatcatcgctcacaggcattccccagtcaattctggggtcactaggtggcttggggagaggtggaaacccgtgctgaggtcgtcaagaggccgttgggaacacaatgccaccaaccaggtcagcgctgggccgccagtgcccgggatctaggccgccaaaccccaaacccctaaccgagagcgctccgcccccatttccgctgcattctggaacgcgtagtcccggagcggcccttttcaagagggctgggagcacataaaaggaataacaacagcggggcacactgggaaccacggcgccgcggcggggcgcccggaaaacggacacgcgttgcttcctgggacttgaagtccaaggtttgcctccgcggtagaaacggagccctggagtcgagtgctgcagagagcgtgagcgcagacggctgggggttgtagtcttcttgtcctcggtctcgggcattgcggggagacctagtcgttttaggactacaagccccagaaggccctgcgcgggcagacggggcggggctggaggctcaggtgccgcctcctctgcaacgccggggccagagtcttaaaaccgagggcccgcaggggtccccgcggccgccgcgatgcagaaatacgagaaactggaaaagattggggaaggtaatggaatctcgagatgttcctgcaagagctcctctgcagatccttcggcattccttgaagccctggctcccttaccgtcagcaatgcctacaggctccgatctcagcagcggctgcagccctggccccctagctcagcactccgtgcagacaccagtcttccccgtgttagcatttcccgcagggctctcactccaaccttagcgttcccagtagacccgacctcccaaccgcgacact

SEQ ID NO: 586957 - DNA, 4001 bp, Homo sapiens
ggaggcggctcctcctcccttgccactacccctgggtggtcagatggggtgtaaatgagatgcaaatgcatcgagcgaagtgttccaaaccccacttgtccagactccagaagggagatggggagggccagagagagtttcaggggctgtgaaacagaaagagcggggtgggatggggactgggaccacgaaagcaggaagaagatcagagggcaggggatgcagaccctggcactgttaacatggacacaccacccacctcacccccaggcatgaggaggggcccccttgggcttgctgttttccttccaactgctacctctccctcctggtcctccaggctctgtgtctaaccctaatgtcctcccaccctcggtcagcagctgtctctgcctatctctcctgcagtgaaacctgcctgtccatgtgtctgcttccctcaccccacctgaccctgtcactcaggcctccagggtagcagcccagaatggagcccaggcctggccaccagctaggtggggcactggggctcacagccactcaagaactgaagctgtaagttgaccagattaaaaaaacagtccacgtgtacagcctctccccactagatgggcctttttaaaggggctcccaccagcagccaggttaggactggtaactcagctagctgacatggacaccttgggaagttacccccaggggtccctggggctggaggacaggccactccagggagtccccctcttcctgtcagctgctctccccagttatcaaggccagggatactggcccatctgctgaagaggccctgagagggaggctttcagagcccccagagagctgtgcccgccaccagccccatccccatgaaaggccaaaatcctagggactctggccttactgagagggtgtcttccttggggtcacaaccaaatttggccatagtaaacccgacagcttcctctacacagggcctccactccctcacccatcccaagagtcgcagcccctgcttctcccattccccacccctccatacccctcccagccgggccctactgactcagctccagcctcccgggctcccacgtgccttcacagcctgcctgtggcaggacagtgctcccctgtcccttcggtctctaggcctcatgtccccaactccagccccttccttcacatgttcgaggagttaaggacatcagcttctggtggctgagtccgccaaggagaccctcagagcccctaacttgggctaagtccctagagcggtcctctcccccaccctaaggcagaagctccagagccctcccgctgggatgcagaggtggctcagcctgcgagcttcccgctacagtgcctccagggtcacctgctccttgctccggagacacaagcagtgacactgtcccaacggatgaacagacagcccagcccagcctctgccatgtccccatcccccacccccacccccagggcaggggcaacacctgggcccacaaggaaaagaacgaaagtcaacctgtcggctacagcgaggaccccctacttggggggtagagtccccaagtcccacccccgcccctgacaagagccatgcaaacgcctcccttccccgcctcgcgtcagacccggccggccgcctggcgacgtgttcgggtgccagggcgccagcacagtcccgcggccgggccgtgggccatgacgccccccactagaggggtgggagagcgggagcgccctcccggcccctcccgatcagccctccattcagcccgagccagctcgcttgccctcccccgctaactttcccccactcaccaccccatggaccagaaactcaaaaagtttgcttttcgtggctttgcgcgcccctccggcaacttcgtccgcggccatcggggtgggctcagcggctcctctcactctctctctctcttcctctttctttcccttttctgcctttttttttcctccaactctcccctctgagtcctgctgggctctctcacacttctactcgagcggagtggggagggggccccttcagggctgccctgacggcccacggcccacgccgccgccgcccgcccgccgccgccgccgccgccgcggctgccgcattcctgcactgataagacagaaatagtccggcggcccggggtctgcctgttgactcggcggggacggggccgcctgcctttccaagcccgctgtccaaacagcgcagataagcggcgaggcgcgccgaccagcccggccgcgggcgctgggcagcagtgctgcagcccgaagccgccgaggcccgcgggaggcggcgcggggaggggacgccaggggaggcggcggggggtcgccggccaccggctctcgccacaaatagtttctccgtcagggaattcgccggccgcgccaggcagggaacagtcagttccaacttttcccccagcggctcctgctgcatttctgaggccctttccccagagacctggcaggccgagcagggaaacattcgctggcaggaaccgggggagcccggcccgcgaggcctcgcgcctgcccggggccggcggcggtgggtgtgcccgggcggcggcgtggccctgcgtccactgctgtgtgtgcccttgtctcacacgccgtgtgtgtccgcgcccttttgtggcgtggcagcttatgtgcgtgcagacagacgccctgtatgtgtgcctccctccacgacagcctccgtgcgcgcgcgcctgcgtgtgtggcaggacatggcctgtgcctttcagctctgtgagaggctatttctgggtatgtgagtctttgtttgccgctctgtgagaaagtgagggcaataggggaagtatttcagaaagagggacagggattgtgctcatgagaacaggaagagaatgaatgtggggaatggcgcagcgccaggggggtgctcgggtgggtgcgtggagagaacgaggcaagctgggcttggtttccttggggtgggggtggagtggggttaggggacccagaggagttggggcagctgggctgggtatagtgggtatattgggccggcctcaagaccccaaagagaggggtcttgaggctggggtgtggcgtggggtggcaagggagccccagaaggggcgtgtggaaggagttggcagtccctggagtggaggagggaccggaaggaggaggggcaaatcctgacatacccaggcagggagtcctgggcctacccaggtccccaaaggccacgccccttttttctccttcttggggaggagccgtgggctttggaacaaggcccttgggtcaagtttgggggtctgctggggcctcactgtgagaatccaggtgagggcaggaccatagcctagtgcctaggggagtttgttgaaacacttacttgaagttgggccctgaagactgaagggtactgaccctaaacccttcagaatgcctttgcccagggggtcctttctgcctgcagcctgatttctgctggccctggttgtgctcttggctgtcactgttcatttaggtgcccactgtcaatctgaaatgtcagggaggacatctggtccaggttgctcctccaccacccctagcttgaaaggggacctagagatccccttgctaccaaatctctcccagggctttagcctagactaccccccacacacccccacacacagagcctgggccctgacacggtggggatgggtgggtggcctgcctctgtctgccataggtcatgctgctgggaacctggggaagtgacttgcccagtctgcctgctaacctccagaatccccgctcactcccatttcttagcccctgcccccgattcttttacctggaatgccctttgcctgccctctgccttccctctgcttgtccaaatcacacctattctttaaagcccagcccaggccccacttcctccaggaagccttccttcgtcctacttgtatgcaaagatttttctcttctccaaatgctcattg

SEQ ID NO: 586958 - DNA, 4001 bp, Homo sapiens
ggggtgttgtctggctgtctaggtggggaggaagtagagcatgccagagcccagaccatgctcacatgaacccaaaacttggtttcaggtagcttgtccctggctcagaaaggctttgagaggcaggacctaaggacaccaggaggtgagaggacacgcaggaaagggagtgtgggatggagggaaggacattaatgacaggtgtcagcaggggtggggagagggacagagaggccctgccatgggcactaaggagtccagctgggggcagaaatgccgggagggggccatgtggtgggagcaggagccgagggctggccgactcgccatggggccccagagcttctgctcctgggctggcaggggaggaagcacctacctgtaccacggtgggtgggtgctgaagacctggagtcatagatggcagggtcctgcacctggagagtcatccagtgccccctcggtgcctgggcccggagcccaccgcgcctgcagcaccaagggccattctgaggatctgaaaggagaggtcagaccctgagccccagcgtagattcaaggaggcctcgggaagctgcgaagaagccaaactccccggagtggaggtctgaggaagccaggacactgtgcagaaaaaagggcctaggatggaggcaaccagcatgggccagctggggctggggtggcacaaggcagggcgcaggtgggagcagtatgtgtgggaagcagacagagaccggccccagggtcctgcgggacaaagaacttgaaagacagagcagggaccccaggcagagcccaagccctgactggagaggccagttttgggggtgtggcaatggttggagggagagagctgggcattggaggcaaaggccagagggcaggtcaggatggtaactgggatggccctggagcccaggggcatggagggactccagaggtggcaggcaggtagtcagcctgctccatgactaccagctggcctaggcgcctccctcctggtccctgctagtgcctgctctgtcctgtcctgccctgcttccttccttgctggaagagcaggaaggcctccagctcgttgggtcaggacccaacttatgaaatgaagtccctgagcagacggtggggcatgggagctaagaagagagcagtgctgtaggagcggggtgtgggtgacagaggtggggcttgggagtggctcagggtctggttaagccatgtgagcaaaagaggctgctgcccatggatcaatcctgagcagggttgggaggaaaggggatgaggaaggaggaggctggagacagggagtgctggggatgggagagctggtggggtccgggagacagagtgggaggggaggatgaggagaggaagatgcggtaggggaggggctaccagtccagggtcgggggggaggtgccctgcaagaaggtgggggacagagggacaacctgaataggagaggggtatccagggaagacggtggccaagtggagacagagaaggtgccaggcaggggaatgatgggaaggtgctaggtaggggaaggagggagaggatgccaggcaggggaaggagggaaggtgccagacagggggagtaggaagcagagcatgccaggcaggagcaggttgagaaagtgctcggcaggggggaggtgacaggcaatgggaggaggtggtgccagacagggggaggaggggaaggtgccaggcaggagggtgccagacgagggaaggaggggagatgcaggtggagggaggataggaaggtactggagagggaaggaggggaagatgccaggcagcgatggggaggaggtggtgtcacagaggggctgaatgggagtctgccagtcagggaagaggtgcaaggaaggggtaggaggaagaggtacgaggttggggtgggggtggagggaggtgccaggcggggggacggaaagagtcaggagtggggggagatacctggaaaggaggaggggaggaagatgccaggaagggagaaggggatgccaggtagggaggaggggaagtgccaggtgaggagaaggtgccaggcaggagaaggaggggggatgcctggcagtgggagaagggaagccaggcagggggaggagggggaagccaggcagggggagaagggatgccaggcagggaggagaagggatgccaggcagggggaggagggggatgccaggcaggggggaggaggaggaggaggatgccaacagaggcgagcagagactgccaggcagggaaggcgggggcgccggcgcagcgcggccgggaggcgccttcgccaagggccgtgggggccgcgcggcgcgggtcgctcacctgctcccccgggaccccggcccggagcgcggccgcccgctccctgctcggcgctcggctcggcccggcgcctgcgccgctgcagcccggagcgggggaggcgcagggagcgtctgcaaagagcgaggagcttaataatgagttagggaccggagcaggaagcgtcgccccatccagccgtcggtgtgctcgccagctcggaggccctcggcgggccctggccagacccgttgtgatcttcagcctgtacacagatgtgtcgtaggcctgtgcttgcatctgcacgcccacgagtcacacacgcagtcagcatcctgtgtggccgcagacatcacctacactaggaccacacacgcgcatgcacgtgggcgcgcacacacaggcacacaaacggttgtcctcacacagattcagtcagatcatcctatgtggctgcagacattacctagacgaggtcccggacacccatgtgcaccccccaccccctcaaaacgcacataccctgggaggctttgggtccatcaagcctcagggccatgttctcactaatgccaatctcctccttttatgtactcaatacttaaatttggcagcttggagaagcctattcccagcttccagccagacaagcccagctctggccatctcatgggctcttccagggccccgcctcacacggctgagctaccacagtgcccagcacagagggggaccccagcctacctgcagagtgaaggagccctagagagctcaggcaacggcgggggaagtgggagcacctccctaagcagccagcgggcagggagcctgccaagcatttggggccaggtgggcctcgtaggcccccagtaggaggcaggcaggcagcagggacccatggtctgaggctgaggtcaaggtcaggtccttctccctcaggttcccgtctctgcccctgccgatatccagcctctcccccaggccaggtcacaccttcaacactaggggtattttggggtctgggctctgcactgcctgggtttgtctctgttatgggcaggcccaaggcagagacagagcttttccaccccttccctttctggtatcttcctatcctcccttcatctgaaaatatttctgttttattcttttaattttttttttttgagatgaagtcttgctctcgtcccccaggctggaatgcgatggcgcgatctcggctcactgcaacctctgcctcctgggttcaagagattctcttgcctcagcctcccaagtagctgggattacgggcacctgccaccatgcctggctaatttttgtatttttagtagagacggggtttcaccatgttggctaggctggtctcgaactcctgacctcaggtgatctgcccgcctcgacctcccaaagtgctgggattacaggtgtgaaccaccacacccggcatgttttaaatttttaattgtgataaaataaacataatgtaaaatttaccatcttagccattttgcagcgtatgttaggttttgtaaagtatttcacattgttgtgcaaccagtctccagaactctttccatcatcccaaactggagctctgtatccatctaacaacaactcccccttcccccttcctgtcccctggcaaccacattctactttctgtccataaatttgact

SEQ ID NO: 586959 - DNA, 4001 bp, Homo sapiens
gagtcatagatggcagggtcctgcacctggagagtcatccagtgccccctcggtgcctgggcccggagcccaccgcgcctgcagcaccaagggccattctgaggatctgaaaggagaggtcagaccctgagccccagcgtagattcaaggaggcctcgggaagctgcgaagaagccaaactccccggagtggaggtctgaggaagccaggacactgtgcagaaaaaagggcctaggatggaggcaaccagcatgggccagctggggctggggtggcacaaggcagggcgcaggtgggagcagtatgtgtgggaagcagacagagaccggccccagggtcctgcgggacaaagaacttgaaagacagagcagggaccccaggcagagcccaagccctgactggagaggccagttttgggggtgtggcaatggttggagggagagagctgggcattggaggcaaaggccagagggcaggtcaggatggtaactgggatggccctggagcccaggggcatggagggactccagaggtggcaggcaggtagtcagcctgctccatgactaccagctggcctaggcgcctccctcctggtccctgctagtgcctgctctgtcctgtcctgccctgcttccttccttgctggaagagcaggaaggcctccagctcgttgggtcaggacccaacttatgaaatgaagtccctgagcagacggtggggcatgggagctaagaagagagcagtgctgtaggagcggggtgtgggtgacagaggtggggcttgggagtggctcagggtctggttaagccatgtgagcaaaagaggctgctgcccatggatcaatcctgagcagggttgggaggaaaggggatgaggaaggaggaggctggagacagggagtgctggggatgggagagctggtggggtccgggagacagagtgggaggggaggatgaggagaggaagatgcggtaggggaggggctaccagtccagggtcgggggggaggtgccctgcaagaaggtgggggacagagggacaacctgaataggagaggggtatccagggaagacggtggccaagtggagacagagaaggtgccaggcaggggaatgatgggaaggtgctaggtaggggaaggagggagaggatgccaggcaggggaaggagggaaggtgccagacagggggagtaggaagcagagcatgccaggcaggagcaggttgagaaagtgctcggcaggggggaggtgacaggcaatgggaggaggtggtgccagacagggggaggaggggaaggtgccaggcaggagggtgccagacgagggaaggaggggagatgcaggtggagggaggataggaaggtactggagagggaaggaggggaagatgccaggcagcgatggggaggaggtggtgtcacagaggggctgaatgggagtctgccagtcagggaagaggtgcaaggaaggggtaggaggaagaggtacgaggttggggtgggggtggagggaggtgccaggcggggggacggaaagagtcaggagtggggggagatacctggaaaggaggaggggaggaagatgccaggaagggagaaggggatgccaggtagggaggaggggaagtgccaggtgaggagaaggtgccaggcaggagaaggaggggggatgcctggcagtgggagaagggaagccaggcagggggaggagggggaagccaggcagggggagaagggatgccaggcagggaggagaagggatgccaggcagggggaggagggggatgccaggcaggggggaggaggaggaggaggatgccaacagaggcgagcagagactgccaggcagggaaggcgggggcgccggcgcagcgcggccgggaggcgccttcgccaagggccgtgggggccgcgcggcgcgggtcgctcacctgctcccccgggaccccggcccggagcgcggccgcccgctccctgctcggcgctcggctcggcccggcgcctgcgccgctgcagcccggagcgggggaggcgcagggagcgtctgcaaagagcgaggagcttaataatgagttagggaccggagcaggaagcgtcgccccatccagccgtcggtgtgctcgccagctcggaggccctcggcgggccctggccagacccgttgtgatcttcagcctgtacacagatgtgtcgtaggcctgtgcttgcatctgcacgcccacgagtcacacacgcagtcagcatcctgtgtggccgcagacatcacctacactaggaccacacacgcgcatgcacgtgggcgcgcacacacaggcacacaaacggttgtcctcacacagattcagtcagatcatcctatgtggctgcagacattacctagacgaggtcccggacacccatgtgcaccccccaccccctcaaaacgcacataccctgggaggctttgggtccatcaagcctcagggccatgttctcactaatgccaatctcctccttttatgtactcaatacttaaatttggcagcttggagaagcctattcccagcttccagccagacaagcccagctctggccatctcatgggctcttccagggccccgcctcacacggctgagctaccacagtgcccagcacagagggggaccccagcctacctgcagagtgaaggagccctagagagctcaggcaacggcgggggaagtgggagcacctccctaagcagccagcgggcagggagcctgccaagcatttggggccaggtgggcctcgtaggcccccagtaggaggcaggcaggcagcagggacccatggtctgaggctgaggtcaaggtcaggtccttctccctcaggttcccgtctctgcccctgccgatatccagcctctcccccaggccaggtcacaccttcaacactaggggtattttggggtctgggctctgcactgcctgggtttgtctctgttatgggcaggcccaaggcagagacagagcttttccaccccttccctttctggtatcttcctatcctcccttcatctgaaaatatttctgttttattcttttaattttttttttttgagatgaagtcttgctctcgtcccccaggctggaatgcgatggcgcgatctcggctcactgcaacctctgcctcctgggttcaagagattctcttgcctcagcctcccaagtagctgggattacgggcacctgccaccatgcctggctaatttttgtatttttagtagagacggggtttcaccatgttggctaggctggtctcgaactcctgacctcaggtgatctgcccgcctcgacctcccaaagtgctgggattacaggtgtgaaccaccacacccggcatgttttaaatttttaattgtgataaaataaacataatgtaaaatttaccatcttagccattttgcagcgtatgttaggttttgtaaagtatttcacattgttgtgcaaccagtctccagaactctttccatcatcccaaactggagctctgtatccatctaacaacaactcccccttcccccttcctgtcccctggcaaccacattctactttctgtccataaatttgactactccatgtacctcatataatgcctttgtggctggcttatttcacttcacacaatgtcttcaaggttcatccacgttgtaacacgagtcaggattttcttcctttttaaggccgaaatgtattccactgtgtgtatacacccctgttgttgttattgtattagagatgggatcttactctgtcgcccatgctggagtgcagtggcacgatctaggctcactgcagccttggactcctgggctaaagcaatcctctagcctcagcctcctaagtagtgggactacaggtgcacaccaccacaccaggctagtttttgtattttttgtagtgatgggctttcgccatgttgccaagtctggtctcgaactcttgagctcaggcgatccacccagctcggcctcccgaagtgct

SEQ ID NO: 586960 - DNA, 4001 bp, Homo sapiens
gggctgacctcatctgggccatcaaaggaagggctccctaagcgtggcctgtgggccgagagtagggaattccaagaccaacagcctatgcaaagtctctgaagccggagagaaggtgcacaaagagacggaaacccaaaaaaggccaacatggccagcccacaggcagccaagggggccagtgagagcagctaaggaaggaaaggtaggcaaggttccgctctggcttgcaggctctgtgcactaatgtgtttgaccctcattcaaggagcatgaattaactggcatttgcttcaatggctatgtacagcattctgcctcagttccctgggccctgaaagaaatggcagttggctgggcacagtggctcacacctgtaatcccagcaatttgagaggccaaggcgggcggatcccttgagcccaggcgtttgagaccagcctgggcaacatggcgaaaccctgtctctactaaaaatacagagattagccaggcatggtgatgcctgcctacggtccgagctacttgggaggctgaggcgggaggatcacttgagcctcagagatggaggctgcagtcagctgtgatcacaccactgtactccagcctgtgtgacaaagtaagaccctgtcaaaaaaaaaaaaaaaaaaggtaatagctctttacctttaatagctcatggaatgactctcaaaccaagaaatttttacttaatccttttacacgaaacaaactggaaagaacacagaaacttaatgatttctacactagagtctaatgaggaataaggctttccaaggaaaaacaggcaaagcaccagaggtgaggtgcaaagggctgtgggcgctgaaggagcgatggggaagcaggaggcagggtccttctgatccaagcctcaaagaaaacggatcaagacagggaaggcgcaaggggcttccagaagaacgcgggtttagtgtgggatgcagggtttttgttcgttttgtttgttgttgtttagcagagaagatatggcagagaaagctcgaggttgaggcccctttagcaagggctctgtgcgcccagctcaagcgtgcagtacttagtttagcagacaatgatgcctccctgaggacttggggcaggggctggaaggtcacagcccttctggaaagagcagcgagggttggaaggaggtcgtaagtgactggatgagggctgagaacaggaatgctgttgacagcaaggtggtggtaccaggctcactctctgcttcctgagtctgcagagcagtggagaatcccgcgcgggcacccagggtggctacggcagctaacagctcggacccgtcactgtgggcatggcctggcgccctgacgtgccacaccacggtgccaccctccctttattttccacatcaaccgtctgggtgtgggggctgctcaacaggaccacgacctaaaacctggaaagacggctggcctgactccgcggctgctgcgcccccagcaggcgcggaccgccgggcaccccttgtccctccatcttttcgccacgcgttgaggtcgaccccagggagaggcggtgacctcggcgcccgcgcctctccgggacagcctggggctccacggcgcgcgccctggccccgggtactttagggagacggggattaccatggcgattctcagccgagcaggcaggcgtggtggactctcccgatcccgaagcccttagcatccaccggggccgctgcccccagcgcccgttcccctagcacccccggccccttctcggccctcctcagggaaccgccacgggcccagcctcactacgcctccccgccacgcctcgctgggaggagcgcggccggctcgggaggcagccagccgcggagccgcctggacgcgaggcacctgcttgccccacgcggcacctaggccgccgcagctgtgggcgctgggccggcgtgcgcctcgggggcggggccgcgcgcacaatcaccgggcgtggggcagggcctcgccgtggttaccgttgccagggcaaagcggcagcgcgcggagggtgagcggagcggggttccgggcttgcgcgcgcgggatgggccgtcacctagtacgaggccgaccgcggcctccagcgcccggaaacccagttcggcgctttagcgtctgggtttgggctgccggagcggcgggcgcggggcgagggggcgggcgcggggcgagggggcgggcgcggggcgagggggcgggcgcgggcggcgctcccactggggtggcactggggtgagagcgcaggctaggcccgctcactcggccaacctgggagagatcatcggagaagctcttttgggaaacgagcataaggactgtgacggtgaagggagaatatcatgggaaatgtttgcaaaagagccggataaagagagtaagggcccgagagactaaaggggtggggagggagttcatgtgcaggtaggattgggcgagaaaggtacagtaggtacagttttgcctccaaccttgccagttccagcctccctccctgcaggtgaagtctacacttcgggtggtacgactcattcttttttatgactggtcattccttttttttttttttgagaccgagtctctctctgtcgcccaggttggagtgcagtggcgccatctcggttcactgcaacctccgcctcccaagtttaaaccattctcctgcctcagcctcttgagtagctgggattacagatgcgtaccactatgcccggctaatttttgtatttttagtagagatggggtttcgccatgttggtcacgctggtctcgaacttctgacctcaggtgatctgcccgcctcagcctcccaaagtgctgggattacagacgtgagccactgcccggcctatcattcctttttattcaacagttattgagcatctgccacgtgcctgacactcttccaggccctggaaattgagctctgaatgaggcaaagtccttgttcttttaaggggtgatttgggggaggtggtcgtggctgaaatggagggcctggcagacattaaaagtgatagggacagtatggcatattgcattaaattgatgtgaccactgggtgctcttttagattggtgactggggaaggcctctctgaggaggtgacgttaaaacagatctggatgacaaggagcagtcaattatgccaaaattagggacagggggaggaggctagaccaagaagcaggagtagggtcctggaaggctctgcaaggatgtggtgttttgtttgctttctcttgaaagacaaactggcttccaaagaggactgtttatgttctaggttctcttacatatgctttccctaatccttcattaacagagcaaacccaacttccagctacttttaatatgtctgtgagtttttcttatgagtccatatgccctggatatggcaaattctcctgccctccacctgcactttcttctcttcttgcgcctgtcttcatccctggatggggctggcccaccccagccgcttacacttctctgggttatctcagctctcccaaggttacccctatgggatcactcccaaatctgttccagccctgcttttcctgagctccagatcagagatccagagccctgctacaaggttgttttgttttctttcttttcttttcttttctttttcttttcttttcttttttttttttttttgagatggagtcttgctctgttgcccaggctggagtgcaatggcacgatcactgctcactgcaacctctgccccttgggttcaagcaattctcctgcctcagcctcccaagtagctgggattacaaagcatgcgctatcacgcccggctaatttttgtatttttagtagagacaggggccaggctggtcttgaactcctgacctcaggtgatccgcctgcctcggcctcccactgggattacaggcgtgagccactgctctggcctcctgctacaagttttaaaactcagctgtcttgaaagta

SEQ ID NO: 586961 - DNA, 4001 bp, Homo sapiens
gcaaacatcgtaaaagaagtgtatatgcaaaaccacatccaccttacactatggtaatctgcagagttttcaaagccactgttgtttacacatgatttctgtctaatgtgctgtgctgactttagaacctgatccccaaaaaggatgcagctcttcctcatgggtaccatggataccatcctccaagttcctcctccagcatctgcaccaagccaggaaccttatggccttgtccaacatctgacaaaggccgagaacttgtcaatgacaggcggcctacatacactccctacattagggtcctcaccagccccctgggcagagctaagagatggggtaccccagccctgtcaaaagagggaggctcccagttctgctcctggctcctggttttcttttctttttcccaggacagttttagaatcatactggctagaagcgagggctgataaggccagctcccttcctcagcaccctccaagcctcatctagaaaagtgacaggtgggggagagtatactccacactgctaaggaaggacatttgggttcagtgtgcagtttttcagactctgccactccagtgagggggctttgggacttcaaaccaccatggaagtgtccacaggctctcaacactccagacttaagcgtccttccacagccctgaccagcctcggtaaccaaatttccaaagaaaacacaaataactgttagaaaggtcttattccttcataacctcctgcatgcgtcagagggccggtttttcagatgcacaaactgaatgaaatctcccgtgaaagccagacaagatcacagttctctaggcttcattcctgtctcccaaatcaagatttccagaactttctggttaccttttaataattcatcactagggaggtttcttttccttcaaaacttcactcgatcatgtccccctacccttccctccaaatgtctaaacctcttcctccgtcatccctccccttttcctctccaactccaatttccccagggtcttcaacacctccttgaatcccccggcaccctgcttccagaataggtggagcatctcctcttcttacaaaatgtcttttcccgtggcttagagccacctcctcacgggcccctcatccccgccatcctttgctcacccaccagctcaggccctttgtgacccgcttcgtcaacttccttgccctccttttcccatgaccgagggtcccatcctgcacgtaacctgcccccaaagtttcgggatctgtccctccaactctcccgggtgctgtccccgccctctccaaaactcaggcctgagcctgttctttccaagggtgcccccatcttaccgcggcacctcccgccccccagacccggctccgccgcacttacccgaccagagcacgagcttgccgtgcgcttcctcctgggagtccgagtctccggccagcagtgtggaggtggccccgtagggcagcaccgagcccaggcacacgttgtagcgcagcggctcgcagggggcagcccggccgcagtggctcagcggcggcggagggccagtcaccgccgcgctcctcctcgcgctcccgcccgcgctccgaggcccaggcccggtcgcgttcccgctcgaggccgccccccggcccgggtcccccagcagcagcagcagcagcagccccaggagcgggagctccggcccccgcgctgggcgggcagcggccatggccaaccccgccaactcagcaaaagccccggcgcccccgcctgctcctcggagccccccggccacacgcacgacctcggcggccgcggaggcggctcaggcgacctgtgcgcccagagaatccgggcccgggcccccccggacgctccgcgcgccccggcccctcggcgcccaacttcgcaaactttggaacccggggcccatgttgggctgcggaggcccggaacgggatgcacgactccccaagccctagcctcgcaatccaagttgtcttcagccctaggagacccctgggcccccaatccccagccccattccctctcccaccattaaagccacctccccgccccgcgagggaggccagacgcgggccgggggtgcgagtgcagctccggctccgcccccgcgccagcccgcggcccagcagccaccttcgccccagcgcgccgcagccccccgaactctccccgccggcgacccggctcctttgttgctctagctcgctgggctctctggaatgcacgggcctcgcggagccaagcccggcccccctgcgccgaggctgggggagggactggacgaaggagcggagaggtggggaggggaggcgagagaggaagagcgcgagcgtcagcgtccctggcgcctggaggggcccgggctagggggatctggtgaccccgcctgccgccgccccgcgcccgggggaaagagatgagtggaaatcgtgggccggacctgcaaggagagactcggcgggcaccttgcttggtctgaggtcgtctgcaggaagcggacttttctcctggctcaggatgggaaagacaggggatgcctgaagtcaacggggacttctgttccatctctgccccgttctccaggcccgccagtttttcctgctttggttagattttccaacgtatcccggggccccatggagaagaacctgggtttggggtttgcgcttctccaaatccttccagctcgggacctttgagagagacgacctcagagtcactcacggcagctgctctggctgctgttacctgcgggaacaggtgtctgggaaataaacttgccaacatcaagcctttactgctacaaatatgtgaagtctgaactgtggttcccagggactggccttggttatgtgagaaggaaaccagtccttctttgatggccctgctgctcatctgctctgggaggtttctgctgctcctcttccccactctgctcattttgcctttcctcactcctttgagcatcacacttttggtcaccacacttaatttcccacttcagcagtttacacctgcacaaccaagtataacccagcataaccacaaggctccaaacaggagagtagacttgcactgagcaactttttccttgttgctgatcgggctgcacaccagggtgggttttcctttcttacccctggaagacttgctcatggcctagcggtagtggactagttctgttactttggacagtttaagtgcatattagttattgcacttcaactatatcaattggagagagagagagaatttaattcaatttagcaagtctttctgaaattccagcatgtacatagcacagagacatcctggaggaacctgtagacttccattttcctgtggatacatggcttgctctcaggaaacatagcatgacagaacagcaacgttccctccttcaggtcagggaccttatctcattctcttagtgttcacaaaacatctagttcacttgagcatacatagtaatcacttgataaataagctgccaaaatgagatgtaccgtgagtatgctataggaataggggacagaggtcagtgtggatagaagtggaggaggtgggttttgaatccaggactaaagtgtgagtaggaggagttagaataaggacatagataagtagggaaactgattggtaagaagcctcaaataacacacagaattaagggtcaattctcttgatagtaaggaaatctcaaagttttgactaggggaatgatattaatctttactggttaatattaggtgatatggtttggatctgcatccccacccaatctcatgttgaattgtaatcctcagtgttggaggtgaggcctggtgggaggtaactggatcacggaggcagtttctcatgaatggtttagcaccatcctcctcgtgctgctctcacgataatgagtgagttctcacgaggattgtttaaagggtttggcacctccccgcttcttcctcctgctcctgccatgtaagatgtc

SEQ ID NO: 586962 - DNA, 4001 bp, Homo sapiens
ggttggcatcacatccgcgccaccaagtcgcaggcccgcggcagagcgttgcgctcacccttgaaggtggcactacagagccacccaggaaacacggacttttcattgaagacaaaatgaatcaaggagcctgcgtgtgggcagcttccaaagcctccagtgagtgtgggagtagggatcagagcctcacggcgctctgggttgctgagtgtgggggtgatggtgaaacaaaatgcagaaaaggtaaaaattgaagaagcagagttaaaagtagctagcggtctggcctaagagacaggaagtggcccagactgagactgaagagggctggaccagggggaagtgaagagagcaggactgggagcagctacaagataggattgaggaatttcaggctgaaggaaagaaagggtggaggcctcgccagacagcagcgagggggcggggctaggcaggaatgagggcggggcttgaaagtgaggggcggggctaggggaagaagggaggaggacggtgtgggggggtgagggagaaacgaaagaggatgggggagtgagaagagggtgggtgggggcaggaggggagaagcaagggggcaagtggaaggggaggtagcaaaatagcttggaagtggtgggaaagaccaggaggatgaggggagggagcaggtgggagggaaaacaggaaagcaagagagatgatgggaaagtggtgagaagtgagggatgggaccaggggaacagaggcaaggccaggagggaaaagcgagggggcaggtgggcggagaggatgggaagcgaggagaaggagggagggggtaaaaacggcggaggagaaaaaaaggagagaagcaagggggcgggaccaggaagaagtgagggccgatgctaggaaagaagtgaggaggcgggaccaggaagaagtgagggcccaggctaggaaagaagtgaggaggcgggaccagagagaagcgagggagctggacgcagggagaagcgagggggcggggacagaaagttaggaggcgggagcagagaggagcgagggggtggggccagagagatgggcggggtcaggtttggggaggaaaggtggggaagagaaaggaccacagggatggaggtgaaaggcaagggggcggggcctggggggagaagcgaggggtcaggtgctagggagaggaagggaagcgagaggcaaggggccgagccggggagaggtgaggggaaagggcctggaaggagatgcaaggggcggggccaggaaaagagaagcgaggggcggggccagggaaggagatgcaaggggcgtggccatgaatggaaatgagaggggcggggccaggacggagatgcgagggggcaggtgcgggggaacgggagggaacgcgagaccgagggggcgcgagcggccagggggcggggccgggcaacggcgagggggcggggccaggagggagaagcgaggggcgcacgccgaagggggtgacgaggtcctgggacaacggccggcgtgggggagggccgcttccaagggcgccctgcggggaattccggggcgggcgagggggcgccggggcgcgggtgggcctcccgccggccgtacctgtcagacggatcttgatgctggagccgttcctgcgtgtcccggggttcgacatctcccgccaacgatcgggcagccgcggatccagcgccaccgccccccagcccggcccggcccggccccgccgccgccgcctcaaggttacggctccgggctgggcgccggggtccgagccgggacacaaactccgcggcccaggcgtccgggcggcaggcggatggtcgagccgggagatcggcgcttgctgcggcgctctgaccctcgctgcttccagccgagcccagtcccgagccgccgccgcctccgccgccgcctccgccgcctccaccacctcagagccggacgcccgccgccctcgccgcttccgccgctgccgccgcctctccgagccgcgcgcgcgcccgccgccgtgccggcccggccctgcgcgcccccgcgcctgcgtgcgtgcgcgcccccgccacgtacgctggggcggggcggggtgcgctgctacgtcgcccgcacgcctgcctcgggcgcgcggggcccggatcccgcgggttggggtcttcacccttcctgtggtcggtgggtgggagggtctggccccgagcccgggaagggagagcagagctggccccgggacccagcgcgcggtcgccctctgtcttgacccctgtctctgcgaggctctgggctcctgagtgactgaagagtggtttgcatgaaaccgtgggctgtgtccacaccaagctccttgcacacaggcgtgcaataccagtttttttcagttaagagctttcgatcgtgcaagttcaagggagggacttctcaaagagacaaagcccttaggtgtgttctgtgcaacgggtgtgctccactgacccataacaaagttgccagaatcgcagaagtgccatatacggacaaggaaaacgagatgagagggagggataaagttgagaggcggatgtttgttattatccattctgcatacaattttaccaaacaagaaagtggcattgtggtttgtgttcccatgtcttctgctaaatttccccttctcccggggttgcaggttagaaccaaaagctcatggctgggtacggtggctgtagcctgtaatcccagcactttgggaggccgaggcgggcggatcacttgagcccaggactttgaggccagcctgggcaacatagggagactccatctctacaaaaaatacaaaaattagctgggcatggtggtgcgcgcctgtagtcccaggtactgggaggctgaggtgggaggatcacttgagccccagagttcatggctgcagtgagctatgatcaggccactgcactacagcctgggtgacagagctagacactgtctcaaaacacacacacacacacacacacacacacacagaaaaagctcattatgcgctttctccagcaaacaaactcctctctgttagcatgttatagaaataaactggtattattagaaagagggaaaactaggtttatcaaacttgttttttacccactaccttgttgttgttgttgttgttttttgagacagggtctcactctgtcacccaggctggagtgcagtggcacggtcttggctcactgcaacctccacctcccaggttcaagtgattctcgtgtctcagcctcctgtatagctgggattacaggcgttagccaccacacccagctaatttttgtatttttggtagagatggggtttcgctgttttggccaggctggtctcaaacttctgagctcaggtgatctgcccgcttcagcctcccaaagtgctgggatttcaggcctaagccaccgctcccagaccccactacccattttcatgtacaagttcttttttatttttatttgattcttcatcaatcaacttgaacaaattcttttaatactgtgtgtgtgtgtgtgtgtgtgtgtgtcccaaggaaagtaggctctgggccattgctaccatcccctgcagccttgtgcctgtcctaaggtcacagtcttcggaacagagccttctacctagagcgcctagacatacctgcctgcctgcccgcctgcctgcctgcctgcctgcctcggatgaccctagtgaaagcagagtctctcctgggcaggattcaaggcatcacatctgtcaaataaaaggatggtcctaggtcatttctatggcaccttgcggctctttcagttatcctcaagaaagacccaagaatataagcaatgtttaagcaatagcagtagagccacaatccagctgtttccatttgtagatgattgtcacagagagtgaatgcctgggtctgaattaatccatccagtctctaatgctcccaagtaatccccattcttctgccaatcccgttagtatttcccccctattcaaagagt

SEQ ID NO: 586963 - DNA, 4001 bp, Homo sapiens
ggaaacaaaactatgttcagcctcattctattcccattccacaaatgagagagacctttaagaacaatttaaacctcagcaaggagaaatctcagaaagatccactctttcttactgccaaacccaacaccggagagccaagagatgtttttgttcctatggtgaagagaagatcagtgcaaatgaaaaagctaacgaaagaagagccactttaggataatcctttcatgggtcaggtcagtatttcagaggaaaaatatatgcggatcttggaaattctcttctcattcagtttcagatcagttctgaccctccattacacataaacaaaaggaaaaggcagtactgaaaatcccaagaatcttggctggtggcagactattaccttaagaaatgagcacatgggaattgggcgaggggatcttaaaatcagctttacacacacataagctgcagaacattttaatcttgtgaaagataacagggtaataaaatagaattttttttaaactgggtcttgctatgttgcccaggctgatctccaactcctggcctcaagcaatcctcccacctcggcctcctaagtgctgggattaccaccatgagccaccgcaccaggcctaaaatagaatttttcaaaactttctacaacagcaaaacttgtggagccttgggagaaagtatcacaaaagatatttgctgttgcagatacaaatgtcagaactgcagtatgaaacgacatctagaagtttacagtcatcataaaccagaaaattggtaaaaccaagaaatgtcaggttccaagatttggaagggttttggggaggacaactgggggcaagtgataaactgaatttatattatcaaattatcatggagctaggagtaaattgtaaaaataaactttgcaggttcaaattcaaaattgaagaattttcaaaaagttgagggtatataaaatcaggcagaatctatagtgctatgagcactagaccaggaatccgaacacttgggctcttgctatggctccaacccaaaccaccatgtgaccttaagcaagtcacttgccttcttcaagcctatctccttatctttaagggacgggagaacaatgatgattactaagattcttgccggcctaaccttttagaagtcaaaagtacacaaagatcaggagctttcaggtcgacacaagaggtggagggaaagagaggaaaagagggccacagagtgagaaaacttgggagtcaagtaacagcgtttgtgggaacagaaaagtttcatgatggccaagtactagtagagaagagccgatgtcaggatctcgaaaaactactaactactcagcatatgtcaaaatgaacagaaagacgggggatgggaggacagatatcaacgaattgtctctgttaatcaatcagtaatcgatctgtcctggtaaacagacaggagatccgaatgccgcaacctcggaaatcactgtgacccctgatgtcaaggtgtccgggaggcaaggaacaaggggactccgtgtctgcttccgtctagtgagaggattcggagaatcgacgaaaagtgaggaagggggcagaggaaaggggatctgggacatggagcaggctggcggaaggtggagtcaatgcctgactcccgcccgaaggcaggcagaggggtcggtgtccggggcccgttctcaccatcttgatgatgccccgctgcacggtggggaccgcgggtcccccggaggagccgccgctctgcgcggaggacgccatgtgtggagatgcaaaggcaacgagtggagcggctggccggactggaggtgtcaatgtgggtgtcggtgttggtgaaagggagtcgaggcgaggggcaggctggctaccagctgcggacggtggacgggacggactcgccgggcgctcacaggagcagcagcgggacacggagcgaaagagacgcgatctccgccgccgccacacgttctactcgccgcgcaagcgtgccagagcgccaccgccctccgcccaattagcgcccagagcccgccggccctcaggccaataggcaccctgctcgcggagccccgcctcttggtccccaaaacggtggtgagttccaggaagcgctgaaagagttgatttgcaaggatgggctaaatatggggcgggacttccggggcagccggagtaggtaatgtcgggaggtgtagtgggaaggaaaggacacgtcagcatctggccgcggggcgcggggggccatgggagccccaggggcggagccagccgcgccctcccgcctgacctcgcccatgacgtccttccccgctggcctcaggggcgcacacttgtatacccacctaggtgggcgccgctgtacccgggaatgcggcctgggagggtggagccacgcaggcagagtcctggaggaatctccgtacccgctccactcgacttccgacattttaccttggctaaaagtatggagagaacttggaaaatcagagctttgtggaacctcctaccgatgtgggctttgacctgccacgcggccgcgcgccctttttgtagtcagagagtgtgcctcgcccttgtttgtgtcgctggggtctagcacttgtgaggcgttccattaatgtttgttggtgggaggaataaatgtctcagaggaaggacatgccacgtatacaggggagagtgaccctcgttcttcggtctcttcccagctgctcccgtgacgttagggaaaaggctcgcttcacgctctcacccgacccagtgtgaagcgcctccagccaccggataccttccctagccccagtaaaaaggtcggggaaggaacgggaaagccaaggcctacaaatatttaagtgactgtttagcgagaactaatattcgttgagtgcccactatgtggaaccaaggaccttgcatgtgttatgtcatttaatcgtaaaacttggctctacactgaagacagtacttcccttgcagttctttttgtttctttggttttgtggcttttttgagacaaagtctcgctctgtcgctcaggctggagtgcgggggcacgatcacggctcactgcagccttgacactcccaggctcaagcgatcctcctgcctcagtctccggtgtagctggagctggtaccacgggtccgcgctaccacgcccagctaattttttttttgtagagctgagatttcactatgttgcccaggctggtctcctgggctcaagctatactcctacctcggcctcctaaagtgctggtattacatgcattaaccacagtgcatggccccttgctctcttaaaagattgtaagtttattctcccacactaaacatatcccagggttaagttttgaggtcaccttcttagatccctaatttgccacccttttccaaaaaaaaaaaaaaaaaaaaaaaaaacctctgtggaagttggttccatcagattatacccctctctatctcgtggctttttatctaccgtacccctatttctaccgtgtcattcattgaaattgttaacacttggtgcacggtcttcagccaataatcctgaaatacttcaatatctacgagcatgacttatcccataccctgacctctttgctccttgatctcatcttcagtaaacttgacctctgcaccaatttaggacgttctccagacagataaaacaccataacttcataggtacgattgtaaactcaaacactttgtctttgatcataactgctgtcctctctcccttctcattcagttaattatcttatatcttgtattagttacataacaatttgccccaaaacttaaatactaaagaaaacaataagcatttatctcacagtttttgtgggtaaggaatctggggtgggtgcctgccttttcctccaggtcttctcttataaagctgcagtcaaggtgtcaaggggagttgggaaggggactgtggtctcatctgaaggtcctcctctgactgaaggtagattgc

SEQ ID NO: 586964 - DNA, 4001 bp, Homo sapiens
gttactctttgattaacatacttttattttttttaatgaacgtgcttatttctattactttaggttacctaactcaggggtccttcccattagtaaaataagaggaagtgtgtaccagcctggaggggagactccctggtggggcacagtgtcagcctgagcaagtcccactgtcaacactgatgtcctccccagttaaatggtaatcaaaagtgagaatgaaatggactggtagaagaaacaggacgaccagttgagtccatgctaatcactgatatttcacatcttcacacagtttcttctaaatgtattttatttttgtatttttattaaaaactgccctatcagtcaatctcaagtctacccttcctttaaaaaatagtaataaaaggccgagcgcagtggctcacccctgtaatcctagcactttgggaggccgaggcaggtggattgcttgagctcaggacttccagacctgcctggggcaacatggcaaaaccctgtctctacaaaaaaaataccgaagttagccaggggtgtggtggcccgcacctgtggtctcagctactagggaggctgaggtgggaggatcactgaagcctgggaggtggagtttgcagtgagccaagatcgcaccactgcaatccagcctgggtgacagaataataccttgtctcaaaagaaaaagaaaaaagtaaataatattaagaataatgaaggtccagctatgtacctaccttaggaataggcatcactggaagtgatggcagaggcaaggcaggagtccctgacctcacctccattctctcactgaggagcccctgcagaagctggtcaactatccaagcagtccctgcttcttcctggcgaaggcctcagcctccagcccagccccctcctgggagaggagggggagcttatgcaatccaaacccagttcccaggccccagaggtggacataactccggggtggaagtcagaagcctgccaggttgtaggcctggttctgctcccatctggctgaatgatcctggtcccaacactcagcgtccctcggccttagcctccctgtctgtaaaatgaaaggtttgatggagatcatgtgcaagcctcctccccgttctaattttctgataccatcatttttaacgtgtcttgtagagatagaagcccttcctttcagcaggacatgttgctccccattccgtgacgatccccctcaataatccgtgtaatttgagaaaagtatgatgcatcggaactgaaaaacaggctgttgctttcctggtcaccaaatctgataatcagtcaattatatggattttcccctgggccttctccctcaatcccacaatcccacgaataaacctgcctacccctcccaattcctcaactcaaggctacccgttaatgaatgaataaaaaaataaataaataaattttaaaaaccacctccccacccccttctacccggcctggtgtaaggtgccacagcacttcttccgtaatctagaatccacctctgccccaccctctccccggggtgtctttttagccaagaatccctggatcgacgcgctccatctccccgctctaccgcgctgatcatttctccctgcccggcacacctcggctgaaaaggaggcggctcctctgctccaagcccaagggacccaaacctctttccagcccgcaagggtgcgggcacctgggaacagcgggaagggcccgcgcctctggaaagaagggccgccgtccccacctgggcggtgcaggggaggccccctcagcgggtctcttgtcacttacgggcggctcctccgggcagaacagagcagggccgggccgagccgggcttgcgggccgcggagtttgctgactcaaaggcgcgcggcggcagcggcggcggcgagcgcccaggagcgcacacgagcgcagccccgcgctccccgcgctccccgcgctccccgcgcacgtagcggccccgcgcccgcgctcagcgccagccgtccgcctgtgggcgccgcgcctagtgcttccgccgcctccgcgcagcccagcccaggtgcgcccccaccctgcagagctagcctcctgcttcctgaaattgagttagggaggaaatgcccccattagtccggacgttgaggctggaggtgctccagcggcacccttcggaattcgccacctgagtcaccttaagcttcctaaccctgaccccacagttatggggaggattgccgatggggaggaggacggataaataacgtgataaacaagaatggcagaatgttcatagcatctaggtggtgggctatggtgtttatataaaattatttcagtttttgtctatgtttgaaatgtctcaataaaacatttggggggaaagctaatgagatctgccaagggacctgactgaggaaagcatttcccaaatggcacctgaggctgggtccccacacctgtttgcatgggaaaccacaatcatcacttaaactgctaataagtgactgaatgacacagaataataagcatagcctaatatttcatttttcaagcatgaattttcccattagatacagcttgtcgctgatcatcctccagggaccattccaggcccacctgaaaacgcatctgttcaccacacctacattaactccctaacaaaacgtataaatatacaatgttgtgtcttaacatcttggatcttgaagttgtattgctgaaccctcaatcactggtatttaatttcctaaaattgcacccaagtcatgacacacaagtgaatgcaaccatgatcacttttgaaaatcaaattaagctggtgtggtggctcacgcttgtaatcccagcactctgggaggccgaggcgggtggattacaaggtcaggagatggagaccatcctggctgacatggtgaaatgccgtctctactaaaaatacaaaaacttagctgggcgtggtggcgcgcgcctgtaatcccagctactcgggaggctgaggcaggagaatagcttgaacccgggaggcagaggttgcagtgagccgagatcatgccattgcactccagcctgggcgacagagcaagattctgtctcaaaaaaaaaagaaagaaaatcaaattaaagtgtattttttatattcttgtccctatgctccgcaaagaaaaacattgagtagaaaacaaaatgcagcatgtatctaagatcctaagagattctgtaaaattaaaatctttctgaacttattgtcaagagcatgactttacagctgtagacaaagcagcaacaaacccttggagagtctactgaaagtcatttgaatatctgttagaattttgaccctattaagactggtaacttgggccgggcgcggtggctcacgcctgtaatcccagcactttgggaggccgaggcgggcggatcacgaggtcaggagatcgagaccatcccggctaaaacggtgaaaccccgtctctactaaaaatacaaaaaattagccgggcgtagtggcgggcgcctgtagtcccagctacttgggaggctgaggcaggagaatggcgtgaacccgggaggcggagcttgcagtgagccgagatcccgccactgcactccagcctgggcgacagagcgagactccgtctcaaaaaaaaaaaaaaaaaaaaaaaaaagactggtaacttgcaacctgaatccaggaaacttaagtgatggtcaccttttttaggttgtggcatttttgttataccatcagtgggattgggtaaaaactgggactctacggtggttaagaaaccttgcctactggctgggctggtggctcacgcctgtaatcccagcactttgggaggccgaggcaggtggatcatcaggagcttgagacccgcctggccaacatggtgaaagccccatctctactaaaatacaaaaattagccggatatggtggtgcgtgcctgtaatcccagcttcttgggaggctgagacaggagaatcacttgc

SEQ ID NO: 586965 - DNA, 4001 bp, Homo sapiens
ccataagtccttcatttgcagggcaggttcaggggagtatttatgatggctacccagctctagggtctactaatttaaaattccaagtaaatgttaagatcccagagttgtgtgacatcatctcccttgaggttaatttaaacaagttaaagaccagcttctctacctccaaagctctatgggttaacaactaagagaagccaaccagaactccctagctctgccatccacttttaattgtatgacaggtggaagtctcttcaagattagaggatactgagatcactaactgattaagttcctctaataaatctatttgcttgtttttgctgtccaccaagccaaggcttatccattgtcaatttattagcatttcagaaaagtgccaggacaccatcaaatagtatttgtggaacccatcatttctggctccagatggagatttctgaatttacatcaggctatttatagagcagagcagaatctatactttcattaattcctgggaataattaaatttcatgcctatcatgaagtgtgtgataaggacgcacaatttttttacagaaagttagaaggcaactaaaactatttcattttacttcaaatgcttattcttatatagtcataattttccacacagaatgcaactctagtgtgagcttataagtaaaaccaaaacagaatcaaaatacatggcatatcctggaatggctttacaacacaatcaaaaaagcagttctgagtttttcttttattttcaaagttggggaaacttcaaagaaaaaagagaagaaaggagaatttaaaaaaagaaaagttctacagctggtgtttgggtgtccaatataccaagttagctatttacaatgggaagattaaataatggctaaattttacttcacttgtgctatgaagtcacggatacaatctgggtcaattgctatgctccccagttgaactaatttagtttgcatctgatatgcatctggtttagatgcaaagagtattatcctcaaaatcggggccaataaactacagcctgagggccaaatctggtctgacacctgtctttgcacataaagttttattggaatacaattatgctcattcatttatgcactgtctgtggctgcttttcacctgcaacagcagaaatgagtagtctcgacagaaactgtatggcccacaaactgaagatatttactacctttacagagaagtttgcttacccttgtttaagatggtcacagaaggccacacaccacacaacattttcaagagattgtgatacagtagcatccacgcaaggcacatcatttctagttgcttactcgttacattaattactcagattctagataaattaatcacaataattgcacatatccatttcccaccttctgattctatatataaaacaccacacatctcttttccaaagaactctatatcctctcaaacttgaaggttatcaggcattatattatccagaaatatgctatagcagatcataagaaatgccattaatgagctataagtactctttacccatgcattttagatgcgtgcacatcttcacatgtgaaggcaataaacattaaaatgttaatattaacaaaggaacaataagggattcaaataagtaatttttcaactttaggaaccatcttactagttcatgtaagataaaagcattagttgtaatcattcaaattcagttatttgaatgagaaaaacttttacaagtgtcaactttatcccataaaatgtatcccataaaagtccctcaaaattactatttctactgactacatacttacatgaatacatatctcatagtcaatgtaagaatgccagaagtcctccttctgaatcctaggatctcgaacccagacacttacaaattcctgtaatggcatcataaacaaagaaatattcttcagaactgcaagtaggactggaaagaactgaacaaaacgactgcactaaaacaaaactgaaatgagctttaaccaatgtggtacttgtaatcctttaaaaaacaagaagtaaagttaatgaatcaggcaccacgagcaaatctagaacacacttttgccacataatggaatttttaaaataatgcaacactgaggtgggagcacttctggatagttttactggttatctgaagacaaagtatactgtaaaactgatttttaatttttaatcttaaataattggttcaggtttttttcaaatttaaaaagtgatcatttcttactttcttcatctctctaaactgaaacaatgggcccttctgggtaaggtgcttcctaggacacaaataagaaaggcaccaggccaagcagggtggctcacacctgtaatcccagcactttggaaggatctcttgagcccaggagtttgagaccagcctaggcaacatggtgaaaccccatctctacaaaaaatacaaaattagccaggcgcagtgtggtgcatgcctgtagtcccagctactcaggaggctgaggagggtggatcacttgagcccaggaggtcaaggctacagtgagccttgattgtgccactgcactccagcctgggcaaaagagcgagaccctgtatcaaaagaagaaaaagaaaggacaccaaagctcatgggaaaagtaagcaaagagggttgaagttgactttgtgcatgcatcccagccacatgagaataagcgataataacttattaatagaaagaggaacaccttcttttacataatacttttctatttttaaaatacatttcccctacattaaatcatttcatcttcataatacctttgtgttatacatagaagttagggatattaaaaatcatatacagtagataattttgttcttttataaagataataagaatagaaaacatggggcaaaatttaaaacaataggccgggcgcagtggcttacgcctgtaatcccagcactttgggaggccgaggcgggcagatcacaaggtcaagagattgagcccatcctggccaacatggtgaaacactgtctctactaaaactacaaaaatcagctgggcgtggtggcgtgtgcctgtagtcccagctacttgtgaggcaggagaatcgctttaactcaggaagcggtggttgcagtgagccgagatcgcatcactgcactccagcctggcgacagagcaagtctccgtctcaaaaaaaaaaaaaattaaaacaatactttttaacaggtgctctttactaaataggtttagtttaaaaatttgaaaatgtacagcaaaaaactatcatgtttcacataagtttttaagtataacttatttactcagtgatcataaacttgctaactgagtttgattttaaatattagagctttttgataagattgggagttcaatgctggaattcaggcatttcttattgcttgttggggcacatctgagaggcaggctatgaacgcttgagagcagaagaaaaagagagatcgggggctttctggacaaagcacctccattgaatcatgcagataattaaatgagactcttcatcatagaggattttttttaatcaaaaaaatacaccacactctgaaaataacttttgcccctatcaagtttcaccttctagggcaacactttgtccttgcactggagacttctgtcccactacttgtctttagtagacagggattatgaattactgttccaaaaagtcttcttttaaaatattttcattgtgtatttttaaaatcatttaggggatagaataagaacaagataggcagggctcacacctgtaatcccagcactttgggaggctgaggcgggtggatcaccagaggtcgggtgttcgagaccagcctggccaacatagtgaaaccccatctctactaaaaatacaaaaattagctgggcatggtgttgggcgcctgtaatctcagctactcaggaggctgaggcaggaaaattgctggaacccaggaggcggaggttg

SEQ ID NO: 586966 - DNA, 4001 bp, Homo sapiens
taagtcaatctaatagaaataaatattaatattaatgtgcatacttaatatccaaaccctttatgagagagccaaatggggaggaggcagtatatttatttcaggctagctctaaggtcctatttagtgaaccccaaaggagatgacttcagatcctgaaactactagaaaaagaaacagttcaggagactgggtcctgtcagtaactagtagtcatatgactcagcctatttccttatctacaaaattggaaattaggaaagcaaaagctgtctcatgtctaagtgcattaagataataacagccaacatgaagatagcacacactgcatgccagacactgtcatgagtgctttacagtcactaacttgtctaatcttctcaacaaccctatgaggtaggtactatgattaccccattttatagatgggaagacacaggcagaggaggtaaatgatctgcccaagcccccagctagtaagtggcagagcgaggatctgaactcaggtagcctggcctcggagtctaggtgtaaatcagcgtgctatatggcctctagcattctgggtattccagcattccagagagtggattgggggagggaaatcactggtagtgtgaactcaggcagctttaacggcaatacccaccatcacagagtaatccagagttaataactcactgagactgttcacacgccaccaaatactcctttataaacattcccttcaaagatcagcgttaaactattagaggaacccagaaggatattagcagcccgttactgagctgattttggtctgtaaattctaagcattgtaaagaaagacagtttttaagaagtgccttttgatgattaggcatatttgtttcctggcaaatttttacttttgtcagctaaacgcccaggtaatttagatctgcttgacagcttaaaggaccagatatttaattcaatttgttcattgttttctttctagaagacttggtcccaaatatgtacgagatgatgtgagccacaagatggtgctctaatataggaaatgggccactgggttttgctctagtgcagattatttgcatttcagaaacaggaacactcttccccacaccaccatgcagctcttgtaaagcacttgctcacaccccttgtctggccacaaaagtttctggacactcactttctgaggaaatcttccagaccctggcgacgctgatccacgtgctggcgattgttcatgttgaaaaacaggtttttagatggaagttctggcagttgtcttaggagaaagaaaaaacaatgtttttaaatgattaactcaaggtgcttctgttacagaaatccctcaaagtgaaggcaaattatgtatgatgattattatcacacagttattctataattatgattatacattatatagttatataataagggtatcaggaagtcagcttaaagaaaaacccatctttaaacatttctgaggcctttcatggcctatacccatcaaagttggtgaaatttaagtgataaattttaaattcagatgcagtagctaagaaactaaagctacatattgtaatcaaggcaaaagcctataaaaatccttcatatcttatatatcttaatgaacgtcaattttaaatactgaatataatgacaaagtctccacagtatactctaaatcacttacaccagcaacgcattactttggagtctctgcctcagccacacgaattctctatatcttcttcgtacacaggatgttttcattgtaaaacacatgctattagtctgtacagagaaagtagaaaaatgagtcttacctgaggaaaaaaatgcatttcttgtatctataattcacaatatgatctcaacattcactctaaataggatttaaaccaccaaacatatatttatatttatgccagtactctgaaatcttgcacataacccaggaacataacagccctgaagacagccaggatgatggaaataagcagtgttgccccagggtgaggtatgacctggccactccctgcatcctgaaggagcctcctactcacctatgagcactgctttcaagaataaatcataaaaaataaatcctaacatataaatgacaggtaggagctcaggttcatccgttgcattttaccaccatccacgtaagctggaggaaactttggggcttagagacacctcctcatgaccctttatgagacattgcagaaatcttcatctccttgacatggccaccctgcagatcatacaaatcaccagaaatcctagagaacagcattcccttctctactgtatgtgagagggagcgtgtccgtccgagccagagaatgaccgtggtacgtggggataaacatctggcatagaggacaggccgaccggaattccagtcctggttctgctacagggcaagtcactcaaacttcagtttcctcagtactaaaatgggatgaactagtatatatctaattcacagggtggttgtgaggattgataataagcacttgaccaatgttatctattaataatactgttagttactaagtgttggtttccttccagctatcctaaggcagacttggaaaaagccaccgatggtgtccccatgctaagctcagccacaatgcttctcctttgggtaaacataagacgagagtaaatattctcctttgcgtaaacataagacgagagtaaatattctcctttgagtaaacataagacgagagtaaatattctcctttgagtaaaacaagcgactaccaaaatatttgtttctcctgatttttgaaaatatgagtatctctagtctctgtatttcaaaatccgattttctaatctaaatgagaaacaattctttacccccaagatcagtactatttcaaaaattattattctatcacttaatatgcccagcgattgttttccttgggaaatctaagtaattatgtgcattagctctcaaactgttctcatgaaatatatgacatggttcctggtatgcttatgctttgtaaagttcagaaaacttcagaatgtagacaggttaaaaggcttatccccaaggtagccactggtctaaatcccattatctttaacgatatggcagcaaaacccgctggaaggagtttgtggcaaataacatcctgtgggtggacttataacacaccagggcctcactctactgtgctccttggggactaggtttgcagaccatgttataccagaactagtcccctaacaaggcttgagcaggttatcttcccggtaccctctccctaaagaatcccagaccaccacagggattcctgacatctcacacacaggctgggtccatttaaattccctttaatttctctgctcacaaccaccatggttgtcaataactaaaaatccacctggtacctacaccagactaaggtcgatccataagtccttcatttgcagggcaggttcaggggagtatttatgatggctacccagctctagggtctactaatttaaaattccaagtaaatgttaagatcccagagttgtgtgacatcatctcccttgaggttaatttaaacaagttaaagaccagcttctctacctccaaagctctatgggttaacaactaagagaagccaaccagaactccctagctctgccatccacttttaattgtatgacaggtggaagtctcttcaagattagaggatactgagatcactaactgattaagttcctctaataaatctatttgcttgtttttgctgtccaccaagccaaggcttatccattgtcaatttattagcatttcagaaaagtgccaggacaccatcaaatagtatttgtggaacccatcatttctggctccagatggagatttctgaatttacatcaggctatttatagagcagagcagaatctatactttcattaattcctgggaataattaaatttcatgcctatcatgaagtgtgtgataaggacgcacaatttt

SEQ ID NO: 586967 - DNA, 4001 bp, Homo sapiens
aatgggctaggtggcaactgccaaggttggaatcctgcttctgccacttataagttgtgcagtgttcacacaaaaagtactaaagtacagtttacttaatattatcattgatttactgtttaaaatatttccctaaaacgcaaaattgcattaaaatacagaagctgagaaagctccatctttccaaatcattttactggcagacacacaagtagttcatttgaaagtattaaaactctgaaacatgttaacataagctaagtttaaggaaaagatcatatcatataatattacacattagagacaacactaaacacttattataaggctaactgttcccactaaaatatcacacttaaggtaaaaatgaaacttctgctacttataactcttttttctaatctattactgctaatcacaacacaaacttatgctataaccataatctcaattaactccaagaatgaaaaatctgtagaatttagaaatataaaatgaacttcaaacaactaaaaatacgtactgtagaagttacaatcaaccagtaagtatttatcatatgccaggctctgtgcttagattaagtacaaacagcaaagtataaagttcctcaaagttagtcacgttccaaggacctgaaatttcaggcaagtacgtgctttaccatcacttttcacaaaataaaagccactcacctacaaatgtttgtatttcctttttggcccatgtaggaatacttcccattgcccactaaaactgtttcctattcagttcagcccataaaaatgcccaatccggtcagttcctcacgtcaggatcctcacagtacttaaagtgaaaggcttcgaaaaaggtatttcatcaaatcacaaggttcagtattttatgttcagtgacacctacacctgcagatactacaacacataactgggctaacctgggtcaagtacctagttgcaccgatttagttcttccccttaaagtgttgctagtaaaggcaaactctacttcttcaaaaagtcggctttttgcaatgcccattaggcactagaaaagggaaattgattggttcgtcatagttgccctacttccatttcaggtccaaagaaaaaaactattccatagggagtaacaagggggccacacgcaaatcaaggtggcagatgctaaactgaactttgtgatgaccacgatttaaccgaaaaggtgatggatgtgggggagggggatgacccaactgagccatacatgtgcagcttgagataaaaaagtccacttcatgaagcagtcaaagtagagggtgggaaacaaaccggtcgggccgagcaacaaccccagggtgctgaccgagctcggaggcggagggccctggagcccagggaccagagaaaggagacctagggcaaaccataggatcacaagaaccagcagtaacgtggaaaggccaacgctgccacagagtagcgtgtaaggggacacgaagaagggagcgatgagttagaagggagtgacagcaggagggagaccagtgccaggggcgagtggcaagtggcaactgcgaaaggcgaggcactggcagccggaggtggtgggactctgttgagtcagcacagctcctactctgagggcacttgtaggatccccgctgctcctcgggccctggagcccacggcgaagggtcaggcccaccttccgtacagatgatgttctctgacgggctggcgccggccccttccccatttcacaggtaaacactggccaccgtcgccgcttacctcagttaacattattacaccccggggaagtgaggtcctccctagcctcgcctcatggcaacagccgtagcagcagcgaaaactgctcgggccgccgccaacggcggcaactgctccttcagtcttctcccgggcggcggttttactcggcttcgctggcctcccctcggcccggtcgctcgcgacggacgcgccgccatcttggaagagcgacgtccgcgtctcgctgcaacgtgcgttcccattggcgggcgcaggggctgctggcgtctcgtgaccgtctccatagcgccggcgcgcggagaagcggaggtaggctgtcggcagtcggcttggcgctgacttgtaggaccccgggaccgggcgcctgggccaacttgggaccgctgggagtgcagaggggccccagcgcccgagccttccgggaatggacgtgcgcgcccttggggccggcgcatcatccaccgcccactagcgttggcccgccctggggagaggagaaaatgccagaggccgacacttgactgatggcgctgcggacctcgctggtcttggggacaaggcggcagatttcctttagaaaaacttccctctcgcgtctccctggccccgcggcgaccgaagagttggggttcggctttcttctcctgggatttaagtgttatttgaaacagctccctgcgcggcccttttctcctaaactttgacagaaacttccctttgtccctaccaatcctcagtgagttctttacaggggtccgagacaggttgtagatatgatgcggcttatcggctttaccccgatcctagcggagttaggacttgctgatgtaattggccagcacctgcctaacaatgaaggtttagttatgctacaagtaatgcacctctaaaaaaacgtaaaacaggctttacgttttacctgctatctccacaggtttactagctgcttaatacaatatgcttgtatatcaaggtgagcaaatttcagcaaatgtcattgtaaatagtcccaacttaaatggaattgaactctggaactcaatgtgcatagaagtccctgagactgacgccattctagatctaccactagatggtttgcgatgtacggaattaaaggcagtcacttctacctgaattgtgatgaaagtagtttacctgaacatgctgggaaagtgtgctaccctgttttgtattagaaaccagtttccaagtaaattgaaaagcaaattttcagacttgacattaaaaacacctccatgtcattcttacaagaggtacaaaagcattttagaaaactaaagccaggagtttcttcccttttaccagaatcttttccctccatttaacaatagtactgttgtgctaaatgaaatttacttaatgtattactcttacagtctcaaaacaataagggcattgcaaaccttgtattatctctatcgtgtcaaggaaacaaaacggttcatttaagcagtcatgcaaaaaattcaagaaaaactgattttgctcaattcaactaattgaagcaaagtagtttttcttgttgttttaatctgcattttgtacatcatttccacattgctggaccagcaaaattctgacctctgcaatacaataaaatgtgttactggtattgacagatgaagccacaaatagaaaatgagcatggaaatcctacctggactgaggtatcaaaggataccaagagatactagagacaacaaggaacctggaaaaagatagtgttccaacctgtaaataagaaaacagagaaggaggttcattaatatttaagataccagctagtaaattaaaacagcaatgtagttgtctggcttgagtattcagttttatttactacatctttttatcttttctagaagcaaggcattaagtgttgacacttgagtattgaaccaatctgtgatatgacatgaatatgcctttaactttcagaagtttgtctacagacttacaaggaaaccaaaagtagtcgctcttccaatggcttcctaattttctcagcctgagtcttttctgcaacctaaaaatcctatgctagctggcctcccaagtcctacctcacctccacccctctgacctcatttctgctaagcactttgttccagttacacagacctgctccctgcttctgtaacaccaaggcatcttcttgccctgaggcccttacactgtgtatagtttctatctgcaaagatcttt

SEQ ID NO: 586968 - DNA, 4001 bp, Homo sapiens
acacaatgttctaatcagcgagaactatcacgtgcctccccttacactgatacaagggaaaggaaaaaataactgaagacccattctgaaaggcccttctttctagacacagtcttcacatcgaggatgcccaccaaatgcaacaatccctcccctgctccccgctgccgtttctcgccgacgaagaaactgtctaccaaccctccagagctcacttcagtcatcacctcctcagcgacaccttgccagacctccccacaaggggattccccaatcttgtccccccccaccaagaagaaaccgtaactcacaccaacacccacctacatctcttctctggcagctaggaccacaggaaggaacatccagaaataaggggcaccctcctgtattccttctaatgtttagcctcgtttgttttgttttgttttgttttttttgaggcggagtctcgctctgtcgcccaggctggagtgcagtggcgctatctcggctcactacaagctctgcctcccgggttcacgccattctcctgcctcagcctcccgagtagctgggactacaggcgcccgccaccgcgcctggctaattttttttgtatttttagtagagacagggtttcaccgtgttagccaggatggtcttgatctcctgacctcgtgatccgcccgcctcggcctcccaaagtgctgagattacaagcgtgagccaccgtgcccagccatgtttagcctcattaacccaaatcccttaaagagaaatacaagaggccaggcgcggtggctcacgcctgtaatcccagcactctgggaagctgaggtggttggatcacctgaggtcaggagttcgagaccagcctggccaacatggtgaaactccgtctctactaaaaatacaaaatttagccgagtgtcatggtggatgcctgtaatcccagctactcaggaggctgaggcaggagaatcgcttgaacccgggaggcggaggttgcaatgagccgagatcgcaccattgcactccagcctgagtgacagtgagaatctgtctcaaaaaaaaaaaaaaaagaaaagaaaagaaaaagaaaaaagaaaaagacagaaatacaggccaggcacgatggctcatgcccgtactcccagcactttgggaggccaaggcaggaggaccgcttgaggccagaagctccagaccagcctggacaacatagcaagatcccatctctacaaaaataaaaaaaattaccgggcgtaactgcacgcgcccgtagtcccagcactttgggaggctaaggcggaggatcacttgaaagagagagaaaagcagctacacatctatagattcggttcacagatgagaaaacagaggtcccgagaggtgaaattactggcccaagaccacacaaccgacaggagcttgggagagaggatgtggctaggaaaggcgcccaagtccggggaagtggcccccagtgccatcgctcagcgtgaccaggcagggcagaagagcagggcaccaggaacggggcgaggaggaaactgtccccgaggacgcctctgagagccccgggaaagcgcctcggaacgcggccagctgtaacctggacagggctctcccggcgcaggagggcaggggaccccgagggacggaggcgcgagagagcacggggacccccaaaggacaggcgcgcaggagggcagggggacctccgagggactggggcgtggggccgaacgcggggcgcgggggcaggaaacgagtcggggaccaagcgcggcggctgagccccgtccgccgggggtggtcgggccgcgcgccctgggcaggtgggggctaccgccgccccacgccctacctgacgccgggggatccgcctcctcgtcagcctccgcctcagctgccgccccgactgcagccgcgggcagcgggtccatcgcgcggccagtcatgtgagcccgcgctcccacgtgacttcctcccgcgccacccggccgcgcagccctgccgcgccgcgccctcgccccgcccacaccccgcctggtcacgccccctcccccgcgcgccacgcccacagtccgcccctgcgggcccgccgcgctcctcgcccggcctcgccacgcctacaacccgcctagccacgcccacatgcccctccccgtccacgtggacacggagcctgctggtggcgcaggttacctcccctcaggttggacctccggactcgcaggtgcactacctcaggcgcaagcctgcacccaccgcaccctcattcactcccatctctcctcgcccagtcacgcccttgttcgctcattcaccggttacactggggttttctgactcgcacttcctcattcatccactcacccactcattcgctcacccacgcactgcatcctgcattcattcattcacccactcactcactgcatcctacattcattcatccactcacacactcactcaccgcatcctgcattcatccagccactcactcactcactgcatcctgcaatcattcacccactcactcactgcatcctgcattcattcattcacccactcactcactgcatcctgcattcattcattcacccactcactcactgcatcctacattcattcatccactcacacactcaccgcatcctgcattcatccagccactcactcactgcatcctgcattcattcatccagccactcactcactgcatcctgcattcattcattcacccactcactcactgcatcctgcattcattcattcacccactcacgcactgcatcctgcattcattcacccactcacccactcactcactgcatcctgcattcattcattcacccactcacccactcactctctgcatcctgcattcactcattcactcacttattgcatcctgcattcattcacccactcacccactcactcactgcatcctgcattcattcatccacccactcactcatgcactgcatcctgcattcattcatccattcactcactcactcacttactgcttcttcatacgttcattcacccactcactcactgcatcctgcattcattcatccacccactcactcatgcactgcatcctgcattcattcatccattcactcactcactcacttactgcttcttcgtacattcattcacccactcacgcactgcatcctgcattcattcattcaccaacccactcactgcattctgcattcattcagtcactcactcactgcatcctgcattcattcattcacccactcactcacttactgcatcctacattcattcattcactcactgcatcctgcattcattcattcacccactcactcacttactgcatcctgcattcattcactcactcactaactgcatcctgcattcattcactcactcactaactgcatcctgcattcattcatccacccactcactcactcactgcatcctgcattcattcatccactcactcactcactgcttcttcatacattcattcacccacactcactgcatcctgcattcattcacccactcactcacccactcactgcatcctgcattcattcatctacccacccactcactcatgcacttcatcctgcattcattcacccactcactcactcactgcatcctgctttcattcacgcaaccactcactcactgcaccctgcattcattcacccactcactcactgcatcctgcattcactcacccacccactcactcactgcatcctgcattcattcattcacccactcactcactctgcatcctgaattcattcacacaaccactcactcactcactcactgcatcctgcattcattcacccacccactcactgcatcctgcattcattcattcactcactcactcactcatgcactgcatcctgcattcattcacgcaaccactcactcactgcatcctgcattcattcacccacttactcactgcatcctgcattcattcacccactcac

SEQ ID NO: 586969 - DNA, 4001 bp, Homo sapiens
attggctgtttcttgttacatgccttatgtaattaaagcaaaaattaatctttaaatattttaagttttccttacccttgctttgttatctaaacttgaggagaattgcctataacaagcttgaaaagaaatcaaggcttgccaaccaggaaaaaaaaaaaggatgtttaaaagtacaggctgctgacattttacaaataaaaatgataagggacactgaagtggttccacaaaaagtactgaaagatacgtcgaagtagaactgaatcaggagtttcacttcatctctgtatgctagtacttctgaggtaagagatatagcttaaggggaacgtgatagttgtggaaaaacttatgtatatagacatgcatgcatagaaatctagaattgtgggattaaaatgtaaagcgtaaattgtttggttggacagtgtgctcagcgtgcctgattctgcctccagctcaccttcctgcagctgcctcaggaatgcacctggaaatagccagaaataattttgtctcgtcaagctttctgttcctgtgtatatacagatttggcatttttgcagtgacagttcattgacaacgaatacccaccacattgctcagtaatctaataataatcagatatgtcctgtgtacttaaaagcaaccagcttcgtgaaagttaaaacatcctagctttcttagacattaacagtcaaatttgctttgacttttcaaaagtcaaaactacttttcgtagttgaatggagtgaagaaggagaggcaaaagatttgtgtaagatttcctgcgcagtgtttctctctctctctctctctctcttaaaacctgattattagcatatggcctcttctaaaggaaaagatagaaacaaaagttaggggtaatttgaatccccctaaccagtggtcaattagtgtgtcaactaagctgttgttttacatctcttaagttacaaaaatgtccccagtctgtcacagaaatacacaattatctaaattttgaatgggacaacaaggaattattttagaaaaatgtgattctccaacatttttagtttatccctcttttacattgagcatcatcaaaacttttgactatctcactagacatattttagaaatccaatgtaaacaaattttttctcctggaagcttccttttttcccttgtgattccctatatttatttgtggatggtaactaataatatatattagttacgtttatacactttaccaaaattgcatatgccctgaaataaattgacaaaacaaccggaacttgagctatctaaaacaatactttttaaaatggtcattttgcatgattttgacaaaacaatagtttaattcctggaaatgttttctttgtggatgtttgataaaacttcagtctgtgcttgcactattaaaccactgttttagttaggttaactttaaaatcactacctagggaagaatgccaacctgcacatgcagcagattactcccaaattgtttcacaacatatatacggttcaggttagttaccaataaaacaattctacaggaatgtgagctaatgctaccagaaaagaaaaaaaaaaactgtacaagtaaaacacacttactgttccgatccagtccagtgttactgaaatgcctgcctccatttctggcttgattcaacgtgctgttgctgctggggtgtgctggaacaggtttaaccacatgtgaataaaggatttctgtggcatcatttttaaaagccaaacagcttttcattaggatgcatgcaaggggaaggagatagaaatgaatggcaggaggaagcatggtgagtagaggatttgcttgactgaagagctggttaattcttttgcttctgcttctgcactgtaactgtgaaattcctcctcaagcttccctttatatatccatagaggtttggcgttcattcaggtgtaaagttgtgtagagcttcagagtgaaaacacagagaaggggtgggatccctacatgaccctgcaaaagaattttaccaatggaaaagaagactgcagaaaaggaggagcttggtatacaaattgcctgaaatttcagagttggacttcatcacttgtctgtgagccgacgcaggcaggcgtattctatatcaacgacagactctcctctgccatttcctttcctgaatctagttaacattcgggtttaatttaaacgaaaatacatcgctgttcatttgaagagactggctttcccacagttgttctgtactttcctcagattttagagtatttgggtcagaaagggagttcttcccagataacaggaggaattcatgtgagtttaaatattgcaggacttgcatgaagcacctagttagctaaacattgctttctctcaagaagcaaaccaatatttttttttccttaaagtaaaaggcacagagctaaaacctgccccctggacatgcttaaataatgcagctttgatctacaagaactactgtgctgctaggtaaattattgccaggggttttgtgtggagaataatgagcatagttctgtctacattaaagtaagtaatactcatttttgtcttaaaaatgtgtcacaagcattaatatccatagcattgttttacataaagccatttgtgacagactttttagcggattcaaaataattttttctagattttttcagaacacagattctactcgtatttactaaatattttgctcattacttcctttgactctgctgcccaagtaagaaacctatttttctgaattactttaccggcacccagaacacgtgttccattaattaattataggccactgatgatccctttaaaacaatcataaaattctatttcatcatgggacatctcaattggaataactattctgaatcatcttttcaattataaatccatttttgtcctttgtgtggttacctaaatcacctaattttgtatctcttttctgtataagcttttgtcccttgtaactgccatttgcctatatgtctgcctacctgaatttctccatagcagcgctactggcattttggaagagacagttctttattattgggggaccatcctgtgtgtttatcagcatccctggcttctaacgactagacgccagtagcacccccctagttggtaacaaaaataactccaaacattgccaaatgacccctacagggtaaaatcacccccaatttaaccactaattatctattcatctatctcactataaaagaaagtaaaaataagtataaaggaaaaatattataataccaagaaattattgttcttttttaggacagaaatggtaccgtagttttgttttaaaacaatgactgcttctctattagaagtatatactggaatatccttagatgaaatgattttatatcatcttttacattatatggaataagctagaataagcttcaaaaataatatgaggaggttagaggtgtgagtggcaaaagattaattataagttgatggttgttacagtaggatggtaaagtattatattctgtttattcttgtgtatgttccaaattctacataataaaaagtttaaaaaccagagtcagacaatcagtttaatggacgtatacttcctactaacaatatatctctatcctacgattggatagtcatttattctaacatccttcctggaaaatcatatgtcagtttattttgtgcaaatggagattacaggcatccttctaaaatactaactatgaagaatttcctgccctacttatcaggggacttgatgttaattacacaaagcatgttaatattaatcattgacctacagacccaatgcctaaaggaaattaaaaggtcaaaataatctaatctgttcctcactactttttctttttctgtgtcagaagcaggagatattttaattggaatttaattatcgggttgggctaatgaggttgaccaaattcacgcacagttattaaatctgctgcac

SEQ ID NO: 586970 - DNA, 4001 bp, Homo sapiens
ggaaactaattgattcccattggaagtcccactatcagcagtagcagcaggctggccaacctgcccagtccctcctccggcagccacgttgtttatcactggcaaagctagagtcactcctccaatgttaattggtagggttgttacaacttgagcctgagtaccaggaagagtctgtaactgcagtggtattgaaacaccaggtctaatttggaccggaactgtctgatttgccaggttttgagcaagaatattcccagaagctgtcctgttagcagctgtgagtatagcttgattattacctgcagaaatgagctgaatttgaccctgcaaatcctgtagagatgaactactagttggattgatttgaatttgttgaccttccactgtctgaagttgtggaattacttggtactgtacactaccacttggattttgtacttgtatgacttgaaattgaccaggggtggaagaattacctgatttagtttttgtaggagatgcactcccgttattactgctggaagaactagacgaactagaggctggttgagaaacgttattctcttttgaagcaggaggagtggaggcaacaagttgccaagcgtttccagcaagttgcgttgttaccagttctagctgttgtggttgattttgaagttgcaccaatccttgacttggatctataataatttgttgttgtccagttgcttgattttcaccaggagtccctattttgctgcaagtagctgccagtaaagccagaggagagggctgagagtcctacccaaaatgggacggtaaaggagaggggggggggaaaaaaagtgggcggatttagtggaggccagtagttgccagggggttacttattttgacagctctacataacaatttaggaagcagcagaaatcaaaaagaaatacgaacaaaagtagataagaactatatgaataaggaagcaagtcctataatatcaagtttaaataaaaggaaatttctttacaactttgtaaagtgttatgttcctaaactcaaaatgcccttgggaacacacacaccgttttcttatagtctgaattcctgatgtaattttaaacagcgttataccctcaaagaggtgaaaacttgatgaatttacaatttaagttccacactctcagaaagatgctttgagtggataaacattttattctgttacttctggacattcaaagggcataactccctctctctcctaatgtgtcgtgatgaatttttttaatttgtttgcttttacctgggagcctgaggttttgggttttttattgttattctctggctcagaggttttccctccttctgtagccatcgccgctgccgctgccgcctcctcctcctcctccttcttctgatctgcaacaaacccccccaccacacacacacgacaacaggttattaggattattattattcgtcttcttcctctcctcttctcccccctccccccgaacattaatctccataaacccgcgatccacgcacaccggcagggggtgggggagaaggagggaagggaggagggggatatcacaaaacgtggtttgaaacccgacccatcggctccagagcaacacccagaaggaggttgttctctctcagacattaagacaaaacacaaccctccttccctccccgattccctcccgccctctcctcctccccttaaagcatctcagcggccccgggggaggggggagaaccgagcagggtctggggagggagggagagagggaggcggcgaaggagactgaggggggtggagaatacgtaccgctcatcccgcattaacaggacaaaccctcagacggagacactgggatagaggtgggtgggggtgggggcgaggcgggaggagaggccggtcccgcccgcccgcggtggctcggaggaggctgtagctggcacaggctctgcctctttttccgcgaatggccgccgctgggctgtggcgtagcagctcctctctccgcccgagcccggctgactcgcccttgattgacagcggcggcgcgcggcgcgggcggcggcgcgggtcgggggcggggccagggcggtgcgagcctggccgactccccacccccctcggcctctctccgccggagcctccgactctccaccccttcccccagcggattggccgccgacctgccgggggccggggcgctggggccgcctcctctccaccccctttctcggggttattcctttagcagctcttctcctcctccctggctcctctggcgctctttctctcggcgttctagctcaggagcgctgccggtaggccctccatacagccaaacttgttgtctcaggatatcccgccccctactcatttcccagcgccctccactcaaaaaccccctccagcaatccctccaattgccactaaagaaaaaagtagggcccttgatccaggcaagcgagagcggcggacgtgggcgcgcgcggaccaccaacaggtcggcgcgctgggtgaactgcccgctgcccccgcgcagggagcatggctttcctgaggcgcatccggacccgggcgccctttttccctggctctgtctccattggctgagcccagggtgacgcgcgctgagtggtgggagaaagggggtggggcactaccgcgaaggctgtcggtactcgtagtttccggcggtcgcggtgccttcttcgaggcaccgcctctctcccgcccccgaccgaggcctggctgccgagcggaaagctgcccgagggggcggtggcggcagggcgtggccggggccgagtgggagttgaactgagcgaggaggagggggaatgggtgttgtttgcctgggcctatccgccgcgcggggctgcccaaaccacctctgccgccgcctcctcggctccaagccgctccccgcggggcgagctcacacccggagcgctcggcgattgagcgggcggcggcgtggggaggcggggtttgctgtcctcggggtttgaatgaacccggcttcttgaagcagcgccctcgccttgcctttctttgctcaccttcccctcaggccccctgctttgagtccgaggcctgttttctcacggagaaggatcttccatttttatttgttgtctctctggctggcagctggtgcagagcagtgacccgccttctaagaagggttgcatcgcgttttgcctaaaagcctaagtggttggcggagttctaagccttatctgacaagagtctccgggcgaagaaaagcccagctccataagggtcagccccgcttacggtgtagcgtaagcaagcgtaagggcaagtggaattaacatctggctgcacaaagcatcttactgtcaaatgcacttgagcagtgtcctgcctcagctttcctacaaagtcctgaagtcaggatgatgccatggaacgtaatcagcgcctgattaactgtaccaaaggtggaagtgaccccacatgtaaatactggccttgggaacaaggcatgcttacaccccaggctcaaagccattgtctcacttcttacctgggcttcacactcagccttgggcatttttgtctcctgcctgaggcctgacatgttgcaatggtgaggaggtcccagatgctgaacttgactggcatttcctttgcttgttaaggtaattgcaaaatcagctgatgacaaagccatgcagcaagacaaagcaattcgaataaagaattacatggtattgtctaccccatcttatacaatgagccagagatccctgaacaacgtgctttttccccatcgtgtacaatatagaaagctcaaaagtgcttcttacatttacgtatatactgtctctatcctcaggtcccctcctcctcccagttcaccaagataaatgaagacattttgcagtcttatgaattggggctttcattgtcgttttcgtttggaaaacctgcttcagagaggcaatgtcactgactctgaaccatagattaa

SEQ ID NO: 586971 - DNA, 4001 bp, Homo sapiens
gtaggagccgggtagcactggcttgaagccgtccatgaggtgctgcccggcggggctgagcaggtgcgaggaggcgccgctgctgaaggccgagtgactcaggcccgagtaatccgagttgtagcctccgagcggcgagtgcagcgaggtttggagccccccggcggcagggtgcagcgagccgggcagcgcagccgcgctgttcgggttctgcacgtcgatccagccggcccccacgtcccaccagctggaggcgccggccgagcccacctcgcccgcagcacccaggcccgggtgcgagggcttaaaccacgactcgtacgggtgcgccatgcccacccgcgggtagatgccctgcagcccgtccacagaggtgtgcaccttggagatgaacaccggctggtgggagccgtcctgcgagtgcgcggaggagccgccgccgccgcccccgccgccgccgccgctgcccccggaaactccgggggcctggaaaacagagtagtcgttggcgaagggcgagctggaggcggcggctgcggcggcggcggcggcggctgcggcgctgctggaggtgagggagaaggcgctggagccaggcgagccgccgcagctgaacgagtcggacaccagggccgcggcagccgcggctgctgccgcggccgccgcagccgccgaggacgagccgccgttcctggaggccccggacacgccgaagcttgagagactggaacccactacgttgcagctggcggaagaagaggacgaggagcgtttccaggggtggaagcctttgccgaaggaagaagagctgtccgagagggaggagggagacgggctggggctgcctatcttattacaggtagcggcaagcatggccagaggagtcgatcccaacctcggttcttcctgcgaggaggagaggagaaggagtgggggaggggaggtgggcaaagggccggtgggggaggaaaggaagaaatgtgcatcagtccttcggtagcctccaaagcgccccactgcaccccatctctcgctgcggcgcgccgccaccaactcacctggcacccccaacagccccggcgcccggccgcttcctactctacaggaggggacaagtttggctgccggcgtctgattcgggagcaagcaccacgctaaagaagagtttgacaagtattctcacctaaaacaacactctcttgcacacaaagccccagacacttcgtaacaaacaagcaaaaagtccagattggagaggaaggaagttttctttgccgagaagcctgggggaaaaccattggattgcttttaagagcgcttccctgtaatccggagagctttgaaaaacctgttcgggtccccagaaacccatcctgggttgtttctcccaggccaaaagaaatcaaactgtagggctcactctttcttcctgcttttctttctttctttttttaaaagcatatctacagtagtaaaaacgagacgagttcaacgtacctgcgagacaaggcgggctgcagaatttttttttaagggttaggggaagaatctgcactttgcccagaaggaaaaacttgctctctttacccccgaaatcggtgcctgtaaaatgggctggacgcaggtctcccgggcagggagcagcgaggcgctgcgcggtggcttgtctaaatgcccttcgaaccttttcctgcgctgaaaaaaagtgactctgcccccttctccccctttttcttttctccaaactcacttgtatttaaagaaaaaaaaaaaaagctctcaatagagagactgatagcccgtggcctggccggggcgactttaaccccctccaatcggcaataaaaggaaactaattaaaccagcaagagaaaatcctgagactcacccctagaagtgaagttgccatcacacaaaagtgccctcctcctctcagaggatcttttttatattgataaatcagaggcagtgttttttttagaggtgtgcaatacaatgatcagttccgcccattccaccacaattgtagctccctctccggctttgaagtgccgcggaggcgcggccagccaatctgcggcctcgccgggccgcgcggcgcgcgcgccgtgaggtcatcggcgccgccgcctgccgccgtggtggaagggggagtgggagcggagggggcgggggcggctgcgtgtgttacaaagcgcaaagcgcgcgctcgcgtgtatgagtgtgtgtgtaacaatgtaactgtgtgcgagtgtgaccaggcgtaggagaggacagtgcggagactggagggaggggggatgggggtgtgacaccgtaacagtgacagtgtggtaaaggcggggagtggagagagtgcagaaaagggagggttgtgtgataagataactgcgtgtgcgacaaagcggggtagagggacagagcagttaagtgttgggaagggtgtgagtgtacggtagtgtaactgacaaacctagggagggaagagggactcaactgggtggggggtgagtgtgtttggtgttgggggagaaggagggctgtgaacatgtgtatttgtgcgacagagaagagggaagggtgtgtgtgggcgcttgtgttgtgtgcgcgcaccaaagctggtagtggggaatgggaacaatgcaataaagtgtgtgtttgtaagagagagactgtcgagctgaagagagaaaccgactaagttgatggaggctgagtgaataaatattcacaaacgctgcccctgtcgccaacttcctttggctccttgtacctaaaatcttgagtgatttttttttcttaacttggtaaacagcgtcactacatttttgaagaagatctttaaacccaccttttctttcccggctctccaacgaaatagtagaaaggttgagaggctaagggttatttttagggatgcgttgggacgtggatgcgcgcctgcgcgcccatgagttgtttctttgatgccgtggctttttttttttttttttttttttttttccctgaggtggaattctgctttagaagtgcacgtctcactctaggggaggaggtgtgtgtgtcccgtggtgttgagtaaatttcaatacaaaaggattagatagagaagagagtaagcgagggtcgttttttctttgggtaagaaattgaagagcgttttacggaatttagaaattttcacagaaaacctcactgcctctttctgagaaaagaatcaggactttgatcgaaatatatgggttctatttatctaagaatagagaggagcttttgacaaatcttggacatttatccaggcgtcagtgtctaatggcgattgggccagagatctgtctatgagtgtgtgtgcatgttaatagatacacttagttcaaattcggtggggtttagtcatttgcttgccatttgtgttattagttgccttcagaaatgccattacaatttcactgccaccacaagggaacttaaaccgcagaaagcacaacaccagtgtagcaaaaagtccagtctttgtagccctattgaatattcataagttataaaaacagttcatatttttaaccagttacaagtgctctcagaagtctaattttaaaatggaattaactaaaatgtgactagctgggcgaactgttttgttttgactgggaaaacatttttattttactgttgtgtttgaacccccctcaaggatttcacagcttctagggatgtcaaaaaatcttcctagggtttacaaaatttcgaagtcaagttgtatcgtgtaaatttcattgagcagagttgaaactgatgtttgtggtgtgagagtgtacatttctgacccttttttaaacgctgtggggatattgactgtacatcatatctattgattaagggggtaaggtatactctcatactttgaagtaagtgtgaagtaaattaatgaactgctttctttctctgagggctgacgcttaccataaatgtcgtgtttctccctgcaagccgctctgaat

SEQ ID NO: 586972 - DNA, 4001 bp, Homo sapiens
gatatgaggactaagctctgattttttatcttacccaaattcctacctaagaggtctagggagtcatgccctacaaacaataaattctcatcagatgggttttattggaccctacatattgtggcttacttttcaatctgactggcataatattatgagacaaggaaaaaaatatttaaccccaagatctatttccttgccataccttaaaattgccctgcagtgtctcatgggaagaatccacatcctatagagaatccccttcccctttgttttctttccttccttcccagatccagaagataatcaactaagagccaggcacacttttaagtcctataaaaaaactatttacaacctggtctctctaaaatctcctatctaagagcttcctctgcacaataaaacttggtctccataatcctttatctttaacctgaacattcctttctatcgatcccaggtcttcagacaacctcaaccaattgtcagccagaaaatctttaaacttatctataagctagaagcccccactctgagttgtcccgcctttctaaaccaaaccaatgtatttcttaaacgtatttgactaatgtctcatgccttcctaaaacacataaaaccaaactgtaccccgaccaccttggacacatgttctcaggacctcctaagggctgtgtcacggggccataatcactcatatttggctcagaataattctcttcaaatattttacagagtttgactcttttcatcaacaggtatgtcctatactatatttctggtaaaccaaaaagtatcagagacaggtctcaatcaatttagaagtttattttgccaaagttaaggataagcccagaacaaataaacatggagtcacagaaacagtctgtggtccgtgcctttttctaaaaatgaatttgagggcctcggtatttaaaggggaaaagcaggccggcggggaaagaaggagggtatgataatccacatgttgcaagggaaaagaagtaggtaggggaatagtcaattatgtattcatccagtgctcagtaaatctgcactttacataagataaggtgaacacagagtaactacctgtggagttaacattttatctctagctatctgcttaggaacaagagaaaaggcagtttcttgcacaactcacatttcagcttaatttttttttccttttggcatgatgaattggggttctgagtttttattttcctttcacattctcaagtcaattagaccctatggcatcaggcatgtccccattcctgtatgaagtagtcacagctggtgccttaattggcaaattcagtattcttacattaggttccctcctttacctccacgttccccattctcccattctgtgtccattctcttatgacttaataagacacagcacctcgcaacacagtagcagaccacctatacacaggtcttattaaccaatccctccattgtaatgcctttttttttttttttgtgacagagtctcactctgtcacccaggatggagtgtagtggcatgatctcggctcactaaaaccgccatctgccaggttcatgcaacaccatgatagtggtaaagaaattaacgactgaggttattcctcattttggcatttctttatagattgaatcagaccaaggaactcattttttagtagaaataaaccactcactcacaaaatctctggattactcattaaaacttcttacttcataccatcctcaatcatcaggtcaagtggaacataaaaatctagacataaaaagaacttataggaaaaaatccatcaagccaactctttcaaccaggagatcaggtatacatcaagatttttagaaaaagcttgtactgttaccttgctaggaaggaccttatgaggtgctgctaaccacctacactgctatcatactttctgaatttatgtgagccacatcaaggtggagccagtcatcactctcaggacaactggaagaccatccctacaggtgacctcatagtaaggatttcagagccaaggctctagaagcaagatgacaccacaaagcaaacagctttcctcaagatcacagataaaaaactttgctttcatctattttccccctttaagtttctttcctccctggtgtggggaggggagtagaggggggatctttttcaacaaaacctcccatttattgagaagctgactggagattacttgtctcaatctatcctattctctctctgatcctccactgtgggctttctttcaaatgctgcctctttcatattaacctcactcttttcttcataggttaaacacaaacctgacaccacccttgcaccagtttcccaaaccttggtcatgtcagctaaacaatataattattgcttatgtcaacatctgatagcatgaacaaacctgaattagtttttattcctgtccatggggtaccaggtggaccaactatggaagataaatgaatgaaagagtatggtatccatggtcagaaaaacaatgtcactctacttttccttctggtgagttcactgggcaaggaaaaacctctatgtaagctcaagaattgtcccttgctcaaataaagacattggaagaaaaagacttttccaattaaaaacaaatatggtactgatctcttcccaagtaacaatccaagacaatattgcaatcaaaccctgtagtttgactccatacaccacatcctcaaacccatcatggaggtcataatgaggcaggagaatagggttgggagacagggagcctgaggacaaattggctgacttcttggaattggaccaaaaggaaaaccccacctctccatgcccaggtgaaaagggaccagagttcctgacctctacaaaaccctcctcccctacctcacgaacgagaaatgcctctgactggttgtggcccaagcctccacttcagcctctgattggttgcaggccaacctccacttcagcttctgattggtcacaggccaagcctccacttcagcctctgattggtctcaaaccaagcctccacttcagtgtctgattggtcacaggtcaatccttcatttgcgtagggtgtaaccaattggaggtctctaaagggtacctaggggtgttaaccaaattcttttagtttaatttaaaaccctgaagaacattgcagtcaggctcttgagccacttgctcaagcttgctcctactctgtggaggctactttcacttcaataaatctgtgcttttgttgcttcgttcttttgttgctttgtttgtgcgttttgttcaattctttgttcaacactccaagaacctggaaaactcacagtcaggactttctatccggtgacaataagtgattctagaactaccttttatagcacaaacttttgccaaatcaccaaatgtgttggctggttcataggccactcttgcacaacctgggtgggatagctcggctgctctcctgattaggctccttagcaccagaaattgtatataaatagatcaaaaatctggattaacttggtcaggtgacaaaatcaagccttttagctgccaaagccagattgcagttctcctatgtcaaatgtttcacaacattttctgcttctacaaactgacagaggcacgtgaaaatgaaggtgtggagacatcaatatgaccaataacaaaagttgtggaacacactagatcttgggaattacaggttccactttttgttcatgaacaacactggtcattctatcttgtgtggttgatgaaaatgctgcctctttgtgaatcagttgggacaaacgttatctgatttatacctttgaacaaaaaagattaatattctccataagataatgaggctcaaccatttgattagactgacctattcccagagttgggagattggtttaatgggatatggagaaatgtgcttagatttgcacttttctgcttatttattctcattctgatctacatattcttcttt

SEQ ID NO: 586973 - DNA, 4001 bp, Homo sapiens
ggaagacaatcaacatagatgcatacctcatagatattatgcgttcccttcaatatttttctaagtctgtaaaaccaatttcgaccctgtagcttttactcaaggcttcactcttgttcaatacattaataacctctttctttataaccaaactaaacagggtgctcttatagactccctcgttctcctaaaagaactagctgaatgaggccttaaatccttcatatctaaacatcagtggatgcaaacgactgttacctgctaagaacatgagatatctcagggcactaaaaacagcacaaaatgctttgaatcagccttgcccatctttctcccaaaaccaaaaagcagctgcataaattcctagggacagctagctattgtcatcaatgagttcctacttttgctgcccatgctaaatcgctatagatgccctccttccgatgctacttcagagttcatttcctagctcttggagccattgaactcctgcaaagccttaaaatgagcacttctcacatagccagctcttggcttacccaactttggcaaaccttttcacctatattgccatgaaaagaataggattgttttgggtattcaaaacaacctcttgcctcttggatatgaggactaagctctgattttttatcttacccaaattcctacctaagaggtctagggagtcatgccctacaaacaataaattctcatcagatgggttttattggaccctacatattgtggcttacttttcaatctgactggcataatattatgagacaaggaaaaaaatatttaaccccaagatctatttccttgccataccttaaaattgccctgcagtgtctcatgggaagaatccacatcctatagagaatccccttcccctttgttttctttccttccttcccagatccagaagataatcaactaagagccaggcacacttttaagtcctataaaaaaactatttacaacctggtctctctaaaatctcctatctaagagcttcctctgcacaataaaacttggtctccataatcctttatctttaacctgaacattcctttctatcgatcccaggtcttcagacaacctcaaccaattgtcagccagaaaatctttaaacttatctataagctagaagcccccactctgagttgtcccgcctttctaaaccaaaccaatgtatttcttaaacgtatttgactaatgtctcatgccttcctaaaacacataaaaccaaactgtaccccgaccaccttggacacatgttctcaggacctcctaagggctgtgtcacggggccataatcactcatatttggctcagaataattctcttcaaatattttacagagtttgactcttttcatcaacaggtatgtcctatactatatttctggtaaaccaaaaagtatcagagacaggtctcaatcaatttagaagtttattttgccaaagttaaggataagcccagaacaaataaacatggagtcacagaaacagtctgtggtccgtgcctttttctaaaaatgaatttgagggcctcggtatttaaaggggaaaagcaggccggcggggaaagaaggagggtatgataatccacatgttgcaagggaaaagaagtaggtaggggaatagtcaattatgtattcatccagtgctcagtaaatctgcactttacataagataaggtgaacacagagtaactacctgtggagttaacattttatctctagctatctgcttaggaacaagagaaaaggcagtttcttgcacaactcacatttcagcttaatttttttttccttttggcatgatgaattggggttctgagtttttattttcctttcacattctcaagtcaattagaccctatggcatcaggcatgtccccattcctgtatgaagtagtcacagctggtgccttaattggcaaattcagtattcttacattaggttccctcctttacctccacgttccccattctcccattctgtgtccattctcttatgacttaataagacacagcacctcgcaacacagtagcagaccacctatacacaggtcttattaaccaatccctccattgtaatgcctttttttttttttttgtgacagagtctcactctgtcacccaggatggagtgtagtggcatgatctcggctcactaaaaccgccatctgccaggttcatgcaacaccatgatagtggtaaagaaattaacgactgaggttattcctcattttggcatttctttatagattgaatcagaccaaggaactcattttttagtagaaataaaccactcactcacaaaatctctggattactcattaaaacttcttacttcataccatcctcaatcatcaggtcaagtggaacataaaaatctagacataaaaagaacttataggaaaaaatccatcaagccaactctttcaaccaggagatcaggtatacatcaagatttttagaaaaagcttgtactgttaccttgctaggaaggaccttatgaggtgctgctaaccacctacactgctatcatactttctgaatttatgtgagccacatcaaggtggagccagtcatcactctcaggacaactggaagaccatccctacaggtgacctcatagtaaggatttcagagccaaggctctagaagcaagatgacaccacaaagcaaacagctttcctcaagatcacagataaaaaactttgctttcatctattttccccctttaagtttctttcctccctggtgtggggaggggagtagaggggggatctttttcaacaaaacctcccatttattgagaagctgactggagattacttgtctcaatctatcctattctctctctgatcctccactgtgggctttctttcaaatgctgcctctttcatattaacctcactcttttcttcataggttaaacacaaacctgacaccacccttgcaccagtttcccaaaccttggtcatgtcagctaaacaatataattattgcttatgtcaacatctgatagcatgaacaaacctgaattagtttttattcctgtccatggggtaccaggtggaccaactatggaagataaatgaatgaaagagtatggtatccatggtcagaaaaacaatgtcactctacttttccttctggtgagttcactgggcaaggaaaaacctctatgtaagctcaagaattgtcccttgctcaaataaagacattggaagaaaaagacttttccaattaaaaacaaatatggtactgatctcttcccaagtaacaatccaagacaatattgcaatcaaaccctgtagtttgactccatacaccacatcctcaaacccatcatggaggtcataatgaggcaggagaatagggttgggagacagggagcctgaggacaaattggctgacttcttggaattggaccaaaaggaaaaccccacctctccatgcccaggtgaaaagggaccagagttcctgacctctacaaaaccctcctcccctacctcacgaacgagaaatgcctctgactggttgtggcccaagcctccacttcagcctctgattggttgcaggccaacctccacttcagcttctgattggtcacaggccaagcctccacttcagcctctgattggtctcaaaccaagcctccacttcagtgtctgattggtcacaggtcaatccttcatttgcgtagggtgtaaccaattggaggtctctaaagggtacctaggggtgttaaccaaattcttttagtttaatttaaaaccctgaagaacattgcagtcaggctcttgagccacttgctcaagcttgctcctactctgtggaggctactttcacttcaataaatctgtgcttttgttgcttcgttcttttgttgctttgtttgtgcgttttgttcaattctttgttcaacactccaagaacctggaaaactcacagtcaggactttctatccggtgacaataagtgattc

SEQ ID NO: 586974 - DNA, 4001 bp, Homo sapiens
aagtgtggttattggaagtttcctgtttttggaaagaacaggattggaggtgctctctggggtgtcctcctaccaagcagcctgttgaaggcctcgtggtgctcagggagcacgagcgacactcgccgtcgcttcagcttcatcttgaggccacacagcatctccgccacccagatctcctcaggctcaggggcgagcaccttccgtggctcctcctccgactcctcagatttgtcccaccactccatcttccttttccagcaaaaggacctatgcggggggctgggatctaccccaggggctgagtaaagaaaccaggccacggtgtaatgcttctgcagttgatcacactagagcccgacccaaaaccccaaaccactctccatcctccccagcctcgcagactgctggcttctccaagccatctttccttctgtctgtctcctctgctgagctccatgtgccgctccttctcctccccattctcccgtttctctgtcctcagaacacttcctcatatccttccctggtccctggctctctgagtccctttttttttttttttttttttgttgttgttgttgagaaacagtcttgctttgtggcctaggctggagtgtagtggtgcgatcttggctcactgcaacctctgcctcctgggttccagtgattctcctgcctaagcctcccaagtagctgggattacaggtgcccaccagaacgcccagctcatttttgtgcttctagaagagacagggtttcaccatgttggccaggctggtctccaactcctggcctcaagtgatctgcctgcctggcctcccaaagtgctgggattacaggtgtgagccactgaaccctgcctcagtacctccattcttcccacacaccctcctcacgtgctccttcctgacttctgggcccgcccttccttcttttttttttttttttgagacagcgtctcactctctcacccagaatggaatgcagtggcactatcttggctcaaaacaacctcttccacctgggttcaagcgattatcctgtctcagcctcccgagtagctgggataacaggcatgcctggctaatttttgtatcgttagtataaatgacgtttcgctatattggtctggttggtctcgaacaactgacctcaagtgatccacccatctcagcctcccaaagtaatgggattacaggcatgagctaccacacccggccttcgtttttcttttgacacagggttttgctctgtcacccaggctggagtgcagtggtgcagtcatagctcactgcagcctcaaagtcctgagttcaagcagtcctcttgcctcagcctcccaacgtgctaggatctcaggcgtgagccactgcacctagcccgaaaccaagctttctcatcccaagcgccaacctttatcaagtctagcctagtcctctattgtctcctaagtgtccctcatgagtgatcacttctgagtcctcctgcgtggagatctcacccactgggggcgtatctttcccattggaaaagtgtggttattggaagtttcctctttttagaaagaacaggattggaggtgctctctggggtgtcctcctaccaagctgactgttgaagtccttgtggtgctcaaggaggatgggtgacactcgctgttgcttcagcttcatcttgagcccacacagcgtctccactacccaggtctcctcaggctcaggggcgagctccttctccggctcctcctcagattcatctgaccactccctcttccttttccagccaagggacctacatggggggctgggatctaccccaggggctgagtaaagaaaccaggccactgtgtaatgcttctgcatctgatcaccttagaccccgacccaaaaccccaaaccactctccatcctccccagactcgcagactgctgacttctctaagccatctttctgattttctcctctgctcaaccccatgtgccgctccttcccctccccattcttctctctctctgtcctccgaacgctgcttcatgtccttccctggtccctggctctctgagtccctccttttttgttttgttttgttttgttttgacacagaatcttgctttgtcacccaggttggagtgtagtggtgcaatctcagctcactgcaacatccatctcctggattccatttattcttctgcctcagcctctcaggtggctgggattacaggtgcctgccataatgcccagctcaattttgtacttttagtagagacagggtttcaccatgttggccaggctggtctcaaactcctggcctcaagtgatccgcctgccttggcctcccaaagttctggggttacaggtgtgagccaccgcacccagcctgaatttctccattcttcccacacaccctcctcaggttctccttcctgaccgctgacccttcttttcttttcttttcttttttttttttttggagtgcagtagcgtgatctcagctcactgcaacctcttcctcccagtctcaagtgattctcctgtctcagcctcctgagtagctgggattacaggtgtgcaccactaccacttggctaatttttatacttttagtagagatggggtttcaccatattggccaggctggccttgaactcctgacctcagatgatccgcccgcctcggcctcccaaagtgctggggttacaggcgtgagccaccgcacccggcccccttccttcgtcttagtcaatcctatcccacctcttcttccaccagtcccctcacctgatggtcccaacacttcatcatccaccacctcctggagggggtaccccgaggtgctccgctggggactctgctcattctggcggtgcggttgacggctggtcgtgatctttcccgtaatctgtcccctcttacggaacctagtctccgttctgtccatggccttcttctggacactgctaggatccagaagagtatgttatcaattctcaagcctaggagaagtcaggagtggagaacagctctgagaagatactgttgtccaactgatctccaggcaccacggagtccggtccctccaatcaggaaggtcggaatctctgatgtcatcgttcatgccaacctggcaaccagtttgaaaaaaaaacacatgtaactgccaggctgatctcttgtcctggagatcctgggtgaatggtatctcctgccactgtcccaacctcagaccattgtccaaaagcatcttcagggactccacatccctctgttccctgtcccagcagaggctgtgtcctctccactcaaagcctgaagcatgttggggtctcttcgtctctgtacgtgcccatttcagagtccagtctggtgggagagggaacagagtgggaaagaaaactagggtaagcagaaacgatgaaaccttataagagtgagattatcatgtacaagagtgagattatcatgtacaagagtgagattatcatgtacaagagatcccaggaatactgacttgatgaaaaagtcacatcagagcactcagtttggcagagcttttctgctgaatgtttactcacattcactgtccaagattctgtactgggggtacatacgtcctctgccctaaggcaattttgagtccaagagacattttgaggcctaaaaatcataggaaactgcccctgagctcacacatatttccaatggagctcacacatatttccaatggtgtccccaatttcagggaatccatggattacctaagccagcccctccagttcggctaagaaactctagtctatatatcaagttttgtatcatatgtattgctctgaactcagaaatttcccttccatttatggattctatgaataaaatatcacatgtacaaaaagactaagtcgaaaaatttcagctgtgcacagtggctcatgcttgtaatcccagcactttgggtggccaagggaggaagattgcctgaggccagcagttcaagaccagta

SEQ ID NO: 586975 - DNA, 4001 bp, Homo sapiens
gatccagaagagtatgttatcaattctcaagcctaggagaagtcaggagtagagaacagctctgagaagatactgttgtccaactgatctccaggcaccacggagtccggtccctccaatcaggaaggtcggaatctctgatgtcatcgttcatgccaacctggcaaccagtttgaaaaaaaacacatgtaactgccaggctgatctcttgtcctggagatcctgggtgaatggtatctcctgccactgtcccaacctcagaccattgtccaaaagcatcttcagggactccacatccctctattccctgtcccagcagaggctgtgtcctctccactcaaagcctgaagcatgttggggtctcttcgtctctgtacatgcccatttcagagtccagtctggtgggagagggaacagagtgggaaagaaaactagggtaagcagaaacgatgaaaccttataagagtgagagtatcatgtacaagagtgagattatcatgtacaagagtgagattatcacgtacaagagatcccaggaatactgacttgatgaaaaagtcacatcagagcactcagtttggcagagcttttctgccgaatgtttactcacattcactgtccgagattctatactgggggtacacacgtcctctgccctaaggcaattttgagtccaagagacattttgaggcctaaaaatcataggaaactgcccctgagctcacacatatttccaatggtgtccccagtttcagggaatccatggattacctaagccagcccctccagttcggctaagaaactctagtctatatatcaagttttgtatcatatgtattgctctgaactcagaaatttcccttccatttatggattctatgaataaaatatcacatgtacaaaaagactaagtcaaaaaatttcagctgtgcacagtggctcatgcttgtaatcccagcactttgggtggccaagggaggaagattgcctgaggccagcagttcgagaccagtataggcaacatagcaagagcccatctctaaaaaaacaaaaccaaaccaaattagccaggtgtggtggctggcacctgtgttccaactacttgggagactcatgtgacaggaagatcacttgagcccaggagttagaagctgcagtgagccgtgatcttgccactgcactccagtctgggcaacacagcaagatactgtgtcaaaaaaattttttttgataaaaaataaaagagttacatgacattcagagaccatccaaaaaacctgtgggttcccggctgggctcagtggctcatgcctgtaatcccagcactttgggaggccaaagtgggtggatcacttgaggtcaggagtttgagaccagcctggacaacatggtgaaaccccatctctactaaaaatacaaaaaattagccaggcatggtggtggatgcctgtaatcgcagctactcaggagagggcgctggagaatcacttgaactcatggtgcgcaggttgcagggagccaagatggcaccattgtgctccagcctgggcaacaagagcaaaactccatctcaaaaaaaataaagaacctgcgagtgagttcccacacgttttcctaatgggctgctgctttcctaggagtctctcgctcatagaaaaggcacaaactgaaagaggaagcagatcccattgctgtggaagtcccattgttaggaagctctgcttttctggagttcaaattcgcattcatgacgctttaaaccgtcagagctgggtgggtcctcctacaacaaaatagtttgctctctctctcctagttaacaggctttcaaatattagaagatcaatgttctgaccccattaaaatttctcttttgtggaatgaaaagctctgatttaacccatcttcaaggctggtttgatggaggaataggggctgagtcacctgcatttcccctccctgcacaaagtcctgggcccagatctggggtctgtctctgctgagggtggggtgaaccaggaagcacctccttcttcatctccttgatgaatgggtataatggttgccatggaactggggcttgtttgatgacctggggctgggtgggcctctgagagcctttatagctgattgccttttgggagaggggaggtgggagccccaccctgtctcatgagtcaccccaaaggtgcatgggcaggcaggtgctggggaatcggctactccccagagcttggcgtggccatccctgtggcccctctgggagtctggagcccattccctcacactggtactcactgcagctggggacatctgcactaggaagacaggacacggcatggaagctggcctctgcccagaagccatgacattctggtcaccagcctgatgctataaaacgagtgtcacggccgggcatggtggttcacacctgtaatcccagcactttaggaggccaaggcgggtggatcatgaggtctggagttcgagaccagcctggccaacatggcgaaatcccgtctctactaaaaataagaacattagccaggtgtggtggcacatacctgtagtcccagctcctctggaggctgaggcaggagaatcacttaaacccaggaggcggagattgcagtgagccgagaccacggcattggactccaggctgggcaacagagcacgactccatctcaaaaacaaacaaaaaaaaaagagtgtcacctggggctacttggccagacacagagagcaaggagacatccctattatctgtcaaaaataattgttggggctgagcacagtggctcatgcctgtaatctcagcactttgggaggtcggggcaggaggacttgaggcctagagtttgagaccagcctgggcaacatagcgagcaccccatctccagaaaaaatttaaaacttggctgggcgcagtggctcatgcctgtaatcccagcactttgggaggccgagggggatggatcatttgaggtcaggagtttgagaccagcctggccaacatggtgaaaccccatctctactaaaaatacaaaaattagccgggcatggtggtgggcacctgtaatcctagctacttgggaggctgaggcaggagaatcgcttgaacccaggaggcggtggttgtagtgagctaggatcatgccattgcagtccagcctggacagcaaagctagactccatctcaaaaaaaaaagaaaagaaaaagtaaaaaatttaaaaattagatgggcatggtgacatgtgcctgtaatcccaggtactaaggaagctgaggtaggaggatgacttgagcctaggagttcgaggctgcacaattattgtgccagacccctaggttaacagtgaggattcagtgggagaactaaacagataaacagatccagtccccgccctcagagagttacagtttaatgggaaaaagagacattcaccaaagaaggacacagcccactagtgagttacactcgagagggatcatttacagaacaaagcagattataaaaatacagcgattggctgggtgcagtggctcacgcctgtaatcccagcactttgggaggcagagacgggcggatgacttgaggtcaggagttctcaaccagcctggccaaaatggtgaaaccccatctctactaaaaacacaaaaattaaccaggcgtggtggtgggcacctgtaatcctagctacttgggaggctgaggcaggagaatgaatcgcttgaacccaggaggtggaggttgcagtgagccgagaccgcaccattgcactctagcctgggcaacaagagcaaaactccgtctcaaaataaatacatacatacatacatgcatacatacatacagggattaaaatagtctagtactgacacctgaacagacagattgatccaagaaatgaaacagaaattccagaagttgacctgaacacacacacacacacacacacacacacacacacacacacgaaggcgtgaaagactccat

SEQ ID NO: 586976 - DNA, 4001 bp, Homo sapiens
gatccagaagagtatgttatcaattctcaagcctaggagaagtcaggagtagagaacagctctgagaagatactgttgtccaactgatctccaggcaccacggagtccggtccctccaatcaggaaggtcggaatctctgatgtcatcgttcatgccaacctggcaaccagtttgaaaaaaaacacatgtaactgccaggctgatctcttgtcctggagatcctgggtgaatggtatctcctgccactgtcccaacctcagaccattgtccaaaagcatcttcagggactccacatccctctattccctgtcccagcagaggctgtgtcctctccactcaaagcctgaagcatgttggggtctcttcgtctctgtacatgcccatttcagagtccagtctggtgggagagggaacagagtgggaaagaaaactagggtaagcagaaacgatgaaaccttataagagtgagagtatcatgtacaagagtgagattatcatgtacaagagtgagattatcacgtacaagagatcccaggaatactgacttgatgaaaaagtcacatcagagcactcagtttggcagagcttttctgccgaatgtttactcacattcactgtccgagattctatactgggggtacacacgtcctctgccctaaggcaattttgagtccaagagacattttgaggcctaaaaatcataggaaactgcccctgagctcacacatatttccaatggtgtccccagtttcagggaatccatggattacctaagccagcccctccagttcggctaagaaactctagtctatatatcaagttttgtatcatatgtattgctctgaactcagaaatttcccttccatttatggattctatgaataaaatatcacatgtacaaaaagactaagtcaaaaaatttcagctgtgcacagtggctcatgcttgtaatcccagcactttgggtggccaagggaggaagattgcctgaggccagcagttcgagaccagtataggcaacatagcaagagcccatctctaaaaaaacaaaaccaaaccaaattagccaggtgtggtggctggcacctgtgttccaactacttgggagactcatgtgacaggaagatcacttgagcccaggagttagaagctgcagtgagccgtgatcttgccactgcactccagtctgggcaacacagcaagatactgtgtcaaaaaaagtttttttgataaaaaataaaagagttacatgacattcagagaccatccaaaaaacctgtgggttcccggctgggctcagtggctcatgcctgtaatcccagcactttgggaggccaaagtgggtggatcacttgaggtcaggagtttgagaccagcctggacaacatggtgaaaccccatctctactaaaaatacaaaaaattagccaggcatggtggtggattcctgtaatcgcagctactcaggagagggcgctggagaatcacttgaactcatggtgcgcaggttgcagggagccaagatggcaccattgtgctccagcctgggcaacaagagcaaaactccatctcaaaaaaaataaagaacctgcgagtgagttcccacacgttttcctaatgggctgctgctttcctaggagtctctcgctcatagaaaaggcacaaactgaaagaggaagcagatcccattgctgtggaagtcccattgttaggaagctctgcttttctggagttcaaattcgcattcatgacgctttaaaccgtcagagctgggtgggtcctcctacaacaaaatagtttgctctctctctcctagttaacaggctttcaaatattagaagatcaatgttctgaccccattaaaatttctcttttgtggaatgaaaagctctgatttaacccatcttcaaggctggtttgatggaggaataggggctgagtcagctgcatttcccctccctgcacaaagtcctgggcccagatctggggtctgtctctgctgagggtggggtgaaccaggaagcacctccttcttcatctccttgatgaatgggtataatggttgccatggaactggggcttgtttgatgacctggggctgggtgggcctctgagagcctttatagctgattgccttttgggagaggggaggtgggagccccaccctgtctcatgagtcaccccaaaggtgcatgggcaggcaggtgctggggaatcggctactccccagagcttggcgtggccatccctgtggcccctctgggagtctggagcccattccctcacactggtactcactgcagctggggacatctgcactaggaagacaggacacggcatggaagctggcctctgcccagaagccatgacattctggtcaccagcctgatgctataaaacgagtgtcacggccgggcatggtggttcacacctgtaatcccagcactttaggaggccaaggcgggtggatcatgaggtctggagttcgagaccagcctggccaacatggcgaaatcccgtctctactaaaaataagaacattagccaggtgtggtggcacatacctgtagtcccagctcctctggaggctgaggcaggagaatcacttaaacccaggaggcggagattgcagtgagccgagaccacggcattggactccaggctgggcaacagagcacgactccatctcaaaaacaaacaaaaaaaaagagtgtcacctggggctacttggccagacacagagagcaaggagacatccctattatctgtcaaaaataattgttggggctgagcacagtggctcatgcctgtaatctcagcactttgggaggtcggggcaggaggacttgaggcctagagtttgagaccagcctgggcaacatagcgagcaccccatctccagaaaaaatttaaaaattggctgggcgcagtggctcatgcctgtaatcccagcactttgggaggccgagggggatggatcatttgaggtcaggagtttgagaccagcctggccaacatggtgaaaccccatctctactaaaaatacaaaaattagccgggcatggtggtgggcacctgtaatcctagctacttgggaggctgaggcaggagaatcgcttgaacccaggaggcggtggttgtagtgagctaggatcatgccattgcagtccagcctggacagcaaagctagactccatctcaaaaaaaaaagaaaagaaaaagtaaaaaatttaaaaattagatgggcatggtgacatgtgcctgtaatcccaggtactaaggaagctgaggtaggaggatgacttgagcctaggagttcgaggctgcacaattattgtgccagacccctaggttaacagtgaggattcagtgggagaactaaacagataaacagatccagtccccgccctcagagagttacagtttaatgggaaaaagagacattcaccaaagaaggacacagcccactagtgagttacactcgagagggatcatttacagaacaaagcagattataaaaatacagcgattggctgggtgcagtggctcacgcctgtaatcccagcactttgggaggcagagacgggcggatgacttgaggtcaggagttctcaaccagcctggccaaaatggtgaaaccccatctctactaaaaacacaaaaattaaccaggcgtggtggtgggcacctgtaatcctagctacttgggaggctgaggcaggagaatgaatcgcttgaacccaggaggtggaggttgcagtgagccgagaccgcaccattgcactctagcctgggcaacaagagcaaaactccgtctcaaaataaatacatacatacatacatgcatacatacatacagggattaaaatagtctagtactgacacctgaacagacagattgatccaagaaatgaaacagaaattccagaagttgacctgaacacacacacacacacacacacacacacacacacacacacgaaggcgtgaaagactccatg

SEQ ID NO: 586977 - DNA, 4001 bp, Homo sapiens; identical to SEQ ID NO: 586975

SEQ ID NO: 586978 - DNA, 4001 bp, Homo sapiens; identical to SEQ ID NO: 586976

SEQ ID NO: 586979 - DNA, 4001 bp, Homo sapiens
ctcacccagactggagtgcagtagcacgatctcggctcactgcaccctcttcctcccaggctcaagcgattctcctgtctcagcctcccgagtagctggaactacaggcatgagctactgtgcccagccttggtttttcttttgacgcagagttttgctctgtcactcaggctggagtgcagtggtgcagtcatagctcactgcagcctcgaagtcctgagttcaagcaatcctcttgcctcagcctcccaacgtgctgggatctcaggcgggagccacagcgcctggcccaaaaccaagctttcttatcccaagcaccgacctttatcaagtctacctaatcctctgttgtctcctaagtgtccctcatgagtgatcacttcagagtcctcccgcatggagagctcacccactggggcatatttttcccattggaaaagtgtggttattggaagtttcctctttttagaaagaacaggattggaggtgctctctggggtgtcctcctaccaagcagcctgttgaaggcctcgtagtactcagggagcacgagcgacactcgccgtcgcttcgccttcatcttgaggccacacagcgtctccgccacccaggtctcctcaggctcaggggcgagctccttctctggctcatcatcagattcatccaaacactccctcttccttttgcagccaagggacctacgtggggggctgggatctaccccaggggctgagtaaagaaaccaggccaccgtgtaatgcttctgcaactgatcacgttagaccccgaccccaaaccccaaaccattctccatcctccccagcctctcagactgctggcttctccaagccacctttctgactttctcctctgctcaaccccatgtgccactccttcccctccccattcttccctctctctgtcctcagaacactgcgtcatatcgttccctggtccctggctctctgaggccctctttttttttttttgtttcgagacagaatcttgctttgtcacccaggctggagtgtagtggtacaatctcagctcactgcaacatccatctcccggattccagttattctcctgcctcagcctctcaggtagctgggattacaggtgcctgccataatgcccagctcaattttgtacttttagtagagacggggtttcgccatgttggccaggctggtctcaaactcttggcctcacgtgatccgcctgccttggcttcccaaagtgctgggattacaggtgtgagccactgcacccagcctgaatttctccattcttcccacacaccctccccaggttctccttcctgacctctgacccttcttttttttcttcttctttttttttttttttttttgagacagcgtctcactctctcacccagactggagtgcagtagcacgatctcggctcactgcaccctcttcctcccaggctcaagcgattctcctgtctcagcctcccgagtagctgggattataggcacacaccactaccgcctggctaatttttgtacttttagtagagatggggtttcaccatgttggccaggctggtcttgaactgctgacctcaggtgatctgcccgcctcggcctcccaaagtgttggtgttacaggggtgagctaccgcacctggcccccttccttcgtcttagtcaatcctatgccacctcttcttcctccagtcccctcacctgatggtcccgacacttcatcatccaccacctcctggagggggtaccctgaggtgctccgctgggggctctgctcttcctggggctgcggttgatggctcgtcatgatctttcccaaaatctgtccaatctcaccgaagctagtctctgttctgtccttggtcttcttctggacactgctgggatccagaagagtgtgttatcaattctcgaggctgggagaagtcaggagtggagaacagctctgagaagttactgttgttcacctgaactgccaggcgccgacagagtccggtccttccaatcaggaaggtcggaatctctgatgtcataggtcattccaacctggcaaccagtttgaacaaaaacacatgtaactgccaggctgatctcttgtcctggagatcctgggtgaatggtatctcctgccactgtcccaacctcagaccactgtccaaaagcatcttcagggtctccgcatccctctgttccctgtcccagcagaggctgtgtcctctccactcaaagcttgaagcgtgttggggtctcctcttctctgtacatgcccgtttcagagtccagtctggtgggagagggatcaggatgggaaagaaaactagggtaagcagaaacgatgaaaccttataagagtgagagtatcatgtacaagagatcccaggaacattgacttgatgaaaaagtcacatcagagcactcaatttggcagagcttttctgccgaatgtttactgatattcactgtccgagattctgtactgggtgtaacgtgtcctctgccctaaggcatctttgagtccaagagatattttgaggactggaaatcatcggaaactgcccatgagctcacacatatttccaatggtgtccccagtttcagggagtccacggatcacctaaagccagcccctccagtttggctaagaaactctatatatcaagttttgtatcatatgtattgctcttaactcagaaattccaccatttatagcagtggtttatttatttatactattgaaggaaatggtttatttatgaatctatattatggatattctataagatactgggtgtacaaaaagactaagtcgaaaaatctcagctgtgcacagtggctcatgcttgcaatcccatctctttgggtggccaagggaggaagactgcctgaggccagcagttcaagaccagtgtaggcaacatagcaagaccccatctcaaacaaaacaaaacaaaacagaacaaaattagccaggtgtcgtggctggcacctgtgttccaacaacttgagagactgaggtggcaggaggattgcttgagcctaggagttaggggctgcagtgagctgtgatcgtgacaccgcactccagtctgggcaacacagcaagaccttgtgtcaaaaaaatttttttaattaaatataaaagagtttcatgacattcagagaccatccaaagaacctgtgggttccggccaggcacagtggctcacgcctgtaatcccagcgctttgggaggccatagcaggtggatcgcttgaggtcaggagtttaagagcagcctggccaacatggtgaaaccccatctcttctaaaaatacaaaaaattagtcaggcatggtggtgggtgcctgtaatcccagccactcaggaggcgggggcagcagaatggcttaaacttgggaggcggaggttgcagtgagccaaggtcgcaccattgcactccagcctgggcaacaagagcaaaactacatctcaaaaaaaaaaaaaaaacaaacaaaaagaacctgtggatgagttcccacatggcttcctaacgggctgcggctctcctaggagtctctcgctcatgggaaaggcacaaactgaatgtggaaggaaatcccattgctgtggaagtcccattgttaggaagctctgcttttctggagttcaaatttgcattcatgacgctttaaaccgtcagagctgggtgtgtcctcctacaacaaatcactttactctctctctctcctagttaacaggctttcaaatattagaacatccatgttctgacctcattaaaattgctcttttgtggaatgaaaagctctgatttaacccgtctttaagcctggtatgcatattcctctctgttccggccaccttgtctagacacactacactgaggcagtgcccatcttagatgatgttgatacattgtcaaaaaatgggcaaaccaggcgcggtggctcacacttgtaatcccagcacttttggaagccgatgccgacagata

SEQ ID NO: 586980 - DNA, 4001 bp, Homo sapiens
gaaaagtgtggttattggaagtttcctgtttttggaaagaacaggattggaggtgctctctggggtgtcctcctaccaagcagcctgttgaaggcctcgtggtgctcagggagcacgagcgacactcgccgtcgcttcagcttcatcttgaggccacacagcatctccgccacccagatctcctcaggctcaggggcgagcaccttccgtggctcctcctccaacgactcctcagattcgtcccaccactccatcttccttttccagcaaaaggacctatgcggggggctgggatctaccccaggggctgagtaaagaaaccaggccatggtgtaatgcttctgcagttgatcacactagagcccaacccaaaaccccaaaccactctccatcctccccagcctcgcagactgctggcttctccaagccatctttccttctgtctgtctcctctgctgagctccatgtgctgctccttctcctccccattctcccgtttctctgtcctcagaacacttcctcatatccttccctggtccctggctctctgagtcccttttttttttttttttttttgttgttgttgttgttgttgagaaacagtcttgctttgtggcctaggctggagtgtagtggtgcgatcttggctcactgcaacctccgcctcctgggttccagtgattctcctgcctaagcctcccaagtagctgggattacaggtgcccaccagaacgcccagctcatttttgtgcttctagaagagacagggtttcaccatgttggccaggctggtctccaactcctggcctcaagtgatctgcctgcctggcctcccaaagtgctgggattacaggtgtgagccagtgcaccctgcctcagtacctccattcttcccacacaccctcctcacgtgctccttcctgacttctgggcccttccttccttctttttttttttttttttttgacacagcgtctcaaaaaaatgcagtggcgctatcttggctcaaagcaacctcttccacctgggttcaagcaattatcctgtctcagcctcccgagtagctgggataacaggcatgcctggctaatttttgtattgttagtataaatgaggtttcgctatattggtctggttggtctcgaacaactgacctcaagtgatccacccatcttagcctcccaaagtaatgggattacaggcatgagctaccacacccggccttcgtttttcttttgacacagggttttgctgtgtcacccaggctggagtgcagtggtgcagtcatagctcactgcagcctcaaagtcctgagttcaagcaatcctcttgcctcagcctcccaacgtgctaggatctcaggcgtgagccactgcacctggcccgaaaccaagctttctcatcccaagcgccaacctttatcaagtctagcctagtcctctatcgtctcctaagtgtccctcatgagtgatcacttctgagtcctcctgcgtggagagctcacccacggggggcgtatctttcccattggaaaagtgtggttattggaagtttcctctttttagaaagaacaggattggaggtgctctctggggtgtcctcctaccaagctgactgttgaagcccttgtggtgctcagggaggatgggtgacactcgctgttgcttcagcttcatcttgagcccacacagcatctccactacccaggtctcctcaggttcaggggcgagctccttctccggctcctccgcagattcatctgaccactccctcttccttttccagccaagggacctacatggggggctgggatctaccccaggggctgagtaaagaaaccaggccaccgtgtaatgcttctgcatctgatcaccttagaccccgacccaaaaccccaaaccactctccatcctccccagactcgcagactgctggcttctctaagccatctttctgattttctcctctgctcaaccccatgtgccgctccttcccctccccattcttctctctctctgtcctccgaacactgcttcatgtccttccctggtctctggctctctgagtccctccttttttgttttgttttgttttgacacagaatcttgctttgtcacccaggctggagtgtagtggtgcaatctcagctcactgcaacatccatctcctggattccatttattcttctgcctcagcctctcaggtagctgggattacaggtgcctgccataatgcccagctccattttgtacttttagtagagacagggtttcaccatgttggccaggctggtctcaaactcctggcctcaagtgatccgcctgccttggcctcccaaagttctggggttacaggtgtaagccaccacacccagcctgaatttctccattcttcccacacaccctcctcaggttctccttcctgaccgctgacccttcttttcttttcttttttttttttttttggagtgcagtagcgtgatctcagctcactgcaacctcttcctcccagtctcaagtgattcgcctgtctcagcctcctgagtagctgggattacaggtgtgcaccactaccacttggctaatttttatacttttagtagagatagggtttcaccatattggccaggctggccttgaactcctgacctcaggtgatccgcccgcctcggcctcccaaagtgctggggttacaggcgtgagccaccgcacctggcccccttccttcgtcttagtcaatcctatcccacctcttcttccaccagtcccctcacctgatggtcccaacacttcatcatccaccacctcctggagggggtaccccgaggtgctccgctggggactctgctcattctggggttgcggttgacggctggtcgtgatcttttccgtaatctgtcccctcttacggaacctagtctccgttctgtccatggccttcttctgatcactgctaggatccagaagagtatgttatcaattctcaagcctaggagaagtcaggagtggagaacagctctgagaagatactgttgtccaactgatctccaggcaccacggagtccggtccctccaatcaggatggtcggaatctctgatgtcatcgctcatgccaacctggcaaccagtttgaaaaaaaacacatgtaactgccaggctgatctcttgtcctggagatcctgggtgaatggtatctcctgccactgtcccaacctcagaccattgtccaaaagcatcttcagggactccacatccctctgttccctgtcccagcagaggctgtgtcctctccactcaaagcctgaagcatgttggggtctctttgtctctgtacatgcccatttcagagtccagtctggtgggagagggaacagagtgggaaagaaaactagggtaagcagaaacgatgaaaccttataagagtgagattatcatgtacaagagtgagattatcatgtacaagagtgagattatcatgtacaagagatcccaggaatactgacttgatgaaaaagtcacatcagagcactcagtttggcagagcttttctgccgaatgtttactcacattcactgtccgagattctatactgggggtacacacgtcctctgccctaaggcaattttgagtccaagagacattttgaggcctaaaaatcataggaaactgcccctgagctcacacatatttccaatggtgtccccaatttcagggaatccatggattacctaagccagcccctccagttcggctaagaaactctagtctatatatcaagttttgtatcatatgtattgctctgaactcagaaatttcccttccatttatggattctatgaataaaatatcacatgtacaaaaagactaagtcgaaaatttcagctgtgcacagtggctcatgcttgtaatcccagcactttgggtggccaagggaggaagattgcctgaggccagcagttcaagaccagtataggcaacatagtaagagcccatctctaaaaa

SEQ ID NO: 586981 - DNA, 4001 bp, Homo sapiens
tgctagcatctcaggcgtgagccactgcacctggcccgaaaccaagctttctcatcccaagcgccaacctttatcaagtctagcctagtcctctatcgtctcctaagtgtccctcatgagtgatcacttctgagtcctcctgcgtggagagctcagctactgggggcgtatctttcccattggaaaagtgtggttattggaagtttcctctttttagaaagaacaggattggaggtgctctctggggtatcctcctaccaagctgactgttgaagtccttgtggtgctcagggaggatggatgacactcgctgttgcttcagcttcatcttgagcccacacagcatctccactacccaggtctcctcaggctcaggggcgagctccttctccggctcctcctcagattcatctgaccactccctcttccttttccagccaagggacctacatggggggctgggatctaccccaggggctgagtaaagaaaccaggccaccgtgtaatgcttctgcatctgatcaccttagaccccgacccaaaaccccaaaccactctccatcctccccagacttgcagactgctggcttctctaagccatctttctgattttctcctctgctcgaccccatgtgccgctccttcccctccccattcttctctctctctgtcctccgaacactgcttcatgtccttccctggtccctggctctctgagtccctccttttttgttttgttttgttttgacacagaatcttgctttgtcacccaggctggagtgtagtggtgcaatctcagctcactgcaacatccatctcctggattccatttattcttctgcctcagcctctcaggtagctgggattacaggtgcctgccataatgcccagctcaattttgtacttttagtagagacagggtttcaccatgttggccaggctggtctcaaactcctggcctcaagtgatccgcctgccttggcctcccaaagttctgggcttacaggtgtgagccactgcacccagcctgaatttctccattcttcccacacaccctcctcaggttctccttcctgaccactgacccttcttttctttttttttttttttggagtgcagtagtgtgctctcagctcactgcaacctcttcctcccagtctcaagtgattctcctgtctcagcctcctgagtagctgggattacaggtgtgcaccactacaacttggctaatttttatacttttagtagagatggggtttcaccatattggccaggctggccttgatctcctgacctcaggtgatccgcccgcctcggcctcccaaagtgctggggttacaggcgtgagccaccgcacccggcccccttccttcgtcttagtcaatcctatcccacctcttcttccaccagtcccctcacctgatggtcccaacatttcatcatccaccacctcctggagggggtaccccgaggtgctccgctggggactctgctcattctgggggtgcggttgacggctggtcgtgatctttcccgtaatctgtcccctcttacggaacctagtctccgttctgtccatggccttcttctggacacttctaggatccagaagagtatgttatcaattctcaagcctaggagaagtcaggagtagagaacagctctgagaagatactgttgtccaactgatctccaggcaccacggagtccggtccctccaatcaggaaggtcggaatctctgatgtcatcgttcatgccaacctggcaaccagtttgaaaaaaaacacatgtaactgccaggctgatctcttgtcctggagatcctgggtgaatggtatctcctgccactgtcccaacctcagaccattgtccaaaagcatcttcagggactccacatccctctattccctgtcccagcagaggctgtgtcctctccactcaaagcctgaagcatgttggggtctcttcgtctctgtacatgcccatttcagagtccagtctggtgggagagggaacagagtgggaaagaaaactagggtaagcagaaacgatgaaaccttataagagtgagagtatcatgtacaagagtgagattatcatgtacaagagtgagattatcacgtacaagagatcccaggaatactgacttgatgaaaaagtcacatcagagcactcagtttggcagagcttttctgccgaatgtttactcacattcactgtccgagattctatactgggggtacacacgtcctctgccctaaggcaattttgagtccaagagacattttgaggcctaaaaatcataggaaactgcccctgagctcacacatatttccaatggtgtccccagtttcagggaatccatggattacctaagccagcccctccagttcggctaagaaactctagtctatatatcaagttttgtatcatatgtattgctctgaactcagaaatttcccttccatttatggattctatgaataaaatatcacatgtacaaaaagactaagtcaaaaaatttcagctgtgcacagtggctcatgcttgtaatcccagcactttgggtggccaagggaggaagattgcctgaggccagcagttcgagaccagtataggcaacatagcaagagcccatctctaaaaaaacaaaaccaaaccaaattagccaggtgtggtggctggcacctgtgttccaactacttgggagactcatgtgacaggaagatcacttgagcccaggagttagaagctgcagtgagccgtgatcttgccactgcactccagtctgggcaacacagcaagatactgtgtcaaaaaaattttttttgataaaaaataaaagagttacatgacattcagagaccatccaaaaaacctgtgggttcccggctgggctcagtggctcatgcctgtaatcccagcactttgggaggccaaagtgggtggatcacttgaggtcaggagtttgagaccagcctggacaacatggtgaaaccccatctctactaaaaatacaaaaaattagccaggcatggtggtggatgcctgtaatcgcagctactcaggagagggcgctggagaatcacttgaactcatggtgcgcaggttgcagggagccaagatggcaccattgtgctccagcctgggcaacaagagcaaaactccatctcaaaaaaaataaagaacctgcgagtgagttcccacacgttttcctaatgggctgctgctttcctaggagtctctcgctcatagaaaaggcacaaactgaaagaggaagcagatcccattgctgtggaagtcccattgttaggaagctctgcttttctggagttcaaattcgcattcatgacgctttaaaccgtcagagctgggtgggtcctcctacaacaaaatagtttgctctctctctcctagttaacaggctttcaaatattagaagatcaatgttctgaccccattaaaatttctcttttgtggaatgaaaagctctgatttaacccatcttcaagcctggtttgcatattcctctctcttccggccaccttgtctagacacactacactgaggccatgcccatcacaaatgatgtcgatacattgtcaaaaaattggcaaaccaggcgcggtggctcatgcctgtaatcctaccactttaagaagcagaggcagacagatcaccagaggtcagaagttcgagaccagcctgtccaacatgtttaaatccatctctactaaaaatacagaaaaaatgagctgggcgtgggggtgcacatctgtaatcccagctacttgggaggctgaggcaggagaatcacttgaacctggaagtcagaggttgcagtgagccaagattgcatcactgcactccagcctgggtgacagagcgagacaccatcgcaaaaaaaaaaaaaaaaaaaaaaaaaaatggctaaacagcccaggtttggtctgatatgttcagaaaaaagcaaaacagtcacctctcaccttttcttttc

SEQ ID NO: 586982 - DNA, 4001 bp, Homo sapiens
aaaacaaaactaggttgaattcataagaacaaacatctcctctggacgtgtctgggttataccaacagtatatttactgcacacagtgacctcatgaactagggaagtgtcctctctcaatgtaagatagcacctgtcaatgtaagatagcacctgtcatacaactcagaatgcagacaagtgaaaggtcttggggagctgaccttaattgcttctctgggtcaacaggccagaacacctaataaggacatggaggggctgacctagtaacagcatctgcatcaaagagaaactacactgttcacaagattaactttctgatactaagaagggaacagtaacttccttatttagaagctggtgggtttttaccatatttcctaagggggtgaatgattagcaatcaagttcaacccaaagaaagtgcccattagaatcgagctatgtaattactaatatatgtctttaagttgtacaaacaagcgtttatatttaccagatcttgaattttttcgcttgaaaccatcctggaccctttaattcaaccacaagtttgctttcgaactgaactcacataaatacgagtaacactttgtcctcatttattctgaacattcagaaataaaaaactaaaataagaaacaactttttttttcttttgcagaagcaaagggactcagtaccacaggaagttcgcttttctgtgtcactatatcaaaagctaccacaaatgcagacaataacggctctttaatattaaagggaaaagctaacctgtccagctacagcagcaaagtaaccatacagcggatcctgagtttgtccgggaaacgcaggccctccgggagcccctccatactgtgaaacaggaaacacatacacgtcattctgccgaatcaagttttcttctttcaccactgagggcttttgtgcaaggccagacaactgcccgcctgcccgcccttcacaaggctcacctccccaccaccgggcacactctgccaacactccacccctctcttccattcacaccccgtaatttaaaaactggcgacttagaccataaagagttgctgtgaaagtgatgtctacatatgtaaagcaacttttaaaatccctattaacctgaaggttactgaggtgagtgcaaactaggtaagccaacgaatggcagggcttcaaattctccttttgttgttacagcatttatggtattttaagagcgttttatgaacgatggaaggctggagttggtaacattctgagacgggtgtagcctagggaagagtaaggtgtccggccgggctgtatctcgtgggtggcgagggaacattgcctgtctcggaaacagttcccaagacaacgcgcatcccagacgcccggcgaggctgccttcctacaggtcttttacttcagcaggttttccctttttttccgtcccccttctcactcgttttttgtttgtttgtttgtttgtttgtttgtttgttttttaaagggaggaaggtatatcattctagaataaaatgactgttgttgctctgggaggcaaccaagaaggcgggggtggggtggggtgggggtcagccaacacccaattaacacgatttcacgccgcgtatccgagaagccgcagggtgggcttctagggtcccaatccaccctcaccttggccccgcagggccatccaggagaagggacggggaaacgtggggagaggccgaaccccaggggcctagggcgaggccgcgagcgcagggagaagccgagggcggaaggagcccgggtagccgcccagcagcgcctcaccccgctggccgcagcatctccaaggtggcctcttagcgccccggagccgcctgggccgcgatcccgcgcagtcagcacttaccccgcctgggtagtacccgccgccggcgccaggatgccccgggtacgccatgctgcagactgcgccgcagccgccctcgccctgtgcgccaggcctctccgccccctgccccgccccgccctgccgctagggggccgccccagagcgcaccacgcgggcgtgggggacgcgctccgcagtcgtctccagctcttgcctgtgcgcgcggccgtggctcccctgcctgcgcgcttcttcgtatctttgccattacggcgctaatgcagtgcacgactgaaggtccagtggcggcctacgacctgcgaggcaattcacaccagggactttcctccctccaaaactaatggcacattccaacaccaatacaccaccccaggaattctttttttttttttttccttcggacttggctattatctggcacatttcttattttaaacaactttattggacaggacggagctattataagcggagcgcaccatcgcgaggcaggggctggatgcgttagggcaagccttaggtgccagtgggtgaaggagtctttgaaagatggaaatacgaaagcgcccttggaaaataagaattaacttgacgaactgtgtgcaagggagagtttggcttgctgttggttgcagagttcactgaacgacaacggcgtatttccttcctaggggacaattccttgcctgtttaagctgagcgtgacttgtgtcctgagtaggacagagggcattttccgggcaggacagactcacacatatcgttcttaggaaaatgaattgtttgaattatctggatgattcagacaaaacaatccatttccctaaaagtattcagctactttttatataagaaaagtttagaacaaactaatagtgtactggtaagtattcaggaagataagagataggaacttctatgtaggttattcttctttacttcatatatttttctatcttccagttgaatagtccgaagcaattcaggcgtgagctttttgttttgttttgtgtaatttcaatgacagaaaattgcttgcccttcactgttaaggactagacttaatgatttcctgaattttaacgtattgagaaacgcattaataagcaagattcacagtatttgttgtggaggttgcacagaaacatttaaagggtcatcaacatttcacaaatattggagcacccgccaatgtggtactgtgctttttcgctgtggtggacgggcttcctccattctaaattcgtgggctattgtcctcattcggttcattgtttttctcttgtgtgtaacttccctcgcaagcccttttgaaaaccaaagtccgaattgtgagaaaaattctaatagtccctgttgtggcatagcaaagacactgcatgttgcctgttttgtgtttgattcaggaagcaggttactgttttcaatcatcaaggtagcaatcatcaaggtagatgagacatctaatgagtcccctggtctctctttggaagcctgtttcttcagaaagaggtaaccgactataaagagtagatgtcagggccgaactcgatgttgagtacaagctcaagactcaagtttgaaagaagtataaagcatataaaatatttttaagtactgcagaattagcttcgtggataaacggctatacgaattggcatatcagttgtccttagacatcttcccactgctttactgctaaagaattgaattttttttttaattacactttaagttttagggtacatgtgaacattgtgcaggttggttacatatgtatacatgtgccatgctggtgcgctgcacccactaactcgtcatctagcattaggtatatctcccaatgctatccctctcccctccccccaccccaccacagtccctagagtgtgatattccccttcctgtgtccatgtgatctcatcgttcagttcccacctatgagtgagaatatgcggtgtttggttttttggtcttgcgatagtttactgagaatgatgatttccaatttcatccatgtccctacaaaggacatgaactcatcattttttatggctgcatagtattccatggtgtatatgtgccacattttcttaatccagtctat

SEQ ID NO: 586983 - DNA, 4001 bp, Homo sapiens
tcatctgtgttggcttcctcctccctggaactcagagaaagcaaactcattctacttgcctggaataggcatgataagcaagataaatcagttattaacaaaacacagcaagggcagtcatcagctctgtgacaaacgttcccatgttcctgttcctacagaatagattctcactgacctgttccttcccttaatgaagctctgagctggagttgatgatcaggattaaccaggaagctgatgttggaggaatttattatggctaaatatatatgcctatatacatatatgtgtatgtatgtatatcattgtacatatgtaaatatatgtgtgtatttttacaaacacacacacactttatatatatactttcttatcattagggctgtcaaaaatgaccttccaaagatgagttccccatcactagaagtgatcaagaagaggctgtcagtgatgctaaagggcagttttgtactttgagtaggggcctggatgagttaatgctctatggactacaaagtattttctgatggcctacttaaactttacccagccatgccagttagattatttctactttacaagatgaggaaactgagactctgacttgctgaaggttaccagactaatagcaattccagtattaattgcttatcttgtcacttcagatcttttctcaacctcacgctattctctcaggactcttccttttaagattatgcaatttctattggatcaagaatttggagacattgttttttcttttcctgaacagaatgtgtttcagaaatcagaatattaaatttaaagcaattgtctaaaataatgtacatctaggtaatgctattactatcaatgataagagttcattttagtgcagataattattttttgatgaacaagatgtaaatatgcatggctaaaggggtagctaaagggaggtcaagaaatgaatgcaagaactggctgtaattagtttttgtctgaggcttgtactgattatcaagtctctacatcttttacttgtgaccattaccatgtctgggaccacatagaaagcagaatattgaatactggacctgtatgctcaggtagaaaatcacctgtgttcagcaccagtgttctcttaggatgactcttcctaagaacattggactagtatattatgggggtgttaattctaaaagctaatttttgcaacctaggtctattttttcataaaggtcactttatgactggttctcaggcaagccctcgaaagttctttaaagccttcattgttctcctaaagagaagcagtcctggagccggggtagagcagggtaggaacccaagagcacctagggcttggttattgcccatccccattcgcatctcagtccctttatccagccaatcttgatgtcgcaaagtttacacagaaccagagataaatagagaagccagacttgtggagagaggaggggaagataatacaatctccatctgttcaataagctgggagaggagggaatttgggaagaaaaattcccaattattcatattgcagctctggggaaggaagaatgactgttcttgagtcctaggtgcctaggtacagtagatatttccagaatgccaaaattccatgaagcatatatataagtcagctacatgtaaattgggagcttcttaattaaaataagatatctcttactttatataattatttttcagtagttacttgcctcttttccatagctgggaaatcagtggcaaagctgagaaaggaacctggattaattgattctcagcttggaaacccatggatcagtagaactacaaagattaggaactttcttattcctgattagtagaattagaacattggagctgcatggaatagtctaatattatatacatatcatttacttgcctgcatcttgagttgaagtcttataggtagaagctggtgatccttagaggattgccttcttgcagagtggccaaatagaagaatcaagaagtataaactgtaatagcagatgaatcacattgccctcttgacctctggaaatcagtaaccaactataaacattactcaacagtgtaggcagatttccaattagccctatagaggccctctatgaaatatgtttatttcattgttacaaagaatgacctatctaaggcagctaggaaccaataacaacagtattaaacacacatacaggtaaatatttgacattccttcaggattattatctctgtctgagaattctgaagacctgcagggctttgtgttggaacagtcatatgtgggagctggctcatactggccagtgagcctattttcaggcatttttccagcctttttttttttttttttgagagagtctcgccctgtctcctaggctggagtgcagtggcgcaatctcagctcactgcgacctctgcctccccagttcaggcaattctctgcctcagcctcctgaatagccgggattgcaggcacttcccaccacgcccagctaattttcgtgtttttagtagagacagggtttcaccatcttggccaggctggtcttgaactcctgacctcatgatccacccacctcggcctcccaaagtgctgggattacaggcgtgagccacggtgcctggccttttccagcctatttttaaacactgccaatcgtataattagaaattttttaacttactgaaaatcaagataataaatactccaaatgcatcaatttttaatgatttttctatatgggtagtatgtaattttgtgctgttggatgttaattctcaattccagactcagtcataccatgttagtagtttgaatttgcgaaaagttagtagtttattccactatgttgggaatatttacaccctggaaatcagtttgcactacaaacaaaagactcatttatttttatttatttatttattttttttttaattgtgtactctagatttggaggtggcattttggagaatatgttaataaggtttaaagttaaaagtgtgttgtggccgggcacggtggctcacacctgtaatcccagcactttgggaagccgagacgggcgaatcacgaggtcaggagatcaagaccatcctggctaacacggtgaaatcccatctctactaaaaatacaaaaaattagctgggcatggtggcgggcgcctgtagtcccagctacttgggaggctgaggcaggagaatggcatgaacccgggaggcggaggttgcagtgagccaagattgcaccactgcactccagcccgggcggcagagcaagactccatctcaaaaaaaaaaattttaaaaagtgtgttgtatctacagcctttacattgtgaattgcatgaacagttaaggaaatattttcccagaaatatgacatctacaaagaaacacactaattatccagcaacagatttcaatgagaaagaaatttataaaaatccttgaaaaataattcaaaataatgatactagagaagttcagtgagacataagaagacccaaataaacaatataatgaaatcagggaaataattagggacatgagtgaaaagtttaccaaagagagatatcatggtaaccaaacagaaatcctggattttattttattgaatgaagtaaaaagtacattcaagagcttcaacaatggattatatcaagcagaaaaaagaccttcagaacttgaaaacagatcttttgaaataatccagtcagacaaaaataaagaaaaaaataaaaagaatgaacagagcataagggacaccataaagtgatcaaatattcaagttttcagtgttccagaaggtgaagagaggaccaaaggaatagaaaacctatttaatgaaataatagctgaaaacttcccaagtctagcaacagatttagatatccagatacaaaaagttcagaaatccccaaatagatacaattcaagagaatcttcttcatgacatgttatagtcaaactttcagcaaaggaa

SEQ ID NO: 586984 - DNA, 4001 bp, Homo sapiens
ctacttattagctcatttaatccacacaaaccctccatggagtagacactgtcattatcaaccctcttttacagaagagaaaactaaagcagagaggttaaatagcttggcccaaggtcatacagctagcaaatggtaaagctggaaaacaaatccaggcactccagctccagaggcaactatacatactgcctctcataatatttacagcaggttcagaataatgtgtggtggggttttaagtctcataaactaattacaaactagacactaagaatacttagtgaactcccctcacccatctactggacaatactctagggaattgtcaataacagtaactcacaggtatgataaaattctcaaactgaaataaacatgggtcaattttattaggttggtgcaaaagaaactgcattttttgcgattacttttggaatataaagtaaaaacaagctgttagaaacagcaaaccaattgccaatcaaagacctttagttttacatggtgttcaataaatacactgaatgaagtgacacagacacagatctgtggtccataaatcacagtgatcacaagtgctggaaacacaggtagaatacagctatcacgttttcactataaattgtacttaatgttaccttattgaacatttgcatatttttcaaaacacattggctttccctgatatggtggccatctggcccctcagatgtatcaacatcctacagcccatcgccttggttgttcactcctataaaagataaggcacaccgtttaccattttagacatacagaaggtccacgctacaattacctaaaaggtcttccgagattatcacaatctggcaagttctcttccccaaacctacaaagctctataaagctttaacaattaacaaaatctttgttacattaattacttttgttttattttcatctttaattaagctgtaaattttttttttttttttttttttgagacggagtcttactctgtcacccaggctggagtgcagtggcaccatctcagctcactgcaacctccacctcctgggttcaagcaattctcctgcctcagcctcccaagtagctggaattacaggcatgcgccactatgcccagctaatttttgtgtttttagtagagacgggttttcaccatgttggccaagctggtctcgaactcctgacctcgtgatctgcccacctcagcctcccaaaatgctgggatgacaggcgtgagccaccacgcctggcctgtaatttttatatacagtaatattcatctttttcatgttcagctgggtaagttttgacacagttgtgtaaccactaccacaaccaaaatatagaagagttccaacactcaaaaaattccccattgccacactacaaccaactcctctcccacctctacctcttggcaactactgatgtgtttcccagagtctgtatgcttttgagtctagcttctttcacttaacataatgcctttaaagatgcatccacttgctgcatgtattagtagtagtatattttttaactgatgagtagtattccattgttatggatgtatcagagtttgtttatccattcaccaattagggaaatttgaaaagcccacatttttcttaactgttaaaaaagaaatgctgctacaagcagttacatataggttttttttctgaacctaagtttctgtttcacttaggtaaatacccaggagtaggtcatatagtgtctgactctaagaaactgctaaattgtgagatgactgcttgagaccaggagtctgaggccagcctgggcaacacagcaagatggtatctcttacaaaaaggaaaagcaaacaaaagtatcaaataaaaaggccccataggatagcatggctcagattatactgcaaccccctgcctaaaatagttcatccccatccctcctcagctgatgcctcacgttagcagtaggagacagcagaggcacagggcccactccaacagagcccacctcccgctgtaaggagggcttcacgcagccctgcatcacaatgccagcaagagaacctgtgacagcagtctttccagggagacaatgtaggccaacgcctcatactctgttcagctcagttagcacacagtgaacccagttatccatcatcacccaaaccctctcctacatcccactttcaccaccatgaatgccctctacgttccaccagccccagaacaccctcccccatccatatgcactgaaacgttaagatctgccatgtctccagaagggctgctccttgccctaacaggactggctgcccagtgggcactcttcctcctgttggaactgagaatgagcctctgtttctctacagtcctgtgttctgcatggcctgcatggaggtggggccacacagtctcaccatcccaatctgaagactgggaagttatcttcctaaacctgcaaagctctatcaagctttaaaagttaaaatctttgctacgtcaaccacttttgttttcattttttattatgagtggagtcaggtggaagagcctgatacttccaagtaaaggatctaccttaaggcttctttcggatatcctttatcttctcattttttaaggtctaccaaaaataatctgaacctaaaaagacactaaagctaacacatatattgctagctaaggaaaattagcaaaagaaacattaagaaattaaatatattcatcttttagtctgttgtaccacagacactggagagatataacggtcccatcacctcacaagaagcataactcattttgacacaatctttagaatgtaatgggatgaggcctggtgccgtggctcacacctgtaatcccagcactttgggaggctatggcaggcagaccatctgaggtcaggagttctagaccagcctggttaacatggtgaaatcccatctctaccaaaaaatacaaaaattagccaggtgtggtggagggtgcctgtaatctcagctacctgggaggctgaggcaggagaatcgcttgaacccaggcggcgtaagttgcagtgagccgagatcgcgccactgcactccagcctgggtgacagagagagactccatctcaaaaaagaatacaaaacaaacaatacatagatctaaaatatttccaaaataaaaatcattccttccagtcacaagcatatgaagtgcccatcaaaaattaaatataataaatatttaacagagaaattctttatgcttcaacttaattcaaatgtacaaattaatttttaaaacacagtattagcaataattggccgggcatcaccatgtacagatacaatacatggcgtgcatctgtaggccccgctactcaggagggtgagacaggagaattgcttcaactcgggaggcagaggctacagtgagccaagatcacgccactgcactccagactgggcaagagacagcgagactccatctcaaaaaaaaaaaaaaaaaaaaaaaagtatatatatacatatttagaacactatgtgcacatagaaaacttgtgtgacttgtatagttatacatctgacatcatggctgggatatactaatatttcaacacaaacacaaatgtgactataaaacaaaactgattttctgccacgacttatggaaacagaagaatagccacaggaggaatgtattgtaatattttcatttgtactgtaaccattttcaaggccaaaatacaactaatggaaattaatgcacatctaagcttcatgtcagtataaaattaaaaatgacctgagtacaacctacagaatgggagaaaatttttgcaatctacccatctgacaaagggctaatatccagaatctacaaagaacttaaacaaatatacaagaaaaaaatcaaacaaccacatcaaaaagtgggcaacggatatgaacagacacttctcaaaagaagacatttatgcagctagcagacacatgaaaaaatgctcatcatcacta

SEQ ID NO: 586985 - DNA, 4001 bp, Homo sapiens
aatagtggctgatttctaaactttaaaatcatgaccacatgcgtcctccctttccttcaaataaccaccagagtgtaggtaagtaaataaataaaatcactaaaatatcttagaatatctttccttacagaatgtattttaaccagaaaacctcatccactcctaatttgtttctcaataatattcatccactctgtccaaccctcaatttatcagtaaagaattcatgatattccaaaaagctaatgtaattattactgtcatctcattaagtgtgctcttcctagtaccaaactctaacattacagctgatacccagctcgttcactatgcacaccaccctcttctacccttcccatcaccaccattttactggcagaatattcacaaggctgaagactgtttctcatctcagcaaacagaatgcttaagatcagatggctagccacaaaccaaaagttagaagccacacaaaaataaacactagcagtcctaaaattttctactttcagtctctaacaaaagcagtaacatcatttttatttgtgatgccctaagttagagccataagctttttcccctgattatactaataaatcaatttaaaatgataattttacatcagattatgtccttcatatactagcatactttaaataaatccattttaccatggtaggttcttcaactcattttttttgtattttttctgtatcattccttaactaccacattatttctccattatttttctaaatattacatctatgaacaaaaaagataaccctgcaaaccctagaaaagataaatcaacatataccttaagtataaaatatcaatattaagtataacctattaggtaaccaagagaaaggtaagcatcaactgtatgcccaggaatctcaatttaagacatcatgtagtatacactattttggtaaacagaactgtatacaatatttgcatatcaaaataggcaactatagccttatttctgacttcagataaaaatatcttaattctttttataaggcaaaacagtcattttaatgaaatatctcttttcagatataatcatatgattgacagataaaataattgctttaaaaatacttctgagtcattttgtccttacctgcaggcatgaaccattactgcatgcagtgactgttccatttcctagcacagacttgaagaagcatcatatctctcttacagaatgtgactaatctgtgggtttgcaattcctaagctatttacaaatggcactcccttaccatataagaataaatatttattacaacccaaaatcaagtatttttaacctacattttacaaataaccttcgtaattctgtagagcagcaacctcaacatataggaagaaaacctcacagcatttccctttaaaaaagcaagatttttcttttctgctttttagctaaattatttttaaagccttcaacagctgtcacacatgaaccagcggtctgctgtgttatggtgtgcatgctgcagctgatcaggctccactatttttcttaaaaaaatcaatcaccctttgcaaaagcagaacagcttgccccaatacacatcttcaatacagcacaataccagcatgcaggacaatacgttatatagcaaacttgacaagaaaaaaaaatatgtcctggtttgtttcttagcaatgctacaccattaattgttcatgcaagagatgtagctgtacctttctgaagaggacgacttctcagagttaactgacatcagcagctcaatcttctgcttgatttctggaaaaatcagaaaatattcacaaccaagattgcctgcccttgctttcaagccttatatcaagagatttttcttctctaatcccttttgttcagaatgaggccacaagattcgcagtacttctgttaggactgggattcaatggtgctataaagggaaaaagctccagaggcatcaggccttgctaaactatgcacatgactgtttatgaaagcaggaagtaccatttctttaaagcagaggggtgttttcttttttaaggtagaactagcatggttctacaagatgattttcaatttagcaaaataaaatacaaacaagaaatcttgaacatctgaattaaatatactagataatttgagaagcctgggtaatcacgtcacaggctgtaataaacagatatgcaacccttggctgtttctatttcactagccctaaaaaatatggctcagtgaatcatttttgtcacttaagaatgaaatattaaaccagaaccccgatgtatagatttcaaaatgtttaacctttgttttaatttcttgattgtgtttaattaaagacacatttaatatctagtgttcctaactcctctagaaagagacttctgattttataccttaattttcccctcctccttagcagtacagtacaagtgaacagcaacacccatttaccgagcagagataatatatttgtccttttaggaaaggattgacaatagacatctacaacaggaatgtaagcaccagttcaacttaattaaaagataattgctgatactgatttggaagggagataacagactaaaagggaaggaagggtgaaaataagagagggaaaagataaggagacaatctaacacgtttcctttaaaacatcaacgactgactaaagcacataattttaagttaataaaactgacatggtcctattacccagactatttcatgtgtaaagctgttttcctatccctaataagtatttccaactggatttttaaaactgaagtgtgctttcataataaaaagttcacatactaaaaaataaattagtgccaataaaatgctatcaacagtaccaggatttcaaaatagacctcaatagttttttaagcagtaaagcaaattttttttaaaatgttgactatataaatcaaagttgaatatgagaagatgtaaaggaaaaaggaataaaaattagttccataaaatacaatggacctgtacagaaatatcctctcagcgttgttaaaataaggatttttcccaaatttttaagcttataacttcaatgagcattataaaagcggcatgaatacctgatgagagagcagaatctaccacagggtgtagccaagctgccgagccactgggagagcagagcacagcgcctatagctggggtggtgctgagactcaccttgaggatcaggcacatggcgccacagtgagccctcagcagggcccctcccctcattttggaaggagcagggtgtcagagctcagactctgccttggatttaggaacagcctcctctgcccttttttttttttttttgagatggaatttcactcgttgcccaggctagagtgcaatggcacaatctcggctcactgcaacctccgcctcccgggttcaagcgattctcctgtctcagcctcccgggtagctgggattacaggcgcccgccaccatacccagctaattttttgtctttttagtagagacagggtttcaccatgttggtcaggctggtcttgaactcctgacctcagatgatgcgcccacctcagcctcccaaagtgctgggattacaggtatgagccacagcaccaggcctcctctgccatttttaatagctgtatgaccttggagaaattacttaaactctctaaagcctctatctcctctcctgtaaaatgaggataataacatatatctgaaaggctgtggcaaggatttaatgaaataacccatgaaaataaagtagtattgtgcctgggatgccatgagccctccctgcttcatctctcaataaatatttactgaattagttaatgaaggataccaggcctgtccaatgttaaatggtttttccatagtttaaatccaccttctccttcttatcatcaacctcaacatccccatttttatcactgtagtgttattgtaggtgggaacttaactttaatctgtatctcagcctccc

SEQ ID NO: 586986 - DNA, 4001 bp, Homo sapiens
aaaagctgagtactgtggctattcactaagtcttcatcaacataccacataaatccaaactgcggcccaccaaaaaggccctcgaccattaggaaaatcatactctaatatatgcaaatacaagacacatattgacttaattagaactgtttttccacatgtacgtaaaggtaacatgcacatatacgtgtctatttgtatatacatgcacacatagccatctccgacactggggtcatactttttccacttgtttttatgtttctgagtataacagactacgtggaattaaatcaatgctttgaattaagagctgtgattaaaacacagtacttattcagaatcctaaacattacagttctccttaccactgggtaaacttccatggttcaccaaaggaaatctcaaatttaaggttgtaattcacttgaaagctagcactaatttttttaaaagcaaccaaaactaccaaaaatccagtccattttaacatcttatgaattcaatatccaatttttaccgaccaattagttcttcaactctttaggaagtgctttccccttactctaatggttttttcttttttttttttttttaaggtatttttaagtcactatccacattttgtgaaactgaaggaccaaggccaacgagaaggggaaaaaagtgagcgtgctgcgacgtacccctcaaaggaaacaaccaaaaatgtttctggattttattaaagataatgctggattctcgttccccacagtaccaaagatgccacacagagtattcttgctcaaaagagcgaagcaattaatctagaggaagagataacgatgtcgaacgctggtaaatcaaaaaaattaggagagaggagtggaaaaggagaagacgcggcggcgctgtgcggtctcggagcagctctccaggaaagggttcttgggcagcggcccccctgctcgggtgagcggccaggctggaggtggccgccacgggcgcgttttccactccgaccggctcccgcgcacacgcccaccgccctgcgcagcccgcgaccccggcgcccgcagcgcacccaagtcacgctcaacccgagcggaaagtttcgaatccaaacccgagagccgaaacgcacaggtctcggggctgaactcgcgccaggaacacgcccgaggcaaaccacttgacaaccagcttaggttctcagcagaaaggccgacaggcgggggccggggaggaaggggaggcgagacacacgccctcccgcacactcggcccctccgcctcctcggcccgcggctcaggtgggagcaacgcagccgctgcactcccgcagcgggcgggccggagcccagcggcagacgccggggccccttccggaaagggccgcgacccccgggccagctcgcgggcaagggacgggtgcgcacgccctgcccggcgcctttccgccggcctcccgcccgccggccggtggcgacccggggcgggaggtcgcggggtcgaggctccgtgatgctagggaaccggccgcggcccgcgcgcccctcccccgccgccgcccctccccccgggccgcccgccgggggcaggagccgagcgccagcgtcccgggggaccagcccgcccgccggcccggggacccggacaactttcccctgcgcggccgcgggcgcccccgacggggcgggggtggggaacggggacaggcgcagcgtggactcactttttcggatgtttctctcttttcggcctccgctttcgggcctgaatggccagcactggggaagagaagacacacattaacggtcgggccgcccgcccgggctggccgcgtggcggggagagggcgcgccgcgggccactcacctttccgggagctcattccgacgcggcggaagcggggcggggggcttcgcgacggcgacgcgggcgccgagacgagctgggctgcagcctccactcgctccgccggccgggaggagacgagaaccgcgcctgcgccgccgccgccgccgccgctccagcagggacccagcaagacccgcccccgtccggccccgcccccgccccgcccccacccgccggccccgggggtcgggaccccagcgccgcgcgcccagcgccccgcgcccccgccccacccacctgtgcagaagtggccgccgcccatggccgcgctggccctcggcctcccccaccccagcccgcggcccgggcctccgcctcctgcgatcctgcggctggcccaggccgcccgcctctcccgggcaccggacccgcgggaccctccctccccgccgcggcctctcccctccgcaccccggccggtcgcgccgcccgctgctccatgcgcccgtccttggccggcgcctccgcgggtctcgcaccacctctcttcccgcggcctcttctctccctttgctcctctacatccttgcaaccccatgagcgccgcttcctcctctccggcaggcgtggaaagggcacacgaccaaaagctgggaaacctgggtccgcgattagcggtgtgaccttggagaagtcattttctctcccacctctaagtgccctccaggattgcatgagtttaatgaaggaaaagatacagatagcattcaaggtaggacaaaggttttgcacatgaattgaaactcgcttccgtaaacaccaggtgtataacaattcaaaacaacaatcacaccaagtagttattttctgcatcctacaatgaggaaactgagtcccaacgaggttaaaaagtttaaccagccaggatcgaaattcaggcctggccgtcgacaaaccaccttatcaggctgcctacaaaagatgtgaatcaagttgatagtgacacaaaaagataactgcaatgttctcttatttatgtaaataattacaatagtttttgaaagatacgcattctgactattaactccctcattggtcacacaactgtatctttgacaaggtggcttacactaaggatgataaatcagaacgggaaactctgcttggattttgaagagtccttaactttttatattcaaaaaaatatcaaaccctatagaaaagttacaaggaaaatacaattaacagccaaattaacccatattcaccaatttttaacattctgccacatttgctatctatgtgtctgtgtgtatggtttattttgctgaatcacttgagtttttgtagacactgttaccctttatccctaaatatttcagtacatatctactaagaataaagataatctcccacataatcagaattccatgatcactccaagaaactttcatactaatacaatgtaatcatctgtaacatacaggccatatatattcaattttgcaaaatatcccagtaatatcccttgtcgctgattttctttttttcccaattagtctaccattaaggatcatccgttgcatttaattgtcatgtctttttaaacacctttagtctagaatcattcttggttttgtgttttggttttctttctatttatttatttattttgaaatggagtctcactctatcacccaggctggagtgcagtggcgcaatctcagctcactgcaacctcagcctcccgggtccaagccattctcctgcctcagtctcccgagtagctgggattacaggcatacaccaccacatctagttaatttttgtttttgtttttttttttttttttttttttttagtagagacagggtttcaccctattggccaggctggtctcgaactcctgacctcgggtcatccacccacctcaacctcccaaagtgctaggattacaggcctgagcctcggcacccagcctttttttgttttgttttgttttgttgtttataacattgacttttttgaagaatccagttccaccattttgcagaatgttccctgttttggatttgtctgtttccctatgattagattcaagttaaacaattttgttggctatactatagatgatgttgtattcatcttagtgcatcaaa

SEQ ID NO: 586987 - DNA, 4001 bp, Homo sapiens
acctgcctcaggctccccacctgtaaagctggcatcataaatcaagacactggcattgaactgggccttgatactcagaggatgggacaggtcatcagtaactctcctgcctccaggaggacagcgcgagtggcttcatgaccttgggaaagtcactcaagcttcatttctcagctatgaaatagggacaatgatgccttcctcatgaagcttctgtgaggattagctgagtcaaccgttgcattgtgcccagcatggagctgggcatgaggctctcaaccactgttcatctcctctgggaacagaaaaatgtgcttcaaatatcactgaacactattccacatttatccagctcttctttaagaaattcttacttgtctcctatttactaacactcacccagcattttataccgtaaaagtagtctcccatctccttatccagattatttctttcaacagcaaagtagacattgctaacactacacctgttttacagattgaaaacagactcagaaaggtcaatggcttacctgaggtcacataacctagatttgatcccatgtctttctgacatcagagtccatgactcccaacccacatacccctacctcttaaaacccagttgactctttagtcagtcttcaagaatacctcctccaccccacaggagagtgggatggggcataaagttaaggaaccagaaagctactgctgtgtgggaacaatttcctagccagctgggtcctatttttgactgaggaagaagctggcacaaactggggccatgaccttaagatgctccctggacagaggaacttgtgcacgtctctccgtcaaagcccagcacctgccttttctcttgccatgggacaaaagaccagctcaagcccccgatgctagggtgagtgaggtcttaggacagcgagaagttatggctgggatagggcacaggcattgaagtaccacgtcagaccttggtacaaccttcccttcctcccactaaatctctccccacaatggatctgctgtcaggagtaggaactgcaggaggcttcaacactgtccaggcaggagccctgggagggagggggaggcggaggcaaggcagaggctgcgtcttttctcagctctcttctttaccaggaattcactctggcgcaggtctaactctgggctagaaactctctctgggcgtccgtggttggggtggggggtgtgcacagagaaccccctcccaaattcctagtagctattttctcttctgtgtcctccatcctcttcccagtgcaagagtaaatgccatcctgtgagacccagttctccttgccagctcctgcctccctaggggcatttgggtagccgggaaaggggccaggctgtcccctgggccggcacctcctgctggacagaggcccagcatccaggtgggggcctgctcccttcaccagggccagtgaccagcatctccacagggttactgcatcggtcctcccttccctggggagcaggtccttctcctcagtgggactgcggttggggggcctccctggcaccctcatggactaggccatggtcatttatgcccaggggagtcctgcccatgaccccaaaggtctccactgtctccatccctctcagtgaaatgaatgttcctcatctctgctccccgggcgcctggcacccccggacagacgccctcgccgacctcccacactgcccctctgctcgggggagcctgcagaccacgggggtgctggggaggcccgagcttccacccagccccagcccctcggggatatgcccccgccccacaggcgctctcacctcaccgctgaccgccgcgatctaccgggcgctggggccaggccctcgggtcccgccggtccgggctgccgcctagtctgggctgagttgggcagggcagctccgcggcccccacggccccgcaccctctgcctccccgcgggtgctgccgccgcttgctgaaatgctggacagcgcaccgccaccgaggcgcctctctgctcgcccgccagccagagcggcccagccccgcgcccgcagcgccctccgcaggcctggaggaacgcccgcagcggaggcaacagcccgggcggctgggccgggccgtctcccggccggctccccctcctccccgcccccttcgcccccctcccccccttcccctcgcccctcacctccccacacccccgcccctatccccagcccccggggacatctgtttcccccacttgcgagaggaggcatgtcagccctggaaggcgcctggggcaagggaggttattagtttggatctgggaaatgcagtcggtgtgcagaggcctcgccaggacactctcttcccacccagtgttaaagaaggcaccaggggctgggcgcggtggctcacgcctataatcccagcactttgggagactgaggcgggaggatcacttgaggccaggaattcgagaccagcctggccaacatggtgaaacccagtctctactaaaaatacaaaaattagccaggcgtggtcgcaggcacctgtaatcccaactactcagctacttgggaggctgaggcaggagaatcgcttgaatctgggaggcggagttgcagtgagccaagatcgcaccattgcactccagactgggcgacaagagcaagacttagggtcaaaaataaaataaaataaaataaaataaaaggcaccagggaggtgaggtgggaggatcgctggagcccaggaatttgaggctgcagtgacctatggtggcgccactgcactccagcctgaatgacagaggctgtcattttttgacaccatctcaaaaatttaaaaaaaaaaaaaggagggtgtagtgtgagagacatcctaatggagacaggagattttaaattatttttttaaattttaaaattttggctggatgcagtggctcacatctgtaatcctaacattttaggaggctgaggtgggaaatcactgagctcaggagtttgagaccagccaggccaacatgaggaaaccctgtctctatgaaaaatacaaaaatttgccagatgtggtggcatgcatgcacctgtggtcccagctacttgggaggctgaagtgggaggaaggcttgagcctgagaagcgaaggttgcagtgaaccaagattgctccattgcactccatcctaggtgacagagcctcaatttgtctcaaaaacaaaaacaaaacaaaaaaacaaaaacaacaacaacaaaaaactttaaatttttgatagagatagggtttgattatgttgcctaggctgtccttgaactcctggactcaagcaatcctcctgccttggcctctcaaagtattgggattacaggcatgagctgctacaccagaccttttttttttttttttttttttttgagacagggtctcgctctgttgcccaggctggactgcagtggtgtgatcatatcttactgcaacctcaaactcctgggctgaagccatcctccttcccttcctcagcttctcagagtgctgagattacaagcatgaaccactgtgcctggccagggggagaggattttgagaatggaaatgctgagcctttcatgttgctgggttgggagtctgggttccacagttcaagtcaccattgggttactctctgtgtgaccttggtctgttcctcccacagctcctggccccctttcagtgagcaggctaagtgaaggaaattcagagttagagacgttgggagaccagagaccttccctaaatagagacattagaaaccaggaacatggagtcccctgtttcaagctcaccattggtgtctccatggctgtgtcaggaggcaggactggaagtgccacagcagccctgacttgagggaacagtggtgaggcacatcaggtgcctggggtgtagattttaggaagcatttgcatgacaccaagaggcatcccttggtctgagtgtatgtttgttgtgagtctttgtatg

SEQ ID NO: 586988 - DNA, 4001 bp, Homo sapiens
ttacccatcattgctatggcaccaacagtggaaatggcaataatatgtaaacattaccacaaaaactaattttagcctcggagaccccctatggtctgtggacatcctgagaaacaggactctaaccaaactagaatatgctaaaatcacacgttatgtccacaactccaagctgttcatgtcactcgtgtctggggaattcccactcatctttccaagtctagccaagtgtcactttccagtgggtccctgacacacaacctccagcaccgctcccctcctttagagatctgttccctcaatgcttaccctctttataacttccactatatatactcatttacagaatacatccactgccattctgatcccccatgccaagctcactgtaacaccctaaggtcaataaccacatcttataatcaatccaatcagcaccgccctatgaactctgagattttaggcaaaacagtgacaagaaacctaatcatatattgtcagggaaataatctgacgacctctccagtcagatcaactctatattattatttttctgaagcaatcctcctaaaatataatttacaacctgggcaacagagcaagacgctgtctctacaaaaaataattttagaccaagcactggctcatgcctgtaatcccagcactttgggaggtcgagctgggtggattacctaaagtcgagagttccaaaccagcctagccaacatggtgaaaccccgtctctactaaaaatacaaaaattagacgggcgtggtggcaggtgcctgtaatcccagctactcgggaggctgaggcaggagaattacttgaaccccagaggcgaaggttgcagtgagccaagattgcgccattgcactccagcctgggcgacagggcaagactctgtctcgaaataacaataataatttttaaaagttaggcgggcgtgatggcctccccctggagtcccagcttctcaagaggctgaggcgggaggctcggttgagcccgggaggtggaggctgctacgactgcatcaatgcactccagccagggcagcagaacaagaccccatctcaataacaaaacaaaaaaaagcaaaaaagcacgcttttcgtgcatgtataaacagtgcttcttcatactcaaactcttagctctatagctctgatctgcagagaatttcaaaaaccaagccacagctagttatttggccaacagcaaataggctgaaccacagaaaacggtccaatgagccatttcataggattcgccctcataaaaattacaagggggagaaagaaaagcgacgcgggtggagtgaaacggcatgaaacggggacaagatgaagttaaaaacggctcacctgtcattccaatcgtcccctcgacgtctttcatctctctcgcgggaacggtcgtagtcgctgcgctctcttctgaacttgtccctgcgccttcgatcgtactcgtcatcactgtcacccatggcacggtctgagggggcctggggaccggggagaggcggtaggagtggtgcaaaaggacgagcggaggaagggaccgtccctcgcgggcagctcgcccgcttccctcccgccaaggccagccctccgcggcccccaccatcctaggcctgagaacgcggctccaacacctccactcgccccgagtttctccgcgcccgcccccgtggaccccggttcctctcccgccccagcggggccccccaggctcctcccctcccccaccttggtgcggccgcggccgttggactcgcgctcggacgggctagatttcagggcgacctgggtcgcgggcgcgcgacgaggacttcgaggagggcgagacggagacggagctcttgagtagagggccgaagagaggcgaacaaaagtgggacaaccggggatgggcagtagcgcgcgcagcccgcgctgcgcctgcgtcacccacgcctccgaggcacaaagctccaccctcgcggccggaactggaactaacaaaccgagcgcgaagggcggggagagcagggcgtgatgggaaaggggcggggatctcgcaagtctcgcgcggcttttcgagacgataacggctcgagcgttaggaactacgggacctcggctgggccaagcgcggcctcgggaggcgaacaagccctctgggcgcgaagggagagcggaagtcgaggatcgcgcgaccccagatgtgtcggggtcctaagacggttctcatccagccatgttccccccacgggcctcctgacctcaccgggggtgatttcgtcccctcctcgggcagggcgtgggcttgggaagcgcgggcgcttaggggatggaaggtggaagcaaccattttaaagcatcgtatcccaccattttctgctccaaatatccagccaaaattgggtgccacagtgcgcactaaatgcaaagtccgccgttcctgcttttcctcgacaaagacgccccgtctttaagtaaaattggcagatctcagtcttaaccccgctcagtatttggatgaaataggctgtaagttaacgccctaaacagagtatggaccgcccagattcaatggattaccacccccgggagtaacaccaaggcccctctcagtgaattgagtgtgagacttaataggaagaccagctgagatggctcacgcctgcaatcccagcgctttgggaggccgacgtgggagaatcacttgagcccaggagttggagacctgcctgggcaacatagcaaggcccctttacagaatatttagggccaggcacattggctcacacctgtgatcccagcacttgggaaggtcgaggagggaggacttaagcccaagagttcaggactagcctgggcaacatagcaagatcccatctacacacaaaaaaataataactgggcttggtgggatgcccctgtggtcctagctactggggaggctaagccaggaggactgtttgagcccaggagttcagggctgcagtgagccttgattgcaccactgcactctagcctggggaacagagtgaggccctgtctcaaaatagatacatagaggaaatcttgcctcctccctgaggcgtgcttgctcccagcactgagaggagggtagtgacggattacaagagttgtcaaaaaaaactggacctgagtcaaaaagacccaggttccaccatttaagaaccatgcaatctgggggagtcacctctcagctctgacatcctcacatgtaaaaatgcagacagtggccaagggcggtggctcacgcctgtaatcccagcactttggttgggtgaagcgggcagatcacttgaggtcaggagttcaagaccaccctgaccaaggtggtgaaaccccgtctctactaaaaatacaaaattagccagacgtggtggcgggcgcctgtaatcccagctactcaagaggctgaggcaagagaatcacttgaacctgggaggcagaggttgcagtgagccgagatggcaccactgcattccagcctgggtgacagagccagactccgtctcaaaaaaaaaagaaaaaaaatgcaggcagtaacaatgactgggcctgtaatgggctactgggagaatcagatgagacaacagacttggaagtgttttgtaaactcgagggattattatttcttgattggagaaagagaagacagcatttggtgacaaagtcatacaggtggatgtcagggagagtgatcaatcaaaggatgggaactggaactgagaacccagcaggtacttctaggaagactcagcagtcagtggtgacggtggctgagagctcctggatgcgccaggcgctgcaggccttgcacaagatgtgcccatccagcgggtagcagccctgacactcgccctcagaggagagcagcagcccacactcctgttgaaaaagaagcaacaattggccgggcgcgatggctcacgcctgtaatcccagcactttgagaagccgaggcaggaggatcacaaggtc

SEQ ID NO: 586989 - DNA, 4001 bp, Homo sapiens
tttatctattatcaattctaaaactaaatctacaagttatgtaaaattattcccatttagggctgagaaaacacctcagagagactgcatcacctgcccaagctcctgcaggaagtatgtggcaagtgatctcaaggacccagggcccttgacaccaatgctactgctttcccgaagccctctgctgcctccttaatttcaagagctcctgtaaagatgggagtacacatcactgaattcagagctcagagagctagccattctatcagagaaacatttttgaagtggcagtactgttaatataaaaagcagaagtccaccaatcaaataaacaccaatccccagggtgctgttggctatctaatcctatcactaaacttaggagcagagggcagataagaaaataaagatatgagtacaacatactatagaatcaaactgctaatgagaacctgtgtcatgattctggaaatgtcatttgagtgctcagacaagctagacctcataaatcttacacagagatttataataacaatgtctcatttggggcacacaaaaatctactggagaagattaggaaaggattatttaacttggataattttttaaattaaacttttaactcttatttaaagacattttaatactgtaacgttagtgttaagaagcaataactttttcatgtttcacatttcaatacagaaaaaaatagattaaagatacatacaggttaaagtggggatccaagaatataggattaaggtggggaaaatgacagagtcatggaggaactggttcttcattggtcttcacaggaggatggggagtaggagagccaaagaagaatctacaggagctggtgcccgaatgtggtaagtgaggaaaaatggtagtctaagctggctcaaggtgggctagtgtctggaaaagtgaggacccatactaagtggaatgagaaggcattttctacatagtgaaatctctggtgaccactgagacttgagatgctctcttcagtgtggaaagatgggggaagaggaacgtttagcaacacaggaggtagatggtcaaaaaagcaactacatgccttaagaaaaaagttggaacaatgattcctacagtctttaggtcactaaagacctttaatgtcctctcactggttaaattcaagcaacacacacacattttaaaaattaatgattcctattacgtgtgaataaacctgaactttttttttgttttagtgaacataatttacactggcaaaatcgtccccaatcctccatatcaaatgagtatagaggtgggtgggtgagctcaaaggtcttttgcccctgtagttaaaagcctaaagaagtcttctgatcactgtggctgatagtaatacatctcagtattaatacagacaagtgactacctgtaatacaggtcttcgaaacatggcttctattttcttttcttacagtctaatctttaggcttttcctgaaggaaaaaaacaaaataagaaaaaaacattacctcttatggcaaaagtacaactcaccagtcctaaattcctaactatattcataatttttatgcactccaattttgtgaccacaacgtaccaacattcctgcacatctgatgaggattccttcctccctcccaaataaactcacacctgtatgtctttttggtcccaaataacttcctcttcctccaacccatcgacaaaattttgattctgagttaatcccacttccaatccactgtcttctcaaatttcattactatgcaagctcccttagagcagagatttgtatctgctttattcactgccattttctaaacttctaaaaaagttcttaatgcatagtaaggcctccataaatattagcatcaccaagggacttatatctgaaacctgttactgaaaaattactgccttcatctccgttaacaaagaccaagcagcgtagagacccccgggctagccagccacaccatagggagaggtggacaccctttaccgaagatggcgccaccacctgaaaaccgaggagaactggaaggaaatcacgcggtcctccgcacgactgatgaaagggccagacacctacacagaaacacctcccgacccacgcaggatcacgcgcagccaaaacacacgactccagcacttccttcgcgctggctatcccttcctccctcacctgacgatctaacccgagcagcccagccacgcaggggatcacttccggcgcacagggaacgcaaagctcgccagaggaaaaaggaaacagaaactccgcaacttgcgccttggaaatactgccggctagcgctgcgggaaacggctccccttaactctgaagttccgcgatcttctctttgtgcgcgggcggatggatcaacgccgccaagtggtgagtttggaaggtttcaagtttagaaggtttcaagtttagaaggtttcaagtttggaaagaaatgaaattatgtgatgaggtttctaactgggcccaggagggggcgaggtaggcaaaacagagactagctctgcctggagggaaaaaaaagcaacatttgtgaccagcctaggcgacatagtgagacctgtctctacaaaaaatatataattagctgggcgtggtggcgcgcgcctgtggtccaagcttctccggaggctgaggtcgggggatcgcctgagccctggaggtcgttgctgcattgagccgtgaacgcaccactgcattccagcctgggcaacagagcgaactctatctcaaaacaaaacaaaacaaaacaagaaaaagaaaaaaagaagaaaattaaaaaaaaaaagaaagaaaaagaacgtcccaggtctgttgaagcactaagaaaagcagaaaaagaaaggggagccagggaagggctggcaggctgtgcaatttaagggagcaccagaaaaactggcaatcaaataatatattaatgtaatattttaaaaagtaaaaattaatgcaggaaatccgggaggaacaaaataagagtcatgtgtaccttaacaacagggtaaggtctgaggattgcgtcattaggcgattttgttgctgtacgaacaccacagaatgtactttgacgacctagatggtggagcctggacacacctcggctctgtggtgtggcctgctgcttccaggctgcaaacctgacagcatggggctgtactgaataccgcagaccattgtaattcatggtaagtatctgtgtgtctaaacatatgtaaacatggaaaaggtacagtacaaatgcggtataaaagataaaaatggcacacctgtatggggcgcttaccatgaatggagcttgcggaactggaagttgctgtgggtgagtaaatgagtgagtggtggcccaacatgaaggtctaggacattattgtacccactaaacacttcataaacactgtacacttaggctacactcagtttataaaaaatacttttcttcctttaataaactttcactcactataactttataaatcttccaaatttttttacgttttaactgttttgtaataacaattagcttaaaacacacactgtaccactgtacaaaaatatttttcttatatccttattctacaagcttttttctacctttgctttttttctttttttttttaactttttagccattttttaaaaaaactaagacataaacacacacattagcctaggcctacacagggtcattatgatcaatctcagccttccacttccacatcttgtcccactggaaggttttcagaagcagtgacacacagggagctgtcatctcctataacagtgtcttcttctggaatccctcctgaaggacctgcctgaggctgttttacagttaacttttaaaaaataagttaaataataatataataaaaagtatagtaaatacataaaccagtgacatagtcattattaatatcaagtaacacatgagtaatacattgcattctgatgttttagcagg
